United States Patent Application Publication US 2007/0298491 A1 - sequence listing, part 2

SEQ ID NO: 847 - DNA, 1247 bp, Homo sapiens
gataatgtgagcaatctccagccacatacagaagtatagaagaatctcacaagtacaatttgagttaaaaacaaaaacccagacctaaagatatacatactctgtgactccaaatttaataattgctcatagaagtcaaatagaggttaccctgtaagaatgggttggtgactagagtgagcacacccagattctggggtcctagtcatgctctgtgtcttgacctaagtatacaggtacatgtaagtttgtgaaaatgtaacaagctgtatgatacgatttttctaatattgctcatctgtgtttgaaacatatacttcagaaaatgttaaggaaaaaatagaaaaggaaaagaaaaatagaaaacctaaataatctagtacttattaaagacttgaacccgtcataaaaagcctttccacaaattaaatactaagccaagcagacttactaaattctaccaaaagctaagaagctatgtcaattttatacaaacttttcaactaatttatgagcattaatttgatacccaaacctggaagggactatataggaaaggaaaatgataaagtcagtcttaattatgactatagattgcaagaacccttaccaaaataggagcaaattgaatcaaacaatttttttaataaggcaaaatgtaacaaccaagttgggtatattcctggtatgcaacactgctgcagcatttaaaaactaatcagttatggagctagagggaagatggcagagtaggaagctctgggaatctgtctccccacccagacgacaactgcactggcagaatctgtctgatgttactatttcggatctctgttcaccatttttatcaggttgggaactctgaagtctattgaaggcttatgacttccaggggaaggtttgaaaggttaatttcagctcttaacatggtagcaactacctgttcgtctaccctcagtcccatagcatgtagccatgtacacattttcaagcagctttgcatagggtttgtgggagccagtgtggacaataaggattctgtcctccaaatagcaggaatctttgctctgatagctaattactgcttctgatcatggaggtgcagccatacagtgagccattgktgcaaaccccactgscactgktacaagcccctccacttgaggctgaagtgacttaaagatttaaagggccattgccttcagtggtgattagtgaggagaaaaaaaaaaaaaaaaaactcgaag

SEQ ID NO: 848 - DNA, 1830 bp, Homo sapiens
ggcacgagaggaacttaagaatttaacagaattagaagatgaacatttggcaaaaagggcaagacaaggtgaagaggataatgagtaagtataccaaatgcagggtttttttaaaccatgaactttatcatgttacattcctgcttgtaaaactttcagtggctcttcattgccaacaaagccctgcgtgatatttacctaacctcttcagccatattgaatgttctttattccccaaagagatcaaattctctttggctgtgcctttgtatgggtggttttattgagttagagtggcatttccctttcacaaactcccacacagccctcaagaatcagttgaaatgttactgcctttattaggcctaagacccctttttaaatgtttccttagcttctagttacagatatttgttataatccttatcatatcatatggcattgaaattatttgcttacttgtttgcattaccaacagtactgtctcattaccttctttttctgccctaatacaatatcagatatataaaaaggtgctgattaattttgtttaagaaatagtattgagagtttaaaaaatagctttattgaggtataattgacatcagtaagctctacttttttttttttttttcttttgagattaagtctcactctgtcactccagcctgggagatggaacaagaccctctctcaaaaaaataaaaaaataaaaataaaaggttttatttaagactttttttctcccttcttctctagatataattgaccctgcaatcctgcgcccgggccgcctggacaaaacactgtttgtgggtttaccgccccctgcagatcgccttgccatcttaaaaactatcacaaaagtgagtaaaggaaatggtatatttttgtatatgtttctcttgttttaaatagagacagttataagaggtagtaattttcgttgactgattactttcttttctgtagctgtgtttgcccagcctatatctcccaaagggaaggtgaactgatcttcgattattactttaaaataatttacatcagatcatatttgaaatggagtagaaacttttggagaaactggcactttgggagggcgaggtgaacccaggagtttggtaccagcctgggcaatatactgagactctgtctctacaaaagatagaaaaaattagccagatatggtggcacccacctgtgggaccatgtactcggaaggcttaggtggaaggattgcttgagcccgggaggctggagtgcagtggcgtgatcttggctcactgcaagctctgcctcccgggttcacgccattctcctgcctcagcctcccgagtggctgggactacaggtgctcgccaccacgtccggctaattttttgtgttttttagtagagacggggttttaccgtgttggccaggatggtctcgatctcctgacctcgtgatccacccgcctcggcctcccaaggtgctgggattacaggcgtgagccaccgcaccagaccccgcaagaccctatatttaaaaataaataaataagtgggccaaacacgttggctcacgcctgtcatcccagcactttgggaagccaaggcaggtggattgctttgacctcaggagttcgagatcagcctgggaaacatggggaaaccccgtctctacaaaaaatacaaaaattagctggacttcaatggctcatgcctggctgaggctggagaatcccttgagcccaagaagtggaggttgcagtcagccaagatcgtgctactgcactcaagcctgggtaacagaccaagaccctctctcaaaaaaaaaaaaaaaaaa

SEQ ID NO: 849 - DNA, 977 bp, Homo sapiens
ggcacgaggacgggccgagcgggtcggggcttgccgtttgactggaattgccagaatggcggaccgagccccacgacaacctacctccctgggctcctcgccgcagcgctgcggctcgcctccctctgctcctcctcctccgccggatcgcggcgagcggatcgaggactgcctagcgcccctctgcccaccggtggttggaggccgcggcggctgcgcgttgagtcgtttcctgccggttgacctgagcctacttcgcagtagcaggaccgctgctgtggagctggtcgcaggcggtgtgtgccggtcgcctagtcaggagaactagtcctcgactcacggtgagggaatggacgacacgggtattgtaccgctgagggaaaggagcgggactccggacctccaggaggtagggagtgaggccagtaagaccggcgcgcctccggggggattcctccccgggcgttgagttgcccaacctgggacccgaggaaagatccggcgtggtggtgtgctttttgttgttgttaaccctcctcggatttctcgaatttcacaccactgtccatatgcgatgatgtttgtttgccccttgacgcacttactcatggatggtacttcttcagcctcgttagacagcctggtgatggaggatgaagaaaccatgtgcttttcattcagttctggacttagtctcccttttcttccttcagcaagttatttttgttagttccttatcaaaaagtgtacataaaaattaggcaactccaaacatgcctccagggttaatgtgtgaaataataagataatatatgtaaagtggaattagctcctaggcatagggaaagtgcagaatattgccgtgttgtcatttacagttctgttgatgtcgataacgtttgtgggtgtaattggtagtgttctgtccctccaaggagttaataaaacaaagcaaacataaaaaaaaaaaaaaaaaa

SEQ ID NO: 850 - DNA, 1893 bp, Homo sapiens
  misc_feature (1842)..(1842): n equals a,t,g, or c
gagcagacggctatggttttgtgtttgtctcttccaaaactcatgttaaaatgtaattgccattgtgatgatagtgggagatgggacctttaagaggtgtctaggtcgtgaaggctcttacttcatgtacggaccaatgccattattgtgagagtgggttttgccctgtcttgctctgtttcatgccctttctttgcacttctgtcatgcgatgccttccaccacattatgacacagcaagaaggccctcacaaggtgccagcaccttgatatttgacttccagcctacagaactgtgagtcaataaatttctgttcattataaagtagtcaatctcaggtattctgttacagcagtacgaaattgattaagacagctaatttattcaattaggcagaattcatctgcttatatgcaagagtagccaggggttcyctctttatacacataccttaaaggatgggttatcctgaaaagcagatatgaagaattgtgaaaaagagctatctcaacagttagctgtggagtgtataatttaatacaaataaatacaattgtaaacgttcatgtatakttcagttaggkttttgttttgttttgttttgttttgtttttttgagatggagtctagctctgtcacccaggctgtagtgcagtgaccgcgatcttggctcactgcagcctstgcctcctaggttcgggcgattctctgcctcagcctcccgagtggctggtattgcgggtgcccaccaccacgcctggctcatttttgtatttttggtaggacggggtttcgccatcttggccgggctggtcttgaacttctgacctcatgatccgcccgccttggcctcccaaagtgcagggttacaggcgtgagccactgtgcctggcccatagttcagtttttaaaatgcattcagacttcaattccaaaccgaatgactcatttaaatgttgttcacattttgttgaataatatttttaaagcagtaacaaccgtatatccagttggcctacatttacttctgaattcaagaagaatagctcataccataaatgacaaagagcagcacttacaattggcaacatactgaagtcactcactctcaactaaaagatatgatcatttctagtatagctttttacttttctttattttctttcttccttttttctttctttcgttccttttttttctagaaacatttttagcatacgtctagccaatcaactaaatttgctactcatgttactttgctaacattcttcaaaacagtaaatcctacttaggtctgataatttaatttctggggtatgcatggtccgcatcttacaataaaagtataatttkkattwttaataatgcagaaaagctgataggaggctattgctaatctagagagttccatcagctacaggaaaatcatggccaacttgcttactcacctatgtagtcacttagaattgtgggtaaaatttaatttgtacaattgtttatttgttgagctgtatctttaatgctgcatagctccacccaagaatccaggtcgtttttgtttattattttattatataactcctagaaaaggggaatcatgattataaaacaaaacgaaaaacaatctgcctttatggaataaaatgattattctgaaaatattctataaaaacataatatatatttagttatttttcaaataaatgatgtagagcagggttttcagcactctctactaatcacatctactgtggaggctgaggcaggagaattgcttgaacccgggtggcagaggttgcagtgagccgagatcacgtcattgcactccagcctgggtgacnacagtgaaactccgtctcaaaaaaaaaaaaaaaaaaaaaaaaaaaactcga

SEQ ID NO: 851 - DNA, 847 bp, Homo sapiens
  misc_feature (765)..(765): n equals a,t,g, or c
  misc_feature (812)..(812): n equals a,t,g, or c
gaaatggagaagcttaaggcaaagggtgactctccggcctgaccctcactatgaagatatttatgtatgttcccataatacttttcagatcccaatgtctgtgtttatccttgacagaaataatagaactgctgtcttcttccaagttaaacaaaactttggagctaaaagctagctaggtcaagagaaacaaaatctaatcctcacccaattgagagactgaatatacaaagaatggccaaacctaaccatgacctcctacccataacctcttcagtaatcggccagaagggtcaggacttaatctttaaccggcagcttccctatttcttgcccctgcttccagctctgggccaatcagagaaagccaaatgtgctcctcacaccaatcgcgtaagaagccctgcttctagtatagccctcctccaacttcccgatgccaacatcctccaatcagagccaacctgaagtttctcccttttttcagtatatgtaaagcttttccactcccctgcctgcctatgagtctgttaaatcaagtgatgggtcgcggctgactcttgccagctctgagtaaatagcctattctcatttggtggtcgttatttctacacagccggtgggaaggtggtggagaatagtgaagactattcttaaggttaaaaagaaggttcggcttacattttttttttattttaaatttacagcatggcgtctccagcccaggttttaaaataccttctaatgtaaggaaatagccctgcnccttgtgcccatcctagagagaaaatggtttcttaataaaaaatgtntgaggcaaaaaaaaaaaaaaaaaaaaaaactcgag

SEQ ID NO: 852 - DNA, 1230 bp, Homo sapiens
gggcgaattaaccttagcatatgatagttcttttagtgtttcccaccacccttttcagagtaagcaattagacgtctagagtttcttttcctctatccctttgggtaaatagcaaccagtggtgcccgccaccacgcctggctgattttttgtatttttggtagagatggggtttcaccatactggccaggctggtctcagactcccaaagtgctgggattacaggcgtgagctaccacgcctggccaagaggcagtttttgaattccaaaattatggagtgatatctgggagtcagccttcatcagtgatgctgcttgtgctttctccagcttcttgggagactgggcaccaggagacttggaggttcttccctatcttacctactcccaagtatgcatgtttttgaaaaaaatatttaagatttctagagaagatcacaatcttctccagtgtctgtgtaatccattgtggagcagtttattacagctgacctactgtctcctgtctgttttaggagcggtgacttaggttatcaccccttagtgttttcctgtcatctgccttctcatctccacctaaaatttagtttttggtaaaagatcatgctatctaaccttgtcatcattgcaaaacaaacttatttatgtttatcatgatgctgacattagcaagctgactcatggtttaatgttagtgtttcttactactggtcactggctgacagtcggaaaagtgatgccctatttttttttttttttttttgagatggaatcttgctctgttgcccaggctggagtgcagtggtgccatctcggctcactgcaacctcttcctcccaggttcaagcgattctcctgcctcagccacctgagtagctgggattacaggcacccgctatcatgcccagctaatttttgtatttttattagagaccatgttggctagactggtcttgaactcctgacctcatgatccgcccaccttggcctcacaaagtgctgggattacaggtgtgagccactgcgtccggtcctgtctctgtttttatctgaaattatgttagcctttgcctagttatggtgaattaaccttagcatatgatagttctcttaatgtttcccaccacccttttcagagtaagcaatttgacgtctacagcttcttttcctttatctctttgggtaaatagcaaccaatccaacagcaaaaaaaaaaaaaaaaactcgag

SEQ ID NO: 853 - DNA, 2575 bp, Homo sapiens
  misc_feature (2555)..(2555): n equals a,t,g, or c
  misc_feature (2557)..(2557): n equals a,t,g, or c
  misc_feature (2569)..(2569): n equals a,t,g, or c
  misc_feature (2572)..(2572): n equals a,t,g, or c
atgggttgtagaagcgtgtgtttgagagaattcagagacatttgaaggctgctgtgtgcatgtttgggggtctgaaaagacagttgtgtgcatggatgtgtgcgtggggagaaagaacgtgggtaagatgtcccttcccagccctgagaccactggtcacagttggccacctccaacgggagaccttgtccttggcctagagtcctcccacccttggggggctcctgcctgaggtcctcagaatcccactgcaatggacccaggcagcgcccaggaagccatgctgggcccccgccagscttatcccaaaagcaggggccagggagggggcgacttgcctgcccctgaagcccttgttcccattggccccagtttgcattctgcaggttttccattttagtgggttctgcttttatttcagagacagacatgtgtcttctctgtccgtttccaataggtaaagccatatcagttagactgcaatactttaaacacgagacaaaacaatccatatgtttagggaaccagaaaagtcccctggtctgtcccttctttggggagcagggcctcgacagctccagctcccttgacctaccttcctccccgcaccccgcccccaccttgtgcccctgtgtccagccccccagggggcctgtgtctgtgtctgtgcctgtgtctgtgatggggagccgcctcgcacccctgttgtctgcttgtctctttgtgtctgttatcctgggcaggatggtcattctcaaaaaccctggggtcctgggccagagacaggcagggcccagtccaggggccccaggcctccccagtcccagtgtgcgagccccacttggacacaagtgttcagagaggtccccctctgccacttgacagggaccttcaaacctcgacagtgatgcaaggacacagagagtaccagataggtagcagagaccaaggcgcagggtgcttcagatgagcaagagaacccagtcgaaccagataccccaggtgggccggagggaccccagaccttcagagggctgccctggtgttctccacagtgcagtccctctgtattcccagagtgggatcggggctttcagcccaccctgatgcctgccctccaggatggctggtttagtctgggtccatgtcccagacccctctattctgctccaggacagcaggacttcaggtcttcctgggggtggatataggagaaaatttctgcctggcacacacctggctccaaccactgccaagtgatcactcttaggcccaggggaacacaatgactatcattactgatgcagacctggctgtggagagcagctaatgtgtggcccagagagcctgtctgtgtggagcacgtagtgcacagaatacgtgagagttgctctggcaggggcagratcctcacaggatcgcctgggaggtgaggtgtgtgtgacccactggatgggagggcaatgagtgtgcacatacaaatggggcagtgtgcatgcaacacacttaggggaggagtggccccagaattcagcacgcacacaacacacaagggagagaacccccagatgagaaaataggaaggagcaatcatttgtagatgggtgaaaaaagaatgaggttcaagggagcgtgcaccaggtgaggtgagcgtgtgtgctctcagggaagggcccaggmtcccatgcctgggaggagctgccagagagaagcaaaaaggcggctgtggatcgccctgggctgggcaccagtgacaggtcaggatctccaaacatggacgtcctcccctccaaatccagaagctcccagaaggtgtccttaactgcaaagctgtgcagggtactcctccagatggaatcaggaagtcgagacaccatcccaggtgtgtgtaagagagagagagagaacagggaggatacagaagtattgcagcccagatcccctatcagggggacagctggtgggcaaagcagccaccccacagccttgtggctagagtacagtggggtrgaccctccagccccaatagccctagtacccagctggcagggttgcccacccctgctgtccacctgctccatcctctagggttccacaggcccctgaccgcacagggaggctggggccagcctggtctcccaggcctgaggacatgcctcccaccaaatgtcccctgctccagtcccactcctgtcaccccacgctctgcactggggagaaaacgggaggtgctcgtgctggccctgggtgggagcggggagtcctggtgagaccccggtgagatggaccatcctgcccscgtgggggatcccctttcccacatccgtgctgtgtcattgttgctctgcttcctttcaatgtgtcagtgcctggggggaggggaggagcaccccctcagcccccctgaacctgaccaaaagccatggctgttgctcccccctttgtatgatgcaaatgctgaaatgtacaaaatcaaccatgacaacaaagaaaaagaccttgtacagcaaaaaaaaaaaaaaaaaaactcgagggggggcccgaacccaaatcgncnaatagtgagtcnaanaca

SEQ ID NO: 854 - DNA, 1100 bp, Homo sapiens
  misc_feature (1088)..(1088): n equals a,t,g, or c
ggcacaggtgacatcgccgggggaggttgtgggcaacggtggaggaggagagacgggaggggaccatttgggatggaggggcctcttcagagttttaaaaggcgtttgtggggtggagttgagtgtgctctgggcttggacacttgccgtggtgcccctggctggccgaggagactggctctggccaggggccccgtcctgagaggtcctcagcgtctgactctcggccaggcgccagcaaggaggggccggtccccggggctaccaggcaggcacgtgcacatcgccatcgccacacgccaactccgcctgggttttacaaagtcgttgccttaatgcatgtggacaggaactccctgaggtcgccccatgccccctggctgtgccagtacggacgccctggaccctgcgaacaggtggggcgggcgaggggcccaagggacgggctccagagacacgcgcagggcaggaggggtctcacggaggggtctcgcactgaggcgcccagagctggtggtcccgctggacgccatccctctgcccgggatccacacggcccacgtgtgcccgccatgcccgcgccccacgccattgcagtctgccatcctctggccgtgacggtggctgcagcttccccatttgcgccgttgcctctggctgtctgcacttttgttcatgctccaaagaacatttcataatgccttcagtaccgacgtacacttctgaccattttgtatgtgtccttgtgccgtagtgaccaggcctttttttggtggatgtgttaccccgcacacttcaatctcaactttgtgcaccgtccattttctagggatagacgcccagggaatgaactctagttttctaacagattagctgagatattaacttactcacacggacaggttgatgccagagccgtaagaatgcgccagtgcgggtttgcgggggacttcgggtgtggggtcctgcggccgcgatggccgtggaaggttctggggatccctgctgccacggggacgagttcggacgccaggtggacctgtgcactcagtaaaacgcagtgattcaacctggaaaaaaaaaaaaanaaaaaactcgag

SEQ ID NO: 855 - DNA, 2129 bp, Homo sapiens
  misc_feature (2097)..(2097): n equals a,t,g, or c
  misc_feature (2120)..(2120): n equals a,t,g, or c
  misc_feature (2125)..(2125): n equals a,t,g, or c
ttggcccatcccatcagtgggcatctggctgacgccattcactggacggtccctgaacacctaggaatgcacacaccgtgcttctcagacactggagacgcaaaggcaggaggatgcagtccggtgagaggacacgatctttacctgcacaatcagactgtaagcccagcagagaaccccaggggcgcctgggtacttctcggaggtcatcttagttgtggtggggaagacaaagaaataagcaaacaagaaactagagttactatacaagaaactctcctgagtttgtaaaccttaagcataaggattcagttgacctttttcttggttcatcaatctggaaagaacttacataaagcgccattgacactgtcacctgggagctccatgggccgtaagtctttgacagccaatttaatttgaggtcagagggccttgaggtacacagtcagcactgtttgaacacttttcctgaaagcaaaactcacagctccctgcgccctctgacaacactagctatttctgccagagtaagaacttctattactattttattattgttcatatgtcttttgatgatggttgtgtgacagggggaagcaggatctatttggtttcttccccctccccccaccccttcctttttgtctctctttttttttctctaagaaaatcaccagactagtttttccatcttgagtaatttcttatgtgggacagttttgatcctcattttgaaagcatgcgtgtgcacatgtgtgttgcctgtggtgccaggtgagacaggtggcactaactccagctgcttggaaggcatcccaagggcgcatcttaaagttggagcagacctcccttttccagcccctggggccattagaccacgtgctggaactagcattgtaaaattcccatcccagttccactcccctgaagtgaaacccttttttttttgtgacagtaaatcttaaaaatcattgtctctttatgaacatttcctcagtttcttctctgctgaaaatgtaagccatgctactttttaatgtattttgaattttgtgctcattggaaattgatatgctaatgcctcccccaccccccgccagacttttctttttatactttgtcttgtttttactggggtaggctgggcatgcgtgcgtgcctttagggcagcattttaaacctttgccaaaattgcaaatgggacatgtacattcttctgctccatcctacttaaacacctatcagctatttttatctttaaccttttctgtatgtttgaagtgtgtggggggtgtgtgtgtgtgtgaaagagcgagagaatgatgtcatctaaagttttttgaagaattatttggttttcattgcattaaaattctatcactcccagctttgttttcatttaaaaaaatatacaaagagctttgtaaatacaacacattttatttctcccccttcttttaatgtacagcttttttgccacttatatatacttaaaatattcccatgaattatgtccagttcttcttggaaaaaaatttggttttgaatgaacctgcaaagcatcctgcagcgtgagcagctcctccacctggagctccgaagcatcttctcaggccaaagcggcattacccgtgaatctgtcttctccgccacagcatggtttgaggcgcagtctgttaatatagctgggccatgtcagtgactgttgtgtttgtggggtcaggtggggggcatggtatttgcaaaaaaaacaaattatggctaatttattattttgttgcagtggggttaactgtaaactcatgtaagagtctgtgatttcctcattggttgatctctctctctgtaatcctcattgcaaattttcaccaggacagcgttttttgattagaggggagctctggcacagtatgctttaatttagcaggaacttccagatgatttaaattctcgatgctgtgatgacacacatatgatctttcgtgtttctgagcgactctactttcattgtttgccagcgtggctcgttgctgttgcccaataaagcttgtgtacgttcaaaaaaaaaaaaaaaaacccggggggggccccganccccattggccctaaaggggggngtttnaaaa

SEQ ID NO: 856 - DNA, 709 bp, Homo sapiens
ggcacgagggaccacgggagcatgtctcccccaattacccaggctctctggggagcctgttttcctcccagggttcctgggagtacttaaggcaagtcagtttcgggccatctctcttcccagggaagggggctatctctgaaacacgtctgggaagggatgtttctggccctacccccatctctcctatgggggtttctctgccctgcagcactttaggatgaggctgggcatctctgagttgtcttttctcctaggagccctgggatacctctctctcccgagggtagggcctctggagccatttcttccctgggtcggggctgtctccgggtgttgggagggcttgtgttggccatgagaaagtctcttaaggggcgtctccactggggacttctctgggaggggggactgtgtcccgcccatggggtttcgggcgggtgtgtctgcccatggggaggggagactgtgtctcctcgggttatctagtggggaggggggccgtgtctctctcgtgtgtaggggggtgggggtcggggtgggggggttttgggcgcgtcgggtgcccacattggggtcgtgtttctcttggttcgtgccacttcccactgcctcgctcctcccgggaagggcccccgccccgccccccaccctaccacacattcgaagaacccgtatacaaaatctagacaaaaaaaaaaaaaaaaaa

SEQ ID NO: 857 - DNA, 3145 bp, Homo sapiens
  misc_feature (368)..(368): n equals a,t,g, or c
  misc_feature (2402)..(2402): n equals a,t,g, or c
ggaggaagaagaggaggaggaggatgaacccgtccccgaggcccccagccccacccaggagcgccggcagaagcctgttgtgcacccctcggcacctgcccccctccctaaggactacgctttcaccttcttcgatcccaatgacccggcgtgccaggagatcctgtttgaccctcagaccaccatccccgagctgtttgccattgtgcgccagtgggtgccccaagtccagcacaagatagacgtcatcggcaatgagattctgcgccgaggctgccatgtgaacgatcgtgacgggctgaccgacatgacactgctccactatgcgtgcaaagctggggcccacggagtcggggaccccgcggcancgtgcgcctctcgcagcagctgctggcgctgggcamgaatgtgacgctgcgyagcgctggaccaacatgaacgcgcttcactacgcggcctattttgatgtgcccgacctcgtgcgtgtgctgctgaagggtgcgaggccgcgagtggtgaactccacgtgcagtgacttcaaccacggctcagccctgcacatcgctgcttccagcctgtgcctgggcgccgcaaatgtttgctggagcacggcgccaaccctgcgctgaggaatcgaaaaggacaggtgccggcggaggtggtcccagatcctatggacatgtccctggacaaggcagaggcggcactggtggccaaggagctgcggacgcttctggaagaggcagtgccactatcttgcgccctccccaaggtcacgctacccaactatgacaacgtcccaggcaatctcatgcttagcgcactgggcttgcgcctgggagaccgcgtgctgctggatggccagaagacgggcacactgcggttctgtgggaccacggagtttgccagcggcagtgggtgggcgtggagctggacgaacctgagggcaagaacgatggcagcgttgggggcgttcggtacttcatctgccctcccaagcagggtctctttgcctccgtgtccaagatctccaaggcagtggacgcacccccctcctctgtcacctccacaccccggaccccccggatggacttctcccgtgtcaccggcaaaggccgcagggaacacaaaggcaagaagaagaccccatcatccccatctytgggcagcttgcagcagcgtgacggggccaaggctgaggttggagaccaggtccttgtcgcgggccagaagcaggggatcgtgcgcttctacgggaagacagactttgccccaggttactggtatggcattgagctggaccagcccacaggcaagcatgatggctctgtcttcggtgtccggtacttcacttgccccccgaggcatggggtcttcgcaccagcatcccgtattcagaggattggcggatccactgattcccccggggacagcgttggagccaaaaaagtgcatcaagtgacaatgacgcagcccaaacgcaccttcaccacagtccggaccccaaaggacattgcatcagagaactccatttccaggttgctgttctgctgctggttcccctggatgctgagggcggagatgcagtcttagaggccctggacacctgacaaagagacagagtccccactagcatctcctgacacccgaggagccctgagtcaccctgagatagagattcccagtaacacatccagagtagagacccctgttagccagccctcgatcattgaggccccattattaacagatactcccataataacccccaaatacagaccccatgtcacccagaaagagattccctgagtagcaccttcaggctagtccctatccccaacccctcagagcagattcccagattaacagatttccatatcaccccaaatgatggtgaccctctccacataatgcattacaacagaacattcttgaatcacccaaccctggatcagaaacctccccattaacaaacactgccccttaagtcctcttgaaataaacataggtcacacccccaaagcaaaagagtaacagacattcatgtcattgttccccatttaacatcagtcctctcaagatgtcgtgaccccatggtcaccctgaagcccttagattccaacccctcaatcagagacttccttcattaacaaagacccttgttcttatccctcaagaagaaacccaccataaccagcccactgtcacccctaatttacagacaccaaaacagtcctggaagtgctaattacaggaccccccaagtcttcctaccctctgcaccctcaagaaacccccagtgccttgtatgaagcccaccccacatggcccacagctcctgtgctggccagactcccagaaaattctctattttttaagtaacgacttccccctttggggrnccccaaaatttggaggccccattctaggactctggggatcccaaaccctagagtacacacgtcccaaactcccctgtgccctcaagtcctacagcccctagaagaccccaatgccgtaactcctaggacccccaaatcatggaatcccaaatccccagggaatcccaaatttgaaaatccaatcccaagtccccaggaaacccaatcatgaggtccttgtgcctggtatggaggagactgcagtcaggatatgcattccaggctcccagacacctcaagccctattcacaggcaccaggaaaccccacacaggaattcccatccctggaaactggagaatttcaatgccccgagtccatgggtttcaagacaccaaattccaagagccccagccctaagggaaccccaaatcctaaagcctccatctctaataaatggaargccccaaggccctgaggggatctcaaatcctggaaccccgatttcaatctacgttctagtcactggcctcaaaggaccccacagcacctgggccagaccaacagctcgagggagaacctgaaggcccagggggtccagggcggacctggggccccgaccaccaaggacagctcacgactgccccttcactgcatgtccccaaactcagcatgactcctgtcctcttcaataaagacgtttctatggcaaaaaaaaaaaaaaaaaaaaaaaaaaaaaaaaaaaaaaaaaaaaaaaaaaaaagg

SEQ ID NO: 858 - DNA, 2746 bp, Homo sapiens
ggcacagtaacctctcagctgacgaatgcaaggcaccaacggagaggcagcttcgatataaggaaaaagtggctgaactcaggaagaaaagaaattctggactgagcaaagaacagaaagagaaatatatggaacacagacagacctatgggaacacacgggaacctcttttagaaaacctgacaagcgagtatgacttggatcttttccgaagagcacaagcccgggcttcagaggatttggagaagttaaggctgcaagccaaatcacagagggaagcaacatgattaaaacaattgcttttggccgctatgagcttgatacctggtatcattctccatatcctgaagaatatgcacggctgggacgtctctatatgtgtgaattctgtttaaaatatatgaagagccaaacgatactccgccggcacatggccaaatgtgtgtggaaacacccacctggtgatgagatatatcgcaaaggttcaatctctgtgtttgaagtggatggcaagaaaaacaagatctactgccaaaacctgtgcctgttggccaaactttttctggaccacaagacattatattatgatgtggagcccttcctgttctatgttatgacagaggcggacaacactggctgtcacctgattggatatttttctaaggaaaagaattcattcctcaactacaacgtctcctgtatccttactatgcctcagtacatgagacagggctatggcaagatgcttattgatttcagttatttgctttccaaagtcgaagaaaaagttggctccccagaacgtccactctcagatctggggcttataagctatcgcagttactggaaagaagtacttctccgctacctgcataattttcaaggcaaagagatttctatcaaagaaatcagtcaggagacggctgkgaatcctgtggacattgtcagcactctgcaagcccttcagatgctcaaatactggaagggaaaacacctagttttaaagagacaggacctgattgatgagtggatagccaaagaggccaaaaggtccaactccaataaaaccatggatcccagctgcttaaaatggacccctcccaagggcacttaaagtgacctgtcattccgagccagcgaaccccagcagtaggaatccgtaccctagggatctgtctgtcatttctctgttgctcttgtgattggcaagtacagtatcctttgggaaggccatccccctcaggactgtcctggctccgacctttgtgtacactgcagacgctggttctgaggaactgttgtttcggcctcagtgaggttgcctggatgggatctgtattagacttgagtgcaggtctctcagcactgacccaaggagttctgttatggtactgtacctgtccagtcactggttctctcctcatgtcctctcgccccatgaggttgtgttgtgtcttctaagcgtggtactagtgcttgccacctggtcaccagacctccaaatatggctgccaccaccaggacctttccagttactccttatatgtgtgttctatggaggggcagggaaaaggtggcacttgtgagtgtgtgtggattggcagggggtccattcactttgggttccatcttgctttaaatttcttcattttgattaagagacctctttttgatctgtattgggctaaccagagccaaatacttttgaagagtttcccagggactagtcatggtaatagcatataattgatctgaatgagatggagagaagaatgaaggggtggtggttctgggtttgatttgagttcacctgtgggcagtgggcagtgggcagtgtcttggtgaaagggaacggatactactttttgcctcaccgtaaagtactcactagtaaatatttccttctctctttactcccactttttacgtttgcaggtgccaaagtaatgtccacttttccctttcatgctgcatattaactggttaattatactgcagaaaccttttcacctccactagtctgatacagtacatctgtacttccatataccttgcactgattttgtctgagtgccctgggagaagtagaaaatgattgaaagtgacttccgtatctcagcccatgactcagcaaggcagaatggccacccctgccaaagtttgcttctcttttcaacagtgcctcaccctccctctaggattaaagtgcttctgcccttccacgaactcctcctccatttcctttttgggatttgtcaccatccttctattctctggtcttctatttttggtgttgttcaagtgaaggaagagatgttccctctaatttctctctagcccattataacctgctatcttggggcaacttttgatgtatgacatgtcacccttcccaacttggtctcctccaacatgctgtcttcatgtggagccctcaccacaatccctgactccggtcatttgtgcctttctcttgtcatctctgtacactacttatattcactgtgggttgggggagctaattttaagcatgttcagtggcagctcccctccagtttcagtgtcactgttaaaatttatcaaaaagcaacttcactaggggttttcttaagggataaaggccttttacagaagctaaacccttccccacatgtggtagaatgtgctcttctatatctactcctcaataaagcatgttctctgctcaaaaaaaaaaaaaaaaaaaaaaaaaaaaaaaaaaactcga

SEQ ID NO: 859 - DNA, 2736 bp, Homo sapiens
ggcacagtaacctctcagctgacgaatgcaaggcaccaacggagaggcagcttcgatataaggaaaaagtggctgaactcaggaagaaaagaaattctggactgagcaaagaacagaaagagaaatatatggaacacagacagacctatgggaacacacgggaacctcttttagaaaacctgacaagcgagtatgacttggatcttttccgaagagcacaagcccgggcttcagaggatttggagaagttaaggctgcaagccaaatcacagagggaagcaacatgattaaaacaattgcttttggccgctatgagcttgatacctggtatcattctccatatcctgaagaatatgcacggctgggacgtctctatatgtgtgaattctgtttaaaatatatgaagagccaaacgatactccgccggcacatggccaaatgtgtgtggaaacacccacctggtgatgagatatatcgcaaaggttcaatctctgtgtttgaagtggatggcaagaaaaacaagatctactgccaaaacctgtgcctgttggccaaactttttctggaccacaagacattatattatgatgtggagcccttcctgttctatgttatgacagaggcggacaacactggctgtcacctgattggatatttttctaaggaaaagaattcattcctcaactacaacgtctcctgtatccttactatgcctcagtacatgagacagggctatggcaagatgcttattgatttcagttatttgctttccaaagtcgaagaaaaagttggctccccagaacgtccactctcagatctggggcttataagctatcgcagttactggaaagaagtacttctccgctacctgcataattttcaaggcaaagagatttctatcaaagaaatcagtcaggagacggctgkgaatcctgtggacattgtcagcactctgcaagcccttcagatgctcaaatactggaagggaaaacacctagttttaaagagacaggacctgattgatgagtggatagccaaagaggccaaaaggtccaactccaataaaaccatggatcccagctgcttaaaatggacccctcccaagggcacttaaagtgacctgtcattccgagccagcgaaccccagcagtaggaatccgtaccctagggatctgtctgtcatttctctgttgctcttgtgattggcaagtacagtatcctttgggaaggccatccccctcaggactgtcctggctccgacctttgtgtacactgcagacgctggttctgaggaactgttgtttcggcctcagtgaggttgcctggatgggatctgtattagacttgagtgcaggtctctcagcactgacccaaggagttctgttatggtactgtacctgtccagtcactggttctctcctcatgtcctctcgccccatgaggttgtgttgtgtcttctaagcgtggtactagtgcttgccacctggtcaccagacctccaaatatggctgccaccaccaggacctttccagttactccttatatgtgtgttctatggaggggcagggaaaaggtggcacttgtgagtgtgtgtggattggcagggggtccattcactttgggttccatcttgctttaaatttcttcattttgattaagagacctctttttgatctgtattgggctaaccagagccaaatacttttgaagagtttcccagggactagtcatggtaatagcatataattgatctgaatgagatggagagaagaatgaaggggtggtggttctgggtttgatttgagttcacctgtgggcagtgggcagtgggcagtgtcttggtgaaagggaacggatactactttttgcctcaccgtaaagtactcactagtaaatatttccttctctctttactcccactttttacgtttgcaggtgccaaagtaatgtccacttttccctttcatgctgcatattaactggttaattatactgcagaaaccttttcacctccactagtctgatacagtacatctgtacttccatataccttgcactgattttgtctgagtgccctgggagaagtagaaaatgattgaaagtgacttccgtatctcagcccatgactcagcaaggcagaatggccacccctgccaaagtttgcttctcttttcaacagtgcctcaccctccctctaggattaaagtgcttctgcccttccacgaactcctcctccatttcctttttgggatttgtcaccatccttctattctctggtcttctatttttggtgttgttcaagtgaaggaagagatgttccctctaatttctctctagcccattataacctgctatcttggggcaacttttgatgtatgacatgtcacccttcccaacttggtctcctccaacatgctgtcttcatgtggagccctcaccacaatccctgactccggtcatttgtgcctttctcttgtcatctctgtacactacttatattcactgtgggttgggggagctaattttaagcatgttcagtggcagctcccctccagtttcagtgtcactgttaaaatttatcaaaaagcaacttcactaggggttttcttaagggataaaggccttttacagaagctaaacccttccccacatgtggtagaatgtgctcttctatatctactcctcaataaagcatgttctctgctcaaaaaaaaaaaaaaaaaaaaaaaaactcga

SEQ ID NO: 860 - DNA, 2736 bp, Homo sapiens; identical to SEQ ID NO: 859

SEQ ID NO: 861 - DNA, 2046 bp, Homo sapiens
gtcatgcagtgcgccggagaactgtgctctttgaggccgacgctaggggcccggaagggaaactgcgaggcgaaggtgaccggggaccgagcatttcagatctgctcggtagacctggtgcaccaccaccatgttggctgcaaggctggtgtgtctccggacactaccttctagggttttccacccagctttcaccaaggcctcccctgttgtgaagaattccatcacgaagaatcaatggctgttaacacctagcagggaatatgccaccaaaacaagaattgggatccggcgtgggagaactggccaagaactcaaagaggcagcattggaaccatcgatggaaaaaatatttaaaattgatcagatgggaagatggtttgttgctggaggggctgctgttggtcttggagcattgtgctactatggcttgggactgtctaatgagattggagctattgaaaaggctgtaatttggcctcagtatgtcaaggatagaattcattccacctatatgtacttagcagggagtattggtttaacagctttgtctgccatagcaatcagcagaacgcctgttctcatgaacttcatgatgagaggctcttgggtgacaattggtgtgacctttgcagccatggttggagctggaatgctggtacgatcaataccatatgaccagagcccaggcccaaagcatcttgcttggttgctacattctggtgtgatgggtgcagtggtggctcctctgacaatattagggggtcctcttctcatcagagctgcatggtacacagctggcattgtgggaggcctctccactgtggccatgtgtgcgcccagtgaaaagtttctgaacatgggtgcacccctgggagtgggcctgggtctcgtctttgtgtcctcattgggatctatgtttcttccacctaccaccgtggctggtgccactctttactcagtggcaatgtacggtggattagttcttttcagcatgttccttctgtatgatacccagaaagtaatcaagcgtgcagaagtatcaccaatgtatggagttcaaaaatatgatcccattaactcgatgctgagtatctacatggatacattaaatatatttatgcgagttgcaactatgctggcaactggaggcaacagaaagaaatgaagtgactcagcttctggcttctctgctacatcaaatatcttgtttaatggggcagatatgcattaaatagtttgtacaagcagctttcgttgaagtttagaagataagaaacatgtcatcatatttaaatgttccggtaatgtgatgcctcaggtctgcctttttttctggagaataaatgcagtaatcctctcccaaataagcacacacattttcaattctcatgtttgagtgattttaaaatgttttggtgaatgtgaaaactaaagtttgtgtcatgagaatgtaagtcttttttctactttaaaatttagtaggttcactgagtaactaaaatttagcaaacctgtgtttgcatatttttttggagtgcagaatattgtaattaatgtcataagtgatttggagctttggtaaagggaccagagagaaggagtcacctgcagtcttttgtttttttaaatacttagaacttagcacttgtgttattgattagtgaggagccagtaagaaacatctgggtatttggaaacaagtggtcattgttacattcatctgctgaacttaacaaaactgttcatcctgaaacaggcacaggtgatgcattctcctgctgttgcttctcagtgctctctttccaatatagatgtggtcatgtttgacttgtacagaatgttaatcatacagagaatccttgatggaattatatatgtgtgttttacttttgaatgttacaaaaggaaataactttaaaactattctcaagagaaaatattcaaagcatgaaatatgttgctttttccagaatacaaacagtatactcatgagcaaaaaaaaaaaaagggcggccgctctagaggatccctcgaggggcccaa

SEQ ID NO: 862 - DNA, 2636 bp, Homo sapiens
  misc_feature (887)..(887): n equals a,t,g, or c
tgctgcaggaattcggcacgagggcaatccgggcttgcagacgaggtaaggtcgattccatttggcccggggatggtcacacgcgcgggggccggaactgccgtcgccggcgcggtcgttgtcgcattgctctcggccgcactcgcgctgtacgggccgccactggacgcagttttagaaagagcgttttcgctacgtaaagcacattcgataaaggatatggaaaatactttgcagctggtgagaaatatcatacctcctctgtcttccacaaagcacaaagggcaagatggaagaataggcgtagttggaggctgtcaggagtacactggagccccatattttgcagaatctcagctctcaaagtgggcgcagacttgtcccacgtgttctgtgccagtgcggccgcacctgtgattaaggcctacagcccggagctgatcgtccacccagttcttgacagccccaatgctgttcatgaggtggagaagtggctgccccggctgcatgctcttgtcgtaggacctggcttgggtagagatgatgcgcttctcagaaatgtccagggcattttggaagtgtcaaaggccagggacatccctgttgtcatcgacgcggatggcctgtggtkggtcgctcagcagccggccctcatccatggctaccggaaggctgtgctcactcccaaccacgtggagttcagcagactgtatgacgctgtgctcagaggccctatggacagcgatgacagccatggatctgtgctaagactcagccaagccctgggcaacgtgacggtggtccagaaaggagagcgcgacatcctctccaacggccagcaggtgcttgtgtgcagccaggaaggcagcagcgcaggtgtggagggnaaggggacctcctgtcgggctccctgggcgtcctggtacactgggcgctscttgctggaccacagawaacaaatgggtccagscctctcctggtggccgcgtttggcgcctgctctctcaccaggcagtgcaaccaccaagccttccagaagcacggtcgctccaccaccacctccgacatgatcgccgaggtgggggccgccttcagcaagctctttgaaacctgagcccgcgcagaccagaagtaaacaggcaccttggacgggggagagcgtgtgtgtgatgggaaaatccggacccacgcgtgtgctgaaggcgtacggtgcttgccagattttcaacttgagcataaattggttgccattgagaatttaagaatctggaatattgcagcttttggttaaacttaatgcatggttggagatgttatggcgacactaaacaaagtattcctgaactttccttagctccttggtagtaactgggaagacagaaatgaagaaaatcacatgagaatgaagaattctttagcagctcaacagagtttctcggcctgctcccagatcggcgaagtttctacttgttactctctctgccggcgcccttcgttcctcctctgcttcccttccctagtctttcctccggcagggagctgggcaggggtccccgggtgtctccctgagtcccgactgcactgactgggtccatcagagggctgcttcgttctccagctcatcttcttttaaagtggtgactagcttggtggtatctggctgctggtgtttggcttattgacatactccagggtaatcaatgatgactttgtttggaaacccttttggaggcaccatgggaacagaaggaaacatgagtgacgctgacccttgagtgtgtgggtggggagctctgagacgcctcctgtcccacgctctccggtgtccgtgtctacacaggggtccccatgatacccaccggccccagcagggcagaccggaccggggacgggcacggtgaagggctgcagcctggggtctgacgtggcccctagtgctgtctcaggagaaggctctggaggacttgaggcatgctgggcctggtgcagtgatggcgctaaggagacccggggaaagacagtatcgtggtcacgtatgcttaggaagcagcacagccgtgtccttagggatgttcgcgtccagtaaagacactggtaactgcggtttcagccaacactcttcatggcagtgtcgacctcgggttagcttctgttgtctttgtggatggttttcctggagcggcctgacgttgacgtgttctctggtcccatgtcttagcggggcatggtacggtttcgtgcctgacgcgtgcattagggtgttctcttatactttcagtagcrtctttccacagcaagggccaaaccctcctggttcccttcagagtctttttggcctgatgatgactcttgagtgataccctgtgatgcagacatgccccagatggattctactttctttaaaactagggactttcaagattaaaaaaaagattgtcactactaatttgacgcctaacttcagaagcttcactgtctacatgtgaacttttccagaaaaactgtgccatggacatttttcctctggggaattaacatctaaattctggtaactattaaaagacagatctggttaatttaaaaaaaaaaaaaaaaaaaaaaaaaaaaaaaaaaaattcctggggccgcgaattctt

SEQ ID NO: 863 - DNA, 2047 bp, Homo sapiens
  misc_feature (9)..(9): n equals a,t,g, or c
  misc_feature (11)..(11): n equals a,t,g, or c
  misc_feature (20)..(20): n equals a,t,g, or c
aggggtagngngctttacgnccacgcgcctggcctgtggctggtcgctcagcagccggccctcatccatggctaccgkwaggctgtkctcactcccaaccacgtggagttcagcagactgtatgacgctgtgctcagaggccctatggacagcgatgacagccatggatctgtgctaagactcagccaagccctgggcaacgtgacggtggtccagaaaggagagcgcgacatcctctccaacggccagcaggtgcttgtgtgcagccaggaaggcagcagccgcaggtgtggagggcaaggggacctcctgtcgggctccctgggcgtcctggtacactgggcgctccttgctggaccacagaaaacaaatgggtccagccctctcctggtggccgcgtttggcgcctgctctctcaccaggcagtgcaaccaccaagccttccagaagcacggtcgctccaccaccacctccgacatgatcgccgaggtgggggccgccttcagcaagctctttgaaacctgagcccrcgcagaccagaagtaaacaggcaccttggacgggggagagcgtgtgtgtgatgggaaaatccggacccacgcgtgtgctgaaggcgtacggtgcttgccagattttcaacttgagcataaattggttgccattgagaatttaagaatctggaatattgcagcttttggttaaacttaatgcatggttggagatgttatggcgacactaaacaaagtattcctgaactttccttagctccttggtagtaactgggaagacagaaatgaagaaaatcacatgagaatgaagaattctttagcagctcaacagagtttctcggcctgctcccagatcggcgaagtttctacttgttactctctctgccggcgcccttcgttcctcctctgcttcccttccctagtctttcctccggcagggagctgggcaggggtccccgggtgtctccctgagtcccgactgcactgactgggtccatcagagggctgcttcgttctccagctcatcttcttttaaagtggtgactagcttggtggtatctggctgctggtgtttggcttattgacatactccagggtaatcaatgatgactttgtttggaaacccttttggaggcaccatgggaacagaaggaaacatgagtgacgctgacccttgagtgtgtgggtggggagctctgagacgcctcctgtcccacgctctccggtgtccgtgtctacacaggggtccccatgatacccaccggccccagcagggcagaccggaccggggacgggcacggtgaagggctgcagcctggggtctgacgtggcccctagtgctgtctcaggagaaggctctggaggacttgaggcatgctgggcctggtgcagtgatggcgctaaggagacccggggaaagacagtatcgtggtcacgtatgcttaggaagcagcacagccgtgtccttagggatgttcgcgtccagtaaagacactggtaactgcggtttcagccaacactcttcatggcagtgtcgacctcgggttagcttctgttgtctttgtggatggttttcctggagcggcctgacgttgacgtgttctctggtcccatgtcttagcggggcatggtacggtttcgtgcctgacgcgtgcattagggtgttctcttatactttcagtagcatctttccacagcaagggccaaaccctcctggttcccttcagagtctttttggcctgatgatgactcttgagtgataccctgtgatgcagacatgccccagatggattctactttctttaaaactagggactttcaagattaaaaaaaagattgtcactactaatttgacgcctaacttcagaagcttcactgtctacatgtgaacttttccagaaaaactgtgccatggacatttttcctctggggaattaacatctaaattctggtaactattaaaagacagatctggttaatttaaaaaaaaaaaaaaaaaaaaaaaaaaaaaaaaaaaattcctggggccgcgaattctt

SEQ ID NO: 864 - DNA, 840 bp, Homo sapiens
ggcacgaggccgcgaaggcttcctctagggccaccaggctgaggactcgcccaggacatggactggtctctcagacccctgggccaccatgtaggccaccactccaggccgtggacttcccccaacttggggacagccttattcccaaatgtctctatccttttgactggagcatcttctgcacaaccttgggagcccatccaagggttggtgaggactggtctcccgggggtgggggtctggggggtaccctctggggttatagattcccccactgccccagctctgactggaccccaagtggctgctatggtaaattaaatctctccccgcgtctcctttgcctcatgtctgctgctccctgggcagtggttgcctcctactgaagggctgtggactctcggattggcgttttcctatggcacttgtatccctcacgtgtaggaagcaatagcagcaccagccttgcctctagaagagacattgtcaagctactggggcatggaggtcatctgcctgcctgaccttggggtgggctgagccagtggaatgaagggcagtgtattggcatcattgcggtgctgttagccctagcctgggctcagcctcagctgaaggggtcttgggttctgtcgtcacagcccccactgatgggcagttgaactgattgtgtaacctggcctcacacgtggccagctgctttctccagtcatatctggctccggcttgccctgcttttctgctctctagactcagcactgaagagaaaccatctttgtcctcaaaaaaaaaaaaaaaaaaaaaaaaaaaaaaaaaaaaaaaaaaaaaaaaaaaaaaaaa

SEQ ID NO: 865 - DNA, 4151 bp, Homo sapiens
  misc_feature (4115)..(4115): n equals a,t,g, or c
atttttttttttttttttttttttttttttttttttgggtttctgcatttgaaacatttatttcaggaaatacattttcaacactttgtcatttatacaaaaagacaaatttctcgggaggcacgtagcaaaaggccattgaggaacagagcctgatgaaacgaacaatttttcaaagtctggttacagagaaggaaagtgaagcatctcaaggctgggatgctgctgcccacccccaccccaccccgccrccaagtgacattgaggctgggcaggccacatggctgggccctggcgctggccactcatttccttcaaaatcttggttttggcaaaaacatggcaagtcggcaaagtaaactgtctcgccagtgggggtggtgaggggtccttcctctcttgggtggggagggagtcagacgcccagtgccccaacttccatgcacacacactcacactcatacactccttctcgctgaccttctcctggctgcaagcagccagcccggtgcctgcagatgcacctggtgatgtgtgcacctgagtggagtctcatcaggcccctctttctccccaggagcaagacaggtaacaggaagcaggaagggactttggtcatctgtgccctgcaaagacagcccccatgggtcccctcgtggggacagagggtgaggggccgggccgtgctgccacgaaaccttgctcttcagctgtggactgtgcacccctgacgcccgttctctcctttctaggggttcgttaccatgggctctgaggggaggggcccaggcacgggtagatcaacagagtcaggctcgcctggcctcccacctccccagctcagagagtcagcaaggcctgggccaggaggggtgagtggcaggggtggctggctgggcattaatgtaactacagcccagtcttgggccaaacccagacactagacagacagacggacacgcatacacatggacacacacacacttccctggtcacttgggcagggcaggcgccgggcagctcacgccactctgaccagcccaagccacggcccacacgtgcccccgccaaccttccttctggcaccttccatggctccctccctcagctcctccaccagactcacttgcttagaccttttcaaaactgggggatgagggggtaggggtcatctctccttcctttttatcctcaatcagatcccagcgcatcagcagcacctgcagcccggtgggggcgggggtggcgtgagagggggatggcagggagatgaagacgcctccctcattccagcctgtccccgcatctggccragcagtctgcggatggctgagataaaggcactttctgctccaggaggggcagctgccagggggcttggagtggctgggcagtcggtggcaggggaccctggagttttctacccttaggagcagggcaggggtaggggctgagtgatggccacaccatgtggcgggcagggggtccaggtgctcctggtgggctgcattctcccctgggctctgacacactccaggggacagggccgatggggatggaggggagcgtgcagcccactgggctcctctgcaagtgcgaggcctggcccccaccccaargctccggcactgagaaccccacacrgacggatgatctgcacaccgaagctgctcttctgagccctcggggagccaggcctggggacagagggtcatgtcaattcagtgggtgctctcacccctgcctgtggctccagtgcagcctccccacaacctcggggaggccgcggcctcatcactgactcactcggagggaggccccttcccttgtttcctggcagcatgtcgaaggggtggggaacgatgacaaatggagaaaatcatataaaataaaatggggtggtgggagggcctgggggggggacggaaatgacttgggggcaggatcccgggggtgggcagggyggcgtctacatctccggggcttctggctccttctcctccacgccgttggccatggcgctgctgccctcgttgaggcgcttcacacggtacgcctcgaagtggatgctgctggtgatgtccttgatgttctgcatgtgcgtcctgatgagaaggtcccgcaggtaggcaaactcacagtgtgtggtgttttcaacttcgatggtaccccacttggtcttcctcccaaggatcctcttgccgttgacctggtactcgtggtcactgcccaccacagcaaatgggatcatctcccggaacttctcgttcaccagccggtcctccgagtcctcatcaaattccttctgggggtacacgtcgatgccgttggacagcaggtctgcggtgatccgctgtttgaagtggaccctctcctccagggtgagtgtgtccgccttggcgatgacagggacgatgttgaccaccttgctcaggcgtttcataaactcgatgtccaggggcctgagggagtggccggtggcggggatgaagtagaggcagcagtggacgcgggtgtccgggatgcgcttcttgcggttgatgttgacctcctcctgcaggtatttctcgtactggtcattgatgaacttcatgatgggctgccagcagttctcgttgttgatgtggtccccgaaccctggtgtgtcaatcactgtcagcttcatccggacgcctttctcctcaatatcgtgcgtgatggacttgatctcgatggtcttggggatgcgctcctctgaggtgggctgcaccgacttccggctgattttggatttgaagagggtgttgattaaggtggatttacccaagccgctctgcccgaccaccatgatgttgaactcgaagccctgcttcatggccttccggcgcatctgctccaggatggagtcaatccccacgtagccgaagtccaccggggccttctcgttccgtgatgcaggcgcctgcttgagcccggcatctctgggggtgtcggccatgtcgccaacgcagctgggagccgcctcagtggcctcctggctccggggtgtagcctcagccacagggggctggggcttgggctccagcctgctctgcagctgagacacaggggcaggctctgaattctccaaggtctgggctgggctgggggcggtgggcgcctcagcaggcttgggcatctggatctccaccctcttgggggctgcgtcggtggcaggggcagtgggcacctcggggaccttggaggcagggggctccatcctccggtgggctgactcctggggtttgacgatggtgatctccgtcctccgaggggccggttctggcgtcttgtggcccaacacctcggccctcttgagcccgaaccgggacgggccgatggccccggcgttctccacctgcttggacgagatgtcaatggacagctcagtgcgccgggacaccggctcggccgccttggggcccgagagctccaccctccgcagggacgccttgggggagcgttggcttagggagtccacatggcgggccgagggttctgagttcttcacgcccaggtcctggaatttctgggtggagctggccacagtggctcggagtaggggagtctggaccctccggggtggggtggagttgggtgtctcgacctcctcgacctcaaaagatcttttcaaggctgagatccggtccctctccattctacggatatatttagcagcggcgggagtcccggcgtcccgctcagaggcggcctcccctttctcacccccgtcgccctccctctctcagcctcctcctcctcctcytcytcctctaaaaacactctttgtctggtctaatttcttcaatctgttgcaatcacgaatgcatccgaattaccacatttccatgtgctgatcatatgtttgtgctccaaactgaagtagcattgtctcttcaaaacgggaggaaaaagggagcaaaggagagaaatccaaaaataggaggcaggagagagggcccgaagtgggccccgaggagtccggcagaccaccgggtctgcctgcgagagtcccagagtcccggccgcccggtctggtcggtggctgcagaggtcccgagtgcggcttccggcagcctccgtcgacgcggccgcgnattcccgggtcgacgagctcactagtcggcggccgc

SEQ ID NO: 866 - DNA, 1714 bp, Homo sapiens
ggcacgagaaatgtagtaaccaattacagagacttctttaaagatataactgttgtgcttttttgaaggcaaagaacctgccctgaaaaagaatctgacctgaacacatgctgtcctaagcagttagtctagtgtgtctctggggtctatgcaggtttgcagtgtacagactgttatctcctgtctcagtatttgcccttcttatggaattacttttcttcctcttactaccttatttcctcctcttcatttgtctcattagttgtattagccagatatatatttacttgtaggggagggggaatgtcaaatttcagtttctaggaattatatatggcatgagtcattgctatagcatcacagaaattttcatcaacgtctatctagaacagtcaggagttctagttatgagttctgtaatagatatttattgaacatgtgagaacaatgtaaagccaatagttggttcactcaaatatttactgagcactgggatacctccatgaataaaacaaagatcctaacccttgtgaagcttcattttaatgcagggggagacagaaataaaccataaacttaacaaataggtatattttatagtaaatcagtatgtaatagatgcagtgggggggcagggaatatgaaactgtgtaaagggaaattgatagtgcttggggacagtggctgtaggttacactactcagtatggtatcaggaaaggcctccttaagaagaaatgtgtgtaggccaagtgccgtggctcacgcctgtggtcccaccgctttggggggccaaggcggccggatcacctgagttcaggagttcaagactattctgcccaacatggcgaaccccatctctcctaaaaatacaaaaattacccgggcctggtggtgcactcctgtagtcccagctacatgggaggctgaggcaggagaatcacttgaacccgggatgtggaggttgcagtgagctgagattgagccactgcactccagcgtgggcgacagaaagaagagtgtgcaaagacttaaaggaggtggggggagtaagccaaacagatagagggaaaaagcattccaggcacagccacagccatgtcctaagaatcatgcaatgcgttggaggagctgcaaggaggctggtgagtctgggtggagtgagcaagaggagtagaaagaaatgcagtgcgagaggcatcaatacctggggctgttcctggagcaccttatatactgtgaggactgcttttcactaggagttagagagcacttttgggttggggttttttttaatgtttttattgagctaaaatttacataccatacaagtcacccatttgaagtgtaaaattcagtggtttttagtatattcacagatatattcaactattaccacagtcaattttagaacattttcattggctgggcgtggtggctcacgcctgtaatcccagcactttgggaggctgaggcgggtggatcgcctgaggtcgggagtttgagaccggcctggccaacgtggtgaagccccatttgtactacaaatacaaaaattggccaggcgtggtggcacgcacctgtaatcccagctactcggggggctgaggcgggagaattgcttgagcccgggaggcggaggttgcatcacgccattacactccagcctgggcaacaagagcgaaactccttctcaaaaaaaaaaaaaaaaaaaa

SEQ ID NO: 867 - DNA, 2329 bp, Homo sapiens
gtgtgaagttcctaaacatgtctcttccactctttgtctaaactttgtaacgtagatgcagctgactttgcctgtagcctcatagaacccatcccatggctgcagtggaagcttgcggtggctctccagtgaccagaggcatagtgaggtcccagggaggctccctctgtcttgcaacagttatttgtgatctttttctatgtgcctattgtcacaacagagtccggcagcgtcttctcttgagggagcaatttggagaagagctggaacccagactcgcgccctggatgccatcctttatcatccacagcaatcccatctggttgggagcactgctctgggtctcacactgcccctcctctatcctagggagcctgaggcccaggggtggaaagatccagttgcgggtggggggtagtgaaccgcgcaggataatgaaagcaacttgctttggaaatgacctaccgctacccgttgtctgagactgagattatctcagactgtcttctggcttctgccaaaacactcccttaacagaaagcaccgaggggatgggggtaggggggttggggagagtgaggcttgagtgtgaaggaagtctcatatatgcagagctgaaatctccctctttgtatgtccacacttttgtcttgttctctagactgattcttgctattccaaatcctcttccacgttgacagcccttcagatatttcaacactcctctcagcatcctccaagctgaacttggttcacagggtgggattgtgtatgtgcatgcaggaggtgggggtggacagtgccctgggctggaatcccccttagttctaagtgcctccttgcccgcagcttcgagagctgtgcccaggagtgaacaaccagccctacctctgtgagagtggtcactgctgcggggagactggctgctgcacctactactatgagctctggtggttctggctgctctggactgtcctcatcctctttagctgctgttgcgccttccgccaccgacgagctaaactcaggctgcaacaacagcagcggcagcgtgaaatcaacttgttggcctatcatggggcatgccatggggctggtcctttccctaccggttcactgcttgaccttcgcttcctcagcaccttcaagcccccagcctacgaggatgtggttcaccgggcagtttaccccagttaccccccttatactgtggccccaggccgccccttgactgcttccagtgaacaaccggctggcggtagaggaggctgtggtcctcagggggctgtaggtggaggtatggctcgggccagcagcgggaacggcagcgaggaggcctggggggcacttcgggcgccgcaacagcagcttcgagagctgtgcccaggagtgaacaaccagccctacctctgtgagagtggtcactgctgcggggagactggctgctgcacctactactatgagctctggtggttctggctgctctggactgtcctcatcctctttagctgctgttgcgccttccgccaccgacgaagctaaactcaggctgcaacaacagcagcggcagcgtgaaatcaacttgttggcctatcatggggcatgccatggggctggtcctttccctaccggttcactgcttgaccttcgcttcctcagcaccttcaagcccccagcctacgaggatgtggttcaccgcccaggcacaccaccccccccttatactgtggccccaggccgccccttgactgcttccagtgaacaaacctgctgttcctcctcatccagctgccctgcccactttgaaggaacaaatgtggaaggtgtttcctcccaccagagtgccccccctcatcaggagggtgagcccggggcaggggtgacccctgcctccacacccccctcctgccgctatcgccgtttaactggcgactccggtattgagctctgcccttgtcctgcctccggtgagggtgagccagtcaaggaggtgagggttagtgccaccctgccagatctggaggactactccccgtgtgcactacccccagagtctgtaccgcagatctttcccatggggctgtcttccagtgaaggggacatcccataagtagttttgagagggtggatgggttacttgcccaccagaaacagccctagtcccaactccttgcgttcctttggcccctccctgcctacctagaatctgcctgaaagggctggagaggggcagtattgggggactgtgctagctttacccccgcaggacatacacaggagcctttgatctcattaaagagatgtgaaccaaaaaaaaaaaaaaaaaaaa

SEQ ID NO: 868 - DNA, 2207 bp, Homo sapiens
ggtcacgagaaaccaaggtgttggccaggccatgctctctctgaaggctctgggggcagaccccttccaggccactcttctagcgtctgacgtccccagcagtacttgcttccatggcgggtaaggcatcccttacatcatctgcctctgtcattgcgtggccctctctgctgtgtcttctccttttatggatgccagtcattggattttgcgcctaccacaccccaatgtgacctcatcttacctaattatacctgcaaaatctctgtttccaaataaggtcacattctgaggtaatgggggttaggatttcaacacgtcttttttgggagcacgattcaacccataacaatatgtaatatacccaaggttacccatctgggaggtaactgtcttcagggtaaacttggggaagcatcccctctctgtgtgaggcaagattygaattcttttcatagcagcaagaggacagttgaggattccgtgaggtggtttgaccaaaggattttgtctgtttcattttctctgtccaaagcaatgccatccacataattgcaattttttcagaacatggattgagaaatgcttagaggttcgttttgtttttatatgttttaaaaaaatgttacttttaacaatgaaaagagatcattccttatatattgaccagtgattagattttaaatctacttttctataaaacacaacttttattctttcctatctttgtggaaaacattcacatcaaagtgccacatcatgggtatgcatacatgtttgtatatcatagactatctggatgtttttaagtttcttatcgagatataattcatataccataagtgttgccattttgaagtgtacaattcagtggcttttagtatattgagaaggttgtacaatcataattccagaatgttttcatcacctccagaaaagaaaccctgtacccatgaacaatcagtccctctctctcacccccattccctagcaaccactaatctgctttctgtttctatggatttgcctattctggacatttcatataaatggaatcatccaatatgtggccttttatgtctggcttctacttagcatcatatttttgaggatcatccgtgctatatcatggatgggtaccatgttcctttgatggctgaataatacccccttgtagggatggaccacgtttagtttatgcacacatgagcttgagtggctgctctttaaagggtataaaagaaaccagttctccctggaggggaccagggaaatggggctcatggatggcaagaggttttttcatcatggtgttttgtgttgtttaaatttttacattgtttgtatgttacctttaagaaatgaaggaattgatgtttacaattcagtgttcttgtgaaatgcagggtgtggcatttgtgatatgaccagggcctcctcacacctctgcagcttgagattctcaccaaagcacagcacgttcctcacccaggagtagggacagcagcccaggtccccaagggctggccagtttcagctgggagatgggtgactggttccttgcaccgcccctccgcattcacaatccatgtgtccytcggcacagttatgaatcaytccatagtggagccaytttagggtgagggagaattaggttagcaaatgctaacactggaaacgcactgtctgcctggktcctgcgaggctggcacagtgtcaacagctgtgtgtaggagacgtgattgcctggaacccccaagaatgcacctaaaaatcatcaaacaccatcagattacaaaccaatataaagaattgatagtttttctatggaagaatcaaaaatcactttggaaaatagaatggaaatcaaaatcctgtaatagcaataaaaactaaagacttggcctggcgtggtggttcatgcctgtaaacccagcactttgggaggctcaggtagggggacttgaggctaggagtttgaaaccaaactgggtgacatagtgagaccctgcctctacaaaaaaataaaaaaattaactaggcatggtggtgcatgcctgtagtcctagctacttgagaggctgaggcaggaggattgcttgagcccaggacttggaggctatagtgagccatgatcgtgccactgcactgcagactgagaccctgtctcaaaacaaccaaacaaaaaaaaaaaaaaaaaactcgag

SEQ ID NO: 869 - DNA, 1069 bp, Homo sapiens
gcttttgctttctttcaaactttctccttcacagatttttctttattaatcagaatcatactgaccaacatgtgctgaggactttctgtgtgctctgtgcttcacatacagtcatgtgcatctttccagttccacaagttagttatcctcatttctcggggccatagagctagtgagtgacagagctaggttttgtatgtcaaagcctctgtcctacatgacatggcttttcctgctgccttctcccctggtattcgtctccctcttttctcctctggctctgcctggctctcctctggctctgccgagggggtggttttcagcctgggcccttgcagatgtgtctgtggcagcaggccacacagaccgcagcgggctgggcagcgtcctgagagacctagtgaagccaggcgacgagaaccttcgggagatgaacaagaagctgcagaacatgctggaggagcagctcaccaagaatatgcacttgcacaaggatatggaagttctgtcccaggaaattgtgcggctcagcaaggagtgcgtggggcctcctgacccagacctagagccaggagaaaccagctaaagacctgcaggctgcacccacctcctccccttcctaccccctaggatgctattcccttgggctgtggtggaaaaatgagggctggagccaaaatcaaatagcttgggagactggacattaaaggggctagaggcctgatggttagtgttaatgatcctgtcttagggcagaggccaccagggagtggggatcctgagggaaggggcagggatttctccttcttcttggtcctggctcccaagggcttctgtcttcatctctgcatgagctctccttcccagagaccaactcttttttattttattttattttattttttaatttatgtctggagcctggctactctgcatttgggattggggatgctgggtgggtgtgtggtccatgttcagcgttctagcaacacgtgtgtgtgtgtgtgtgtaaaggctatgcagccaaaataccatctggccagacgggcccaaaaaaaaaaaaaaaaaa

SEQ ID NO: 870 - DNA, 1436 bp, Homo sapiens
ggcacgagaaacctacaagagacatctctctatgccttcttaaaccgagtttactccatttcagcctgttctgaattggtgactctgtcaccaataacgactgcggagaactgtagcgtgcagatgtgttgcccctcccttttaaaattttattttcgtttttctattgggtatttgttttgtttcttgtactttttctctctctccttgcccccctcccgccctccccgccccataccttttcttcccctggattttcaccctttgggctgccttgctcatctttatgccccagcactaggtacggggcccaacacgtggtaggcactccatcagtgtttgctgaattgaaaacattgttgactgtggcttctatcagagtgtctaccttttgcagctcttcccctccctcatttaatttgctgcttttaatctacgtggtctgagaatttgtgaaaccagtgttgttagaagtgtatataatctgaatcaataagctctgaatggtggccaagggcctctcttatggcacaaagatgcatggacttcatgacagctcttttggtggctcagaagccattttttatagaatcatggaatctagaatattcctgctggaaagaacctgagagttggtttggaccaattccctggttttccagcagatgaaacaggccaaagaggttaaatgactgggtgaaaatcacatagctgtctggtgccagagccagcctatagtaaagtccctgaacccaagcccggtgctcattccactacctctcacacttcacaacaatttcctcaacacttgaggccagaaagtctgatctctccagaatgatcagcccagaggaatgctgagaaatcacctggaggagggagcagaaagagaaggtttttaaggagggcttctgaatacttgggagatacggaacggaccaaggaccacactccagggtgcattcgttgctccctggggcaccacttctggattacagtgtgccaggtcctttggaggccctaccccttccccattcattgccaccagtgagaaatgggggtgcccctgtgtaaagaaacctaccaaaggtttacatttgcaccttagcctcaatagctacgaaccctagagaagcagctagctggagctcatgtgcaactcctgattctcaggagaaagatggattttaacccaaaattatgagtgagctgttaactctaaaatgtacttgggagataggccaagcgagaggtcatgggccaactaagtgttatccagtagaaaagacagtacactgcttttcttttagtgtttgcttttcctttgctatatgttttgctatttccttgtggcttagaatgtaaaattgattgttaaaagttttgttctgaataaatatttatcttttgtattgctaaaaaaaaaaaaaaaaaaa

SEQ ID NO: 871 - DNA, 1419 bp, Homo sapiens
ctgcaggtcacagattttataggctctgttcatttttcttcttttttctttctgttcctcagactagataatgtcagttggcttatcctcaagttttctgattctctttatgccttgtcaagtatactgtttatatcctttagtgaatttttttatctcagttattatacgtctcaaaaaaaaaaaaaaaaaaaaaaaagaaagtagcttacttggcaatgcctggacactctgctagacagattgcatttgaaaggggagttaagtagaaaaatttgtttcaacgttgtatcaccaaaaatgtctaagtatggttcacattcttataaaagactagaaaaatttaatacttattctaagtgattaaactgtaatgcagaactgtaagggagaaaaattactacttatccaggtactaaaactgtaaatgaagaacaataaggaaattcattaaactgttacttctttatgcacaattcatggttaggcctatgatgagaatatgcaatgagcagatgtgcctggtccttgttgtgtcttgtgctgctgtacaacctgtttcaattttatatgcataaactctctgtgtagctcgaattttttttaagactaatttagagctacagttttcttaaacaatcatgcagttaaactattttcaaatgatggcagagatcctggtggcataaagtaatgctgctgttctctgctgtaaaatatggtgagacatttttaattgtatttttaaaaataattacaattgtatatttttttaaattttggatccaactttttttcaagcctcttgaagcatctaagtggatccctggggttaacaatttataaagcattaatatatagaaggtattaaaagcacatgaagacatattgatatgggaacatatatacatattacaagtgtttgaagcattgtcatagcctttgttagagagtagaatttaacataaagtgggttcctgaaggagcccacttgtgaggatttgaggactaaaataggatctaaaaaggttatttccagcccggttttatggcctatacacagcaagcctccagcatgctgttccacaacactagatgagtaatacatgagatgatatccagggccacgagatctctaagaatgtggcttttacatttttgtatagtggaaaagaaatatatgttcactagaaagaacaaaaagacaaagaagaaaataaaacatctcatcccccaaaataactgctaataatttggtatgtgtctttccaatgtttctgagcatataggagtggtatatttacacacacacacaaacacacacaaacacaaagcacccaacttacacttaggagatttcaacttaacttgaccgctctgaccaaaaaaaaaaaaaaaaaaaaaaaaaaaaaaaaaaaa

SEQ ID NO: 872 - DNA, 2396 bp, Homo sapiens
gggtaagttggcatgaattttccatgaaacacttgactgccatttgcagcatcatatctactttttatgcacctaattatatttttcctttcacttttatgtwyttttctaaaactgccacctaaatacctttccactccgttaaatgtatggagtcaagataaatttctcattcttgctctacagtttaagatgtataagaagtaaacacttccgtggaatagggcttaatttggggctcaaatgttttgttttcctcctgagatgtttttgaatggrtaagactactctggttttggatgcagcaacttttctcctggcatggaagaactaaggactttgataaacagtttcccatgatagtataatataatgaggggcccagtctgctcttgtgaaaatggctgagcggcagcagcccatcccagctgtgtgtgagtagccccgctgttaaaagtacacctgctgggaattgttggcacatgctcatagcatatgctctgtgggggaggtgcttttaattccaagaggagcttttctcccacatctgcggatgcagaacaaagatgcagcaggactttagaaaacaggagtgtttctactgacattttattcattgctttgttagtcccgcaaatggagcaacttctggttgtttgtaagcagaaaaacaaaacattcaaaaccaaaaacctaattagtacttttgtcctttatatccctaggatgctctagggagtagaggtggcaggcatctttatcttcacccactggcacattagcagcttatgcaacttaggaagtcactgggagatgagtcctaaaagcctgaatttcaggatggggaggagataagaagcagagaactttgggagaccatggggcatttagtcctggcatagacacagaatggatattcacaggaagattcctgaggccagatatgcaggagagcacacattgtcacaaggggtgtggtgggaagagaggtgctggatgcctaagacagacttctgtgcttggcagattgactgagtgttgactctgaatactttgtggtccagtccataataggccagtcactcctgcctgatgcatccctgttgcactgttcataaaacctgtatcatatggggaagcttcaaggctggcaggcttttcatcaagtaatcatcattccatgttcctacgtatccttgaaatcaaaaccaggcaatatgtgtgtttttggttttgttttacawaaagggcatwcaatgagacgaattcttaagataatgcasatacagaatcatcaataaagtttcaaagagtttatgaagaaaaggtattttcctttcttgtaaaaaatgttatatatatataatattctgatctgcattcaccttagggcttagctcttattttatgaattttcaggctgtgatttgtgttggatggctaagctctaaaataatgcaaatagccccaatctttaaatatagcggtgctaagttgaacaagtaacacaatacagaaaatgctgatatgaatacttagtaataatacaaaagttcctgctaaattatatatgtgtatcactgcctgactagaaaccccacttttcttttctaatccagcacaaaatcaaactctgattctacaaccagtctttttaaagggcaaaaatgactcaacacctttgttttgtatggaaaacttttttttttacactaactgcaaaactgctttaaaaaaaggcttattcaggatagataagcatgtactccttttttaacttgctggaagacttgcccctccaaactagcacccccaaaagacaacttctttcagaaacggggtgttttacctaaacatagtagcttacatgttagccagcagtaggtcggcactagtgttttccacggttatcacctttgacaggtgatgtgcatctatagatagtggaagccaccccatgaggaggtgttaatagcagcatggtttcacttttggtaatcaggtaatcatgtgtatatacttagattcgcattattttaacatttctctgctactctgcacttcaggttcgttaagctattttaataattactggggttatggcaaacaccaatggaaatgtatatggcaactgctttcctgagcaagtgtgatttgttttatggctgttcaagttataaaattgttcttacattgtaggtaaacaaaatcttgatgtttttaaaggtcactgtaacttaaggttcaaatttctggcacagttttattagtattcacttcggaagctaataagataccatggttttctatgttactcccattgtaacattagtaaagtgactttcaataaaagatttatgttattttgaaaaaaaaaaaaaaaaaaaaaaactcga

SEQ ID NO: 873 - DNA, 1984 bp, Homo sapiens
ttttttttttttttttttttttttttttttttttttttttttttttttttttttttgccatattgaatcaatatttatttcaggacatgccatgtcaaaataaaacaaagagtcaacccttgcctttaacaattatattgtattataaaagcactttacaactccatcccatctttaagttactggtatgtgggctaatgattatctgtaagcatttctctattcagatccataatccaagtgctctctgaatattacaaggtgacaataagtgggaagtggaggaggaagaggaaagagaggggactaaggttctcccagtttaaggttttgttccaatgaggggatgaggaagtatgaagatatttttgttgtcttttcatctttatactgtgttaagtaatgcttacaacataaattcagcaggcttttcctgagctgtaactcagaagttttcgtcctgcaaacaatgtatttacaaatgtgtttattagcttacacagcaatctcacaataactagtaaagattaaaagggcacactcctagtatatttgtttgcagtgttttaagggaaatacatattgccatggtgaagctctaaatagattcaacgaaacatctgaagattgaaagttgttaaaaaaaaaaaaaggcaaagaaataaatatcaccaaagaaaaaagattaattgtagcttaaatataaaactaaatcaccagttaattaaactatacagatctaatacaaaccaaaaccagcctgaaagacccaaccttaaaaaatgctaaaaaataaggcataaatctgcataatattgagttttatttccattctctcctttccctctactatgtatgctttacctgatctgcctctaggggcttacaagaaaacggtttccggtttccgtcttcaatttgacctcaaatgtcctgagcaaagtttttgttattctgctgagggttcttttgttggtaagctttagacatcattatttctactaattcagtagttttgatcgtagcgccaaatttaaattcttccactggttcttctggaaggaattaaaacttttacagtgccttgcctgcacagtattatgtttttaaaaaagaaaacccaagcaaaatctattgcttaaagaggtttcttattttttaaacaaacagaataactcttgacaattttaaaaccttgggagaaacagttcattagaacttcattttcttaccgtgaagaattaaatactaaaaacctgttctgaagcacttggttaattttctctcccagagtctaataaagcacatgtgaaagagccatttgttttagtcagaaatacatcttatgttcttctacttctaagtactcagtatgttctttaggactcattttgaagatgcaccaggagccttttctcattcaagcactgcctaccatgatggctgaattttgacctcaaagaagaccgtaatttttatcagtgctcaagaataattttggacatcttggtccgtagcctacagcaagtggtatctgtaaaattaaaggataattccaatgggcttggtagaactgctgctttgccatctcttgtttgttttgaggaagtcgggggaggctaggtaagaatagggtaatagggaatgggggtaagtgagaggtgagaaaagcaaggagagataaagtaggctgtgaacataccgctcgttaaccaagccatactcatactgttgagatttccatcattttgaagtacattatcataacattaaaaaagaaaaaaatgttaagaaaatgtatctaatttttaaagttatcactggaatatgctgaaatattttggctttttgtaaaatataaataatgaagacactgacttttgttgtgcttgtgaagctaatagatcatctccacgagacaggcagcaatgatgaattgcaatacgttattactgaagggaaaaggttcaagccaatattcaca

SEQ ID NO: 874 - DNA, 1425 bp, Homo sapiens
ggcacgagaatttgaggagatataaagtacaggaatgggatctcagtacaatgctgtccacctggtggtgacttttctaagcactgtggtatattgggaccttagggctttctttgtgaatatgtatggtcattgttaatatcttgattctttgcttcttattgacaagtgatgattataattcaatggacaacctgaatcttggaggaagggaagaagatgctgaactctctgttaatttagcataaaacttgactttttgtattctagaaattcaagtctatacaggtataataaagcaaaaatatgtaatttatgttgcttctctcaatacattaggtaatttagtttgaaaaaaaactacctttaaaaattgacgttatttttctcttccaaaatatttccaataaacttacatattgtcttttattaacattgtgttaatgtccaagtttataaatagaatttttgtataacaagacacattatcatctaattattttttattctagatgtgaaatgccaatttacagaatattgttttagatttctgtataaatgttaatccctcttaaggcctacttaatgtagattaataaaacaattattatagtctcttagaggttcacattacaattccaaattgtaagtgattctatgctttcatgattgtctaagcctgatataacagtcatgttcagtttttttaatattcttgatgttagtttttgtttttgctataaatacactgccctggaatttaacatatctcttctttttgatgaaacttaaacagtaatagacaaaattaggctagtttttattttttcatacaacttttaggattaaaagttgccttctcaaaaacatgacaatacttagagatacttatttcattttctgtgtctgcctcaaattttccatttaatataaaaatagatatatttaattgtttataagtataattgattggcatatgcacatgccatcttagttttaacacagggtttggaaactagataaacaagattattttagctgtctttttatacatgcaaatggaatttaaacctggatggttcaagtgtagttttgaaggggaattaaaacataataggatttctggctgggcatggtggctcacacctgtaatcccagcactttgggaggccgaggtgggtggatccacttgaggtcaggagttcaagaccagcctgaccaacatggagaaaccctgtctctactaaaaatacaaaaattagctgggcatggtgacgcatgcctgtaatctcagctactcaggaggctgaggcaggagaatcacttgaacctgggaggcggaggttgcagtgagccgagattgcaccattgcactccagcctgggcaacaagaacgaaactccatctcaaaaaaaaaaaaaaaaa

SEQ ID NO: 875 - DNA, 1953 bp, Homo sapiens
tgaagaatctcaaaaagcccacccaactttcagctgacatttccaccagccctctcatacttgttaacaattggtatctttgagtatttaccaaagagctgccaaggttacagtgaacagagttttgaaaggcattgctttaaaggaaaaaagtataggtatgtgtacatatataatacatacaaacacatgtacttctgtatacatttacatatttttacaattcatactttaatttctaggctataactcagaccaaattatacctaaaagttccaacaaagtccctttttcaatatcacattaccaaaaagatggctgcaaatgtaatttggacctttcattaattttgttttcaaaactagaataatctcaccacagaatcagaattttctaccgttccacacccaaccccttcaaatacacacaaccttgttacttttcactccagcaccttcatacgcttttctccaggaggaggttcttgcagctggaaacagcctattttgtggtcactgtcaagtggatggatattctagcgctcccaaaaaagcactatggccttatatgcagggaaggcacataccaccaagttcaatgagaaatattagagctaaccgtactctcttctctgcgtacgttcgagtatacgttgcccatatccctcccatattttctttttgctgcttttgctctggaactttgcttttagcagggaaagcagctgtcccctgagtgctttgaattgggaatatacccagtgtgtgttctcccccctcttacgaggctacataacacatctatgatgctgctttaagtttttagaggctatacctcaaagtagctgcggattttgtctcctgcactgccaatatgcaactgatcccgcttttattaattttttgaagaagtacacagaatttttacagaatgtagtattttgatatcattaagtaaaccaatcagaaaactccttgagcaatagttgtttctttgtcagtttcagttacaatcatctttacccattaagacttacattaacattccttttatataaagagttgtatatgtccacctaaattcctatgtccacacttaacctttaaagatgtacattgagggaatatcaaaaaatagcgttcatggctacgaatatgtagaatgttaaaagcacagcaaactgcactgcacttataaagcaaatctattagaaaaaaagcatttttctaaatgctcaaatgttatcaaaatactatatttatagaagtaatcttctctgttaacagccaagatttgctgttagaaataactcttgtgagttttatattgkgctttttggaggttctaatcatttcagcagtagcgtcttaaacagcagtattactataagcagttgcttcaaaatgtgaattaacttgttgaaactgtggctttaacatccatgtgactagtgtatatggtatttgctctccattagcaaaataattcattgttaggtaaacttcactagtgcaaattgcagatctgtgagcaatgtttcctattgaatataaactactgtctaaaatatacatatcagcagcccagcctttatcaggaaaattatacttggcaagttgctgaaaatgcacaaagttatgaaagttaaaggtatgctgcaaataactagccattattctatgtattattaaatatttactagttctgttaaaagcagagcagaagttagacactaaggatctctttgtgaactctgtgttctctatattagattgctgtttatatgtaagaattttattgcttatgtggcatacaatatttataactataaactttatagaagtacagtattaaagtcagtggtacacagacattctgtacatatcctgtgaaacgtgctgtcatatgaaataaatatatctgtctttaaaaaaaaaaaaaaaaaaactcgag

SEQ ID NO: 876 - DNA, 996 bp, Homo sapiens
ccgactaattccgacaaaagccggagctccaccgcggtggcggccgctctagaactagtggatcccccggtctgcaggaattcggcacgagctctatctctgttctcaggaatccagttctcaaggttaatagaattggactatcccataattaccatttgtttgatctcgttacacaggcagcactaacaccagaataacactgatgttgccatcagcagtcacacgactgaaacatgaggactgccctgcacgtgctgctccgcagcctgctgatctaacggccgcgcccgcgtctgttgcttgagtcaccacggctgttacatcccgtgctctcccttctctgccttcttggtgttggttctgcgggcgactgcccatgtggccctcagccccatcctctgttcatggctctctgccactcttgttgtccaaagctctttctctgtaggttccatgggaagagctcatgggaacatgatcttcgacctcatgcttgctgatcatagtttattgtgccttttatcgttgatggttttgctggttacaggattcttggctgacatttccttgagtgtcttaagttattccatattcttctggcagagagttgccagatttagcaaaaacaaataaacaggatgccccgaatattgtgtgggacatttttgtactgaaaacatgatttgctgggctgggagcggtggttcgcgtctgtaatcccagtactttgggaggccaaggcaggcagatcatttgaggtcaggagttcaagaacagcctgggtaacatggtgaaaccccgtttctgctaaaaatacaaaaattagctgggtgtggtggcgtgtgcctgtaatcccagctactcgggaggctgaggcaggaggatcacttgagcctgggaagcagaggttgcagtgagccaagatcacacactgcactccggcctgggcagcagagmwaagctccgtctcaaaaaaaaaaaaaaaaaactcga

SEQ ID NO: 877 - DNA, 1165 bp, Homo sapiens
gggataagagcttcagagtttattctacagaaacagggaaattgactcagattgtatttggccattgggatgtggtcacttgcttggccaggtccgagtcatacattggtggggactgctacatcgtgtccggatctcgagatgccaccctgctgctctggtactggagtgggcggcaccatatcataggagacaaccctaacagcagtgactatccggcaccaagagccgtcctcacaggccatgaccatgaagttgtctgtgtttctgtctgtgcagaacttgggcttgttatcagtggtgctaaagagggcccttgccttgtccacaccatcactggagatttgctgagagcccttgaaggaccagaaaactgcttattcccacgcttgatatctgtctccagcgaaggccactgtatcatatactatgaacgagggcgattcagtaatttcagcattaatgggaaacttttggctcaaatggagatcaatgattcaacacgggccattctcctgagcagtgacggccagaacctggtcaccggaggggacaatggggtagtagaggtctggcaggcctgtgacttcaagcaactgtacatttaccctggatgtgatgctggcattagagcaatggacttgtcccatgaccagaggactctgatcactggcatggcttctggtagcattgtagcttttaatatagattttaatcggtggcattatgagcatcagaacagatactgaagataaaggaagaaccaaaagccaagttaaagctgagagcacaagtgctgcatggaaaggcaatatctctggtggaaaaaactcgtctacatcgacctccgtttgtacattccatcacacccagcaatagctgtacattgtagtcagcaaccattttactttgtgtgttttttcacgactgaacaccagctgctatcaagcaagcttatatcatgtaaattatatgaattaggagatgttttggtaattatttcatatattgttgtttattgagaaaaggttgtaggatgtgtcacaagagacttttgacaattctgaggaaccttgtgtccagttgttacaaagtttaagctttgaacctaacctgcatcccatttccagcctcttttcaagctgagaaaaaaaaaaaaaaaaaa

SEQ ID NO: 878 - DNA, 1381 bp, Homo sapiens
gagggtgaagtgtagctgctccctcctctccccgttcctctctgtccccccatcaggggaatacctactcattcttcaagccccggttcaaagtcgcctcctcctgatgcccacctgctgcaggaattgaacctccactttgcatctatagtgcttcagaccagccttgaggagaatgtcactgtggtgtggtgtagccatctatacttgtcctcctcctacaaggctgtgagccacttgaaggcttctgatgaagcaggaacaaaaatattaagatgtgaatatttacagcctttcttctcctgccatgttcccacatctgagctgatcaaggtgatacaaagtggaagatgcttcactgaagaaagagcataaagttagcagcaaaagctggatcagaatagaatcgatccagtcaactagaggtggaggcaagagagagcagagctagagttttaggagagaaaaaggaaaaagaaaaaagggggtggggagtgtagtgacctatggcactttggggaaaggcaggcctgaagaggatttggagagagtttctgtctgttgtacgacatagttgcttttcccaccttgccgcttgtttgggagttttgcaaaggcttcattgccaatcaatgcttttggagactatcagggtttcttctggatgtgacccaggcttcaaatggcctaagatttgttcaggttgcattgtacattttgggcccagctcagcaggtatgcagaataatacaaagatgagacaaaagagcaggtggagggacaggaggaggagtgcacacaggctgtggctctctgtccctctctgggcagaccaccatggtggacaatgctcatgcgttcatgacaacttgttccccagggagccccagattttgatgaaccatctccccaggtcccgcctctcccaaattgtggataaataaagccctaagatttttaataggcacaaccattgaggatgtatcagaaatactccctctctgtggttttggtgcagacaggaggggatgggtgttgggtgtgattctctttcagcctttctttcttcccctctcaagaaagcttatcaggaagcacacaagcacaatacttctagataaatattacttcatttgactccttctaggaatcttgtgaggtgggattaatgttcttattttaatttcaacttccaattgtttattatcagcatgtagagatataatttatttttgaatattgacctattatgaaattttactgaacttaatacttctagttttatttttgattgattcttagagttttctatgaagacaatcatgttgtctgtgaataaagatggtttctatttttcctttccaaaaaaaaaaaaaaaaaa

SEQ ID NO: 879 - DNA, 775 bp, Homo sapiens
aattcggcacagcagagatggttcttttcaatgcccatggttgttttttgatatgtggtctgctggtgagcagggccatgcacaatgtgtcagaaggctcttgatttgcagaaatggtgtaaatggagaccccttttggccaaggaagtggggaggcgggcacaaacataatctctgttccacttggaatgcttcgcagggagtctccattggtgggttaagcacgatcaccaattgatcacaccagcctggggcagagggtgtggggacagggaagaagaagggagtttgagctccaggtccctgcacgggaaaaacattggcaatagcctccttaccaaccaaccgtcccatctctctgctccttctgacttactaggatggcctcagagaaggcacagtgttaacccagccttatcacagttgtggaagcgccaggggaatgggagagtcaggggattaataatagtaggagcaatgccttacatctagtagatgcttcacactttcccagaagctattacttaatgaatctcacttaaattgtgtctgtaccatattagaatatcctgtgcagggataaatatgcccacttgaccgtcttattggaaactgcacacagtgaggaaatgcagcttgttcaatgacaagtggcagagccagggctgggactcaaaagcagtgagatctgattgttggtccagaagtttgttattctctcagcttgattraactgcccttactcctgtttamaaaaaaaaaaaaaaaactcgag

SEQ ID NO: 880 - DNA, 1474 bp, Homo sapiens
ggcacgagcagtgtctgacatttcaatgttaaatttgtcaccgttaaggaaccaatgttggtacattactactaactaaaattcatttatttggattttgttagtttttacctaaggttcttttttggttccaggatcctatccagaatacgacaatacatttagttgacatcttcccttagcctatctgggctgtgatggcatttcagactttccttgtttttgatgactttgatggttttgaggagtattggtcaggggatttgtagaatgtccctcagtttgggtttgtctgatgttttcttcatggttagactgggattatgggtttgggggaggagagtcacagagataaagtgccgctctcattgcatcatatcaaggggaaatactatcagtacggcttatcactgatattgttaacctcggtcaccaggctgagctagtgtttgccaggtttctttactgtattgttttcccgtactcgtctttttggaaacaagtcattaattgtagaccacactcagtaggtctgttttcttaaaggggagctgtctataaaattatttggaattcttctgctatggatagtctttttttcttctccgtttatatatttattcaatcatttatttatatatgtatggactcatagatggttattttatacttggggtcataatcctatactactttatttattttgttgctcaaatttttctaccaacaggacatactccattgttttgttttttgagtacttccttactttctggcactagaagaagtccagactcatcttgtatatttcctgccccagccctagaatcagccatttttccaaggatccctggttctattttttggtgaatcatgttagaaaccaagatctggttactcagtgtgctcattgctgttggaatatcatgacttctaggccttttcagtgtatagacctggaaaatatatgtatgtatacacatatataactattatctgtatctatattgaggtaaacatgagttcatactgatgactttgactatcagtactatatagttcattctggctttactctgctatctattacctccctctccaaaagtgagaaatctggctcacgccatctgacatctattaacttatttgttcagtcccatcgtccatgtacagcacttttagaattgttaacctgtatctccatgagaaatgcctttaccaaaaaagaacagtgcttatatacagttctttttgttgttagagtttccagtttcaagtttcccaaagttacttaaatcaaaccttttcccctgacatctgtattttaattttatttttaataaattgatctaaattacatggtaattatatataaagcttataaaaaatttcccttgcccaactaaagatctttagctttagatgtgttttttttttcctcctgacttttgtgaccaaaaaaaaaaaaaaaaaa

SEQ ID NO: 881 - DNA, 2100 bp, Homo sapiens
ggcacgaggtgaaattggtgtgtacattttgggcaaagcaaagatacaaatgttattcatgcggtgcatcagtcttaaaggataccagtatccttctagcattaactgataaaattaactctccaaagaccaaaagaccagctctcactttctccttcaaaacatcttacactgaaatgcagatttatttgacagcaacttcaattttcattcactcacagcatgtgaaattattttgctgaaccttgtttacaacttatttactggcatcttaataatctattagcagaaattggtgttctctgtgtgtagtaactgttcctacttaaagagctggctcagcctaggctcctgaccagatctggctgacaagctagttttcaaaaccagtgaagtggtttctgcagggagaactgtgcttgcttttgataattgcctcagttttatgaaatcaatcagcctgaagggaagacctcattacagatctgacaagatagactccaatttcaatactagaacaactctctgtcctcaggctctgaaatctgcaattatttattttatttagacagagacaaccataatagagtacctctgggcacattctcagggaagtactcaacagataacctaatggtcagtgtgctaggaacctgcccttttcctgtcactcaggtggaaaattggtcaacaggaattacagcatggcctagagccagctcaaagcagacactgatgaatcaccatctttccaatcccctaccccaaaagatgtggagagaaagggtagctgctgtaactgttcccagggctaaactacaacaaaataaggctttctcttctcagttcctctgaagactgccagacagactttattctaaggaaaatgatagatcacccatctaccatctgtcactttgaactgttctatcaaatcaacatttttttgaactttgttttcaatgaggaatgtgattttgctgtgtttcccaagccttaaattggacaagggaaaaaagtcctgaagtgttcttcttcttgaagttggaaatatgtattttgcttttctgctcacggaacacaaacaccttaacagatttagttcagacttttctcgaataattcaccctttaccaggcctgggagatgtcagccccacagaaaaaacacagagaacattatgagtgtacgaaaatatggatttagagagaaatgatactctctctagtccagctgtagtatcactgctagcagtgttctgatagtacagcacccagatggaacagagcattcctgaaagatttgggaggagacatttccattgttaggggaaaatgtgattctttcatgttggacagttcaaggtagtgatgaatatggtctcctaaacagaatccaagcaaagagcaatcactgactactcccgcattatttattcatgatttactttaatggctttgtgttattaagaaaaagtaggttagaagaggaatgcaaagctaacatcttccaagctgtaaatagactgtagcctggaggccgaaggagccacactactcaaatgttcttattccatttttgagacaaatttatataaaccccccattgggttagaagggcattgacatttgtttagtgtccaacatgtgctacaccttaaacatacaatctcttatttaattttcctcactttgctgtaaggggggcattatcatccccattttacaatgcagaaacagtctgagagagatcaagtgacctgttttatacaccttgtaagtggcacacttagtaagtggcacacctagtaagttgcagatgtggctttgaatgcagatctgactctagagcagcactgtccagcagaagtttctgggatgattgaaatgttatataaatatgctgtccaaaacagcagccactagctacatgtaactattgagcacttgaaatgtgattagtgcaactgagcaactgaacttttcactttttttctttctttctggttttgttttttgttttttgtttttttagatggagcattgcactccagcctgggtgacagagcaaaacccctgtttcaaaaaaaaaaaaaaaaaa

SEQ ID NO: 882 - DNA, 1607 bp, Homo sapiens
ggcacgaggtcaccctaacaccagattactttccccaagacatgccaggatcatttcttctagcccagctgtgttcgaactagcccttcaccaagtggttcagtttccttggtggggcctgtatgattgtgaggggctgggggaagtctggaggcgggtgtcagggaagtatgaagcccagttcctgccacaaggttcacacccaatgaatggtcactgttattacacaggatggtaggcttgtggtttgttttttccctctattctttggtcacttttctataagcatattatttttagaatcagaaaaaaaaactcatgaaacaaaagaaatgtgatgagtgatttacagggagcaaagggcagagagagagagacagaaagagagagagagagacagatgctctttagaaaccgtggctctgggccccggaatttaatctgcagttaaggaggctgagagaggcaggtgggtgcacccacaggtctcctaactgagaacttcctgcctttgagcccacctactagtccccaggttacagatctcagggaaaccccagggctcccaccccctccacacacacacccactcccagtcaggcggcctgtgagcctgggttggggctaaccggaacccagccagcctctctcccaccttctaccttctgttctcaatgctgtgcccctgggctggggcagcctgagctaggtgatgtcgagccaggaacaagagccaaggaccacagaacctgcttttggttccacatgtctctgccccatcttccttttttctttttccacctcgtttctttttttttctcttttctttctctctcccttcctttcctttcccttgcctcccccattccccttcccttccttttctttcttccttccttcctttctttttctctttctttctttttctttctttctttctctttctttctttccctctctctccctcccttccttccttcctcccttccttcctctctttctttctttctttctctctttctctctttctttctctctttctctctttctttctttttcttagagaaaggatgtccctctgttgcccaggctgcagtgaagtagcacaaccatggctcactgtaaccttgaactcctgggctcaagcaatcctcctgcctcaacctcctgagttgctgggactacaggtgtgagcaaatgcacccggcacttttctccttttttattttaaatacttttagagtaattcctttacataaattgaacttcataaaaagttagaactttgcacattaaaagacactatcaacagagtgaaaagaccatccaagaatgagatacagtatttgcaaatcatatatccgattggggattaatccaggatatctaaagaactctaaaactcagtaacaacaaaaacccaaacaacccaattcaagaaatgagaaaaggacttgaatagacatttttccaaaaaagatatacaaatgatatactcatgttcataacagtattattcacaatagtaaaggtggaaacaacctaaatgttcactgacaaatgaataaataaacaaaatgtgatacaataaaaaaaaaaaaaaaaaa

SEQ ID NO: 883 - DNA, 1432 bp, Homo sapiens
ggcacgagagaaagttcatcctctgggcttggacacagtagtgatgacagcagttcacatggatgtaaagtaaatacagctccgcaggaatcctgaaaaataattctaatgttactatcttaggaatagcaaattatgtccagtcatagagaagaaagcttcataataatacattcttacctaaagctcactgtcatgatgttaggtatttaaattcttaaagatgttgggttgtttattagtggtatttttatgttgtcttattttaggtaagcttctgtgtaaagctaaaaatcctgtgaatacaatactatcctttacaggcagacattattggtaaacaagatcttgccctccaatgaaatgacttacatgttttaaaaaaccgagttggttttattgaatttaaaaagataggtaactaagtagcatttaaaatcaagatagagcattccttcttgtatcagtggggcagtgttaccataaacacggtgtatatgttgttaaaccctatgaagagtaacagtgtagaccagactgcctctctcagatatgtgcctgatattttgtggatacctcccctgcactggcaaaacactatgcttttgggtgttagactgaaatattttaagagtatttaacctttccagtattctgtttcacgcttagatggaaatgtatcttatgaatagagacatattaaaataatgtttacatcttagaaaaaacatagatagtgctagtaatattacttataactgtaatatatagattcagaaatacattttcattatccaaaatcagcttcaacaaatggtttctggagacaaataatttgttttcattatcattgtataatcaggttaatgatttattttttgactaaatgtgcaatttcttatcactagataactttcagtatcagtggtggttacttattacttaaatcagaggaaggattttataagattcataaatttaattttaccaataaatattcccataatttagaaaaggatgtcgacttgctaatttcagaaataattattcatttttaaaagccccttttaaagcatctacttgaagattggtataattttcataaaatgtctttttttttagtgtcccaaagatatcttagataaactattttgaagttcagatttcagatgaggcaacattttcttgagataattacccaagtttcatccatgttgaatggtacaaaatatttctgtgaaactaacaggaagatattttcagataactaggataacttgttgctttgttacccagcctaattgaagagtggcagaggctactacaaaaagcaaccttttcattttcactaagagtttaaaagctattgtattattaaaaagtctttacaatgcttgtttcaaagaaccaacagaaaaaaaaaaaaaaaaaa

SEQ ID NO: 884 - DNA, 2280 bp, Homo sapiens
ggcacgaggaattatgaagttgtgtgccccatgatggggagtggactttgagatgagacactggcctgcattataagggacctgtcatttccactggattttagtttgtgtggcttaaagagaatgcctttccagttaggtatgctcgtggctttgaatataaatgggaacagtctaacgctagctattttgctcctttccttctgattcccagctggtggaaatcggtgctgcgtactcagcaaccttacatagggcaggtatggtctcatgagctgggagcaagacaggttttctttcttgaaatgaggtccccccacttccctttgtctttgctgctttgctgctttctttccattgtcttgctgctttccttccttggatctgtagacactcagagaactgcctggccagaccctatagaggtacaattaggtcactctagggcatctgaccatgggtggcagttttccacaaaattcacttgttctgtgggttgaaggaaatatcaaaccagctggcaagttctaggcctcttgtcttcttggtatcttctagtcaaatttacagtatatcccttctgatttaatatttgcaggaaactgatgcatggagatgctgacatcccacgtgttaattctggggcaccctgatcctattctctaggatggcattgcccctttctgagccatcaatccaagtcctttccccgtatttctatgtggttggtatataattcagtgagacactctttcttgctcctgtacttgaatgtaggagtgtattgcagtggccctgaagatcccagtagagtctggggagggttgattaggacagagtgatttccaccctgcccctcctcaagcagaggagctttcttcaacctttttctctttgaagaaattgagactcagggaagaagtattgtcgcagatgtgatgcggtgagtcactggtttttaaacctctgttttggcgatgggctgggtatggatgagttaaggtttattcccctaaatctgtattacactctaagtcaacattgtgtccttaggctgggcgcagtggctcacgcctgtggttccagccctttgggaggctgaggcgggtggatcacaaggtcaggagatcaaggccatcctggctaacacggtgaaaccccatctctgctaaaaacacacacacacacaaaattagccgggtgtggtggcaggtgcctgtggtcccagctgctcggggggctgaggcaggagaatggcgtgggcccgggaggcagagcttgcagtgggctgagatcacgccaccgcactccagcctgggcaacagggcgagactccgtctcaaaaaaaacaaaacaaaaaaacaaaaaaaaccattgtgtccttaaattgaatatccttgatagaaaagggtagggccttagcgtactggctctatggaatacgtactctctgtctttcagtagaattcagcagtcattgttcacctgctttttgccagatgttgagctaattgctattggagtaggatggtaaagattggtcttggtatgcttggttgagaaggcacaactttttacacatgtgggcctgcaaatatctatgcagatttttttgagactttaaaaagcatgtttaaaagattatttcttctaatagagactccaaaagtactcaattactgtcttatcctctgggatcctagttcctattacttgtgcttgatttccctctgctgattagataagttaccttgaaagaggcaaagaaagccaaatgggaattgacttgtttttcttcctgtcattaaaaaaaaatggaaataatttcaaatttatagaagttatacaaataaaattatacaaagaatatttgtaatcctttttatccagaacctcctattgttcgtgttcattttaccccatttgctttatcatttgcacattctctctccatgtatcaatacataattgttttctgaatcattaagaggagagataattggcccaggcacggaggctcacacctgtgacctgagtactttgggaggctgaggcaggaggattgcttgagcccaggagttcaagaccagcctgggcaacagagtgagatcctgcctctaccaaaaaaaaaaaaaaaaattagtcagacatggtggcatgccgctagctactttggaggctgaagtgggaggttgagactgcagtgagctgtaattgtgcactgcgctctagcctgggttacagagggagacccttgctcaaaaaaaaaaaaaaaaaaaa

SEQ ID NO: 885 - DNA, 2261 bp, Homo sapiens
gtggccagtgccctgggctaggagagggataaagtcagctgtggccaagcagaagcagtattgcaggggaagggtggggagagactgtgctatgagctctgagcaggaggcaggacatggagagaagggtgggagacggacagagccagctgtgccagccgagggaccagagtgggcagtggggacggagcacagaccaccgcccacaagggtctctcctgtgacttctggcttcccgagggcagaggctgggctgggcatgtggcggctggcacccaggaggctccgccaggtccacgccaagccagcctggctcagctctggcttcctgctcacacgctggatgcctgtccccaggcctcctgacagggctctgcagcattggagaggcttgtggtggggccctcgctgtagaacaggcactgccagtgctcactgactcctcattgcagccagggcaggggcgctcccaccacctcggtttcagtcaggaagctggggggtgctgggatctgccagcagctctgtgtgctccccaggtgggctgcccggggccctggctctctggcttctacaccagtgcccctgcgaagcctcagcgcccaaggtctttgcaagccctgttcctgcatctctggagagggctgctccaggtgtgggcctggccagggcttccagaccagtccaggcactgcacctgcacattgacccccttctccactctctctcatccttcagtagccacaaagctggcagcagggtactcgcagatttgtgaggagagccgagcccttgctgactgtcctcccgtgcacggcagagtgaggcggggctcctggcctccttaggggctgcccgctctgggccacacagccagagaaacactgtccatctggctggcttggcctgtggggtgcaaaagaggtgttttcactttgctttggaaacatggaaattaccaagtgacttaaccataacaccaaatgatgatttttaaatttatgaaaattatggaaccagatgggacacagggaaacgagaacgatactgaaaaggtctgagtcctgtggggggtccaggtcccgcaagacagctaatcaggtgcccctgtctgttattcgggtaaatgtagcagctgggtccaggctcgggcagagcagctttctacagcaggggtgtccgccctctcccggggttcccacggggttcccaggggcctcttactctgccacgatgtgggagttccaccaccacagggacttgagcggcagctccggctcttacgtagaaacgcgcaactccagtccctaggttgtgtccgaggttgctatggtgccatcccatcttgccgctcactctgcgactgtgcggagaaacgcaagtgcccccgaagggtgggcgtggcctctgatgaatgcacacgttggtgggaggtggattccgtttgtacgaagcgcctcttcacgcgagcgttcacctcggtctcccctttgcttggtccagttccagaaacgccgctggactgcgaggtctccctgtggtcgtcctggggactgtgcggaggccactgtgggaggctcgggaccaagagcaggactcgctacgtccgggtccagcccgccaacaacgggagcccctgccccgagctcgaagaagaggctgagtgcgtccctgataactgcgtctaagaccagagccccgcagcccctggggccccccggagccatggggtgtcgggggctcctgtgcaggctcatgctgcaggcggccgagggcacagggggtttcgcgctgctcctgaccgcggtgaggccgcgccgaccatctctgcactgaagggccctctggtggccggcacgggcattgggaaacagcctcctcctttcccaaccttgcttcttaggggcccccgtgtcccgtctgctctcagcctcctcctcctgcaggataaagtcatccccaaggctccagctactctaaattatgtctccttataagttattgctgctccaggagattgtccttcatcgtccaggggcctggctcccacgtggttgcagatacctcagacctggtgctctaggctgtgctgagcccactctcccgagggcgcatccaagcgggggccacttgagaagtgaataaatggggcggtttcggaagcgtcagtgtttccatgttatggatctctctgcgtttgaataaagactatctctgttgctcaaaaaaaaaaaaaaaaaaaaaaaaaaaaaaaaaaaaaa

SEQ ID NO: 886 - DNA, 2455 bp, Homo sapiens
ggcacgagggccaatcgacacatgtccctgctgacagccttcatgcctgacagcttccttcggccaggtggggaccatgactgcgttctggtgctgttgctcatgcctcgtctcatttgcaaggcagagctgatccggaagcaggcccaggagaagtttgaactaagtgagaactgttcagagcggcctgggctgcgaggagctgctggggagcaactcagctttgctgctggactggtgtactcgctgagcctgctgcaggccacgctacaccgctatgagcatgccctctctcagtgcagtgtggatgtgtataagaaagtgggcagcctgtaccctgagatgagtgcccatgagcgctccttggatttcctcattgaactgctgcacaaggatcagctggatgagactgtcaatgtggagcctctcaccaaggccatcaagtactatcagcatctgtacagcatccaccttgccgaacagcctgaggactgtactatgcagctggctgaccacattaagttcacgcagagtgctctggactgcatgagtgtggaggtaagacggctgcgtgccttcttgcagggtgggcaggaggctacagatattgccctcctgctccgggatctggaaacttcatgcagtgacatccgccagttctgcaagaagatccgaaggcgaatgccagggacagatgctcctgggatcccagctgcactggcctttggaccacaggtatctgacacgctcctagactgcaggaaacacttgacgtgggtcgtggctgtgctgcaggaggtggcagctgctgctgcccagctcattgccccactggcagagaatgaggggctacttgtggctgctctggaggaactggctttcaaagcaagcgagcagatctatgggaccccctccagcagcccctatgagtgtctgcgccagtcatgcaacatcctcatcagtaccatgaacaagctggccacagccatgcaggagggggagtatgatgcagagcggccccccagcaagcctccaccggttgaactgcgggctgctgcccttcgtgcagagatcacagatgctgaaggcctgggtttgaagctcgaagatcgagagacagttattaaggagttgaagaagtcactcaagattaagggagaggagctaagtgaggccaatgtgcggctgagcctcctggagaagaagttggacagtgctgccaaggatgcagatgagcgcatcgagaaagtccagactcggctggaggagacccaggcactgctgcgaaagaaggagaaagagtttgaggagacaatggatgcactccaggctgacatcgaccagctggaggcagagaaggcagaactaaagcagcgtctgaacagccagtccaaacgcacgattgagggactccggggccctcctccttcaggcattgctactctggtctctggcattgctggtggagccatccctgggcaggctccagggtctgtgccaggcccagggctggtgaaggactcaccactgctgcttcagcagatctctgccatgaggctgcacatctcccagctccagcatgagaacagcatcctcaagggagcccagatgaaggcatccttggcatccctgccccctctgcatgttgcaaagctatcccatgagggccctggcagtgagttaccagctggagcgctgtatcgtaagaccagccagctgctggagacattgaatcaattgagcacacacacgcacgtagtagacatcactcgcaccagccctgctgccaagagcccgtcggcccaacttatggagcaagtggctcagcttaagtccctgagtgacaccgtcgagaagctcaaggatgaggtcctcaaggagacagtatctcagcgccctggagccacagtacccactgactttgccaccttcccttcatcagccttcctcagggccaaggaggagcagcaggatgacacagtctacatgggcaaagtgaccttctcatgtgcggctggttttggacagcgacaccggctggtgctgacccaggagcagctgcaccagcttcacagtcgcctcatctcctaagcactcctttcccctgctgttcccttcgaccctcagccctctggtgccgctctgcccgatgcacagccacctcagccagcccccaggtagaaacgtgggttaagctcttcctgccccgttcagcttcactcccaccctttcagcgtcctgccccttcaccttgacccgggttcccccactcccattccctggcctctgccataatttgttgttcaactgctccctccttcctgaggggcctcagggcttgtggggggtaggctgagaccccaccaccaaaggttaagtgaggtccccttgattgaggacttcaccccttgattaaagcaacttctgcttcagtgaaaaaaaaaaaaaaaaaaaa

SEQ ID NO: 887 - DNA, 639 bp, Homo sapiens
aattcggcacgaggatatacccaaatgacaaattgtttcttcataatgatcttccatttttaacactgataccactacacagtacatatgaaaacagaagctggggagaagaatgtttttttcacaattgaattgctgcatttctcaaactttgggatctatgaaagcggggagagggaacctgaatattaattatgagcacaaatttgaaggaaagaaaacaaagaaccattatctaatcaagctttgaaagtcctgcatgtttgccttttattttagtgttgacgccaacatagactgtctaaggtatttttttccccaaacacttgaatcttggtcgttggtatgtaatccactctctagagtccagtgtactttagacttcatctgagtccaatacatgtaccacactactgttttattaatgtaaaaaccttgtaaatgaatttcagatgggtgatttaagtgagtcacaagtcacaaaactttgctattcatagttaatcaaatagaactgggttttttttttcagagtgtggtgtaaataaagaaatataagaagttctgttctataactgctctgttaacatagtttttaaacattaaaaaatgtgaactaaaagtaaaaaaaaaaaaaaa

SEQ ID NO: 888 - DNA, 2534 bp, Homo sapiens
  misc_feature (174)..(174): n equals a,t,g, or c
  misc_feature (1350)..(1350): n equals a,t,g, or c
agcaactctatagatcatagaggaaacggtacctgcagtaccggtccggaattcccgggtcgacccacgcgtccggcatgcatgggaatagcggccctggaggatgttagacttgctccctctccaagacagcagcagcctgcacctgccccgtgtgtgtggccggcctcytcntcacccttcccggcccccggccaaggacccaggcgctgcatacaggggaggggcgcacccacagctggggccggttttcctcagctctaggctgttctgtagcttatctgcccctcccccactttcaagacagatgagcaggagcttgggtctctctcggcccctgtctgttcccagcccctgcagattctgagcaaaggccctgggtaagaagggtgggagtggggcctttgccagcagagccagggcagggcgagctgcaggaatcacccctctgcccctgcagctggaatgtgccacagaggccccacctgaagggtgatgtgctggaggggtggcccagagccatactgcgtccaccctgagctcggggacaggtgacagtggctgctctgggaaggggcttttagatgtaacctacaattcagttaggctagagacagatgctggtggaggaagggctgggccaccagggatcacagaccacaggaagatgggaggtggaagcagaggccctgcccccaccccttcctgtctcactcttctgtcttgtccccacccatgcgccttcgtgcctgagaccagggtggccacacaggcagggcctggctccagtctcatcctcccattgcccagtgagccctgctcttctctccccagccccctcccaccgctgcctcgtagagtgacctcggacagagcccccctagcaatacagggaggctcccggggcctggacaggcgggctcggaggctacccgctgtggccggtgccagctgcccttgcagggtgggtgagctctcaggccgagagccttatttacctagtgcaaaaactgtaaaagtgtacagactcttcacagatttttatcttaattgcaagtctgccgattttgtaaatgttcttggtgtttgactgtaatgtaactatctcacctaatggttgtacatatcctttggtcctggtgctgccgagggctggccgggactgctgctctcccaagggttttattttatttctgaatctagagaacagtattgggcaggaggaaaaggcttggtgtctgcggggggtgtcttccctgcctgtggcatttgtgtgttggctttgcagctgctgtctgagtagtggccactggggtgccttcactgggccagtcaacggggggctcctgnccaggccacagagaacctgagttcccgggagctgggccctgcctgcagccagggctggggttgccagaggccctggagggaaggacagtccctgctggggaagaacagccccggggccccctggtcaccgagactcagcctctgctggagaaagccacgccctccctgctagcacagaggcctgactgacttttttgcttaacttccatgttctgggtgatggaaactgccaaacctcctgtcagtgaggactctttccgactgcccagaaagtgggggtggaggaccgaggctacagctccacacgccccggtcccccagagcatctgccccaggtacacctccccctgcgccccgcacgactgcgggagccagactgtccagggaaacagcctctctcttttctacacactcagccacaaagccccccagctcccacaccgcgtcccagctcccctcttttgtaagtatgtgaaaaggaaaaaatgcaaacgttggagtttgggctggagctcctccctccagctgcgacttttaactatgtaataatgtacagaggaagctgttggtgttctaagactctgtgtggctgtgcaatttctgtacatttgcaattagaaatattaaagatttatttagctattttaaaaaaaaaaaaaaaaaaaaaaactcgagggggggcccggtacccaattcgccctatagtgagtcgtattacaattcactggccgtcgttttacaacgtcgtgactgggaaaaccctggcgttacccaacttaatcgccttgcagcacatccccctttcgccagctggcgtaatagcgaagaggcccgcaccgatcgcccttcccaacagttgcgcagcctgaatggcgaatggcaaattgtaagcgttaatattttgttaaaattcgcgttaaatttttgttaaatcagctcattttttaaccaataggccgaaatcggcaaaatcccttataaatcaaaagaatagaccgagatagggttgagtgttgttccagtttggaacaagagtccactattaaagaacgtggactccaacgtcaaagggcgaaaaaccgtctatcagggcgatggcccactacgtgaaccatcaccctaatcaagktttttggggtcgaggtgccgtaaagcactaaatcggaccctaaaggagcccccga

SEQ ID NO: 889 - DNA, 1124 bp, Homo sapiens
ggcacgagtccagtgcttgggcctggggtggggggaaggtgttagaggactccaggagctcctgcacccctccccaaatgtccatctttctcagacggggctctgtctggggagcacccacaggctgcctttggggtcccagagcctgctctgtgcactgaccccagttcctccatcctgtggccagcctagggctcatggcatgggcccccactgggggagggaggcatcttgtttcttgtggttccctgcaggccagtcctgtcctcctttccctgttctgcccactctggggaatagggaggggaggagaggagaggagagggaggatcctggaggactgggaagatctagcctaaagaggcttctctgagggccagggccctacagcatgcccctacggccaggggactgtctgccagcctcccaggcccatgccctcctggtgcccctggcactgaggcacagatcgtcaaggcaggtaccccctcaacccttcttccactggagcccctgacaccacaggtgccctggagcccttgtgtgactcagcctctgttagctgggtgggtgtcatcagcccctgcctcccaggccagaacctgagaacgggcccagggtgctgtggagatcaacttcaaaagagctaaccccttcccacactccacccacccacctacatttcctctgtgaaatctacctcagagttgtaccctcagaaggacgggtaagcaggaggccagggggtccccagggctgaggtggggagccttctacggcgaaagcctgccaccccacaatgaatccaccctgctccactgcgcgcctctcccaggtctcagctctgggtggggagcagtggccgctaccgacagcgcatgtcccgctcttatccaactcttccaggccccacctccctgcacccctcccctctatagagcaggggagtgaaggggtatgtcaggcggggaaggggccaaggacacgtcattgtaccctgagcgtccccagggagtggaaatggggaagggggcctggagaggggaggcaggggcccctgtgctctctgaacaagttgaaagtccaaataaaacttacctgttccaaaaaaaaaaaaaaaaaaa

SEQ ID NO: 890 - DNA, 1786 bp, Homo sapiens
caaggaaattcgggcacgagtaaactactactaactaatctacggacattcaaattttgccagttttcccgatgatgtcctttgtctggtccagggtcccatattgcattttgttgtggtgtttccttcatctctgtcagcctgtgacagtttcttggtctttatctttcatgaccttgacactttggaagagtccaggccagttattttatagaatattccccagttttagtttgtttaatgtttttacatgatatgattgaggatctgcatttttgccaagacaaccacagaagtgatactgtgctattcttagtgcctcctagcggagggtggtggtaactttttgttttggttttttttttttttttgagacggagtcccgctctgtcacccaggatggagtgcagtggcgcaatctcggctcactgcaacctctgcctcctgggttcaaagtgattctcctgcctcagcctcctgagtagctgggattgcaggtgcccaccaccacacccagctaatttttgtatttttagtagagacaggttttcgccatgttggccaggctggtcttgaactcctgacctcaggtgatccacccacctcggsctcccaaagtgctgggattacaggcatgagccaccacacctagactaggtggtggtaactttgatcacatggctaaggtggtgtgtgccaggtttctccactgtaaaattaggaattttccctttgaaattaacaagaatcttccactttgaagctgtgtgaatgtcttattcttaaaattttgcctactgattttcatttccatcatcaatgattcttgcttataacaggtattaatgttatgcttgcctaatggtgactttgtttcattattttacctgtatttattaattggtattctactataaggaagagctgtcccttttccccatttatttatttgataatttatatcagtatgaatgagtggatatctgttttattctacaggctacaatctaatgctaacagtttatttggttgctcaaattggctcagatttggccagtgagaactcattgaagttggcactgtgttgtttcgacattgcccctgtcactttttaagcattttctggcaccacaagatgtttcaggcttcctcacattttccctatctcagcccwrgcatcagtcattctcyaagaagctcccagttccttttattccagaaaaaaggaacttagaaaccaagttgtttcttgatgccactggaaaccaagatctggacagaatatatactcctggctagagtatcattggcggagtgtcattgcttgtaggcctgctcagcagacagagctagaaaacatatatgtatatatgttaaaacatgcaaatacaagcacctgaatttattattctatccatctgtatgttattaaaaaccgtgagccaggtatggtggctcgtgcctgtatcccaggactttgggaggccaaagtgggaggatcacttgagcccaggagttcaagaccagcctgcgcatcatagcaagacctcatcctccaaacgtttaaaaaataaaaaattagccaggcatggtggtgcattcctgtaatcctagctacgtaggaggctgaggcaggaggatcgcttgagttcagaaggttgaggctgtagtgaactgtgattgtaccactgcactgcagcctgagtgacagagcaagactccgtttcatatttttaaaaataaatraaaatcatgagtttaaaaaaaaaaaaaaaaaaaactcgag

SEQ ID NO: 891 - DNA, 1688 bp, Homo sapiens
ggcacgagggaaatcttttacagtctttatatgtaagatccaggcgggggcagggggaatggcttggtctgttatctgccagggtttaattttgagacatggccgtttcacaactgcagggtgcgggaagattagatgacctgaatgctggtggtaagtaaagcctcacacttcacattattccttaattgtctgtttttaaaaatttgtcttaaaaaaatattaaggtggcaacatattcaggtggcaacagagggtggggtgaccagtgacaaactgacttccatgtctctggctaatcttgatttctggagccaggctccagactaagtctggacaatcaattaattagcctttctatatgtattgcctgatgaatgatttcaatgctggacattgaacaatggtctgttgcaacagggtgaggccattgtctctggcaggtggggagatgggggctcttgttagctccatttgattacaagagccttgaatcaccaaaacataaagatgtactcgaatagaagagtccgttgtctgactggtaaatttaaggatgtgtttgaccctcgtgcattaaaacagacaattggcggggtgcggtggctcacgcctgtaatcccagcactttgggaggctgaggcaggcagatcacaaagtcaggagatccagaccatcctggctaacacggtgaaaccccatctctactaaaaatacaaaaaattagccaggcgtggtggcgggcgcctgtagtcccagccactcgggaggctgggacaggagaatggcgtgaactcgggaagcggagtttgcaatgagccgagttggcgccactgcactccaatctgggcaacagagcgagactctgtctcaaagaaacaaacaaacaaacaaacaaacaaaaccagacaattgaggcggccagctgcatttcataattcctcccataagcttcctcctatttgccacttgtttagcaatggaaatggagaacgaagatggcctcaaagtgactacatcaccagtgttacaaaaatgggccagaatttaaggcaagaattatatgtttcttaatagagggatgtttctctgtgtgtggctacttgtattcctgtggatttttaccagattataagagctgttaatttctgatcagaacagagaccaaaaattggagatatggatgtggggatgattcttttgggtaccgatagactgcaggaatcgcagggcttcctttaaatccattacagcttataggctagtggatgaataagataagtggagattttctcttgaaatatttccttctatgaagaaaaggccttgaaatgtgcatcctctttgggttgactaatttctatgcctttacagctttaagctgacattataagattattctagtttggatcttgtaagataattaacaaaatggaaataaaatgttttgtttttaaaaatgctaataaattatttattttcctttgtcttagttagttttaatacatattcagtgcttaaagaacaccagtgcaggaaaactcaaactaaatggcatcatcccccatctctataattctatatgcagtagccattcatgcgaagttagaaattagaatttatagcactaagcattctaagaaaaattaagccagtacgtttatctcttgaaaaaaaaaaaaaaaaaa

SEQ ID NO: 892 - DNA, 1487 bp, Homo sapiens
  misc_feature (840)..(840): n equals a,t,g, or c
  misc_feature (892)..(892): n equals a,t,g, or c
ggcacgagacaacgcaagctggggacgaaactgcagtgaccagtgggtgtggctgggtccagcctccagatctggcccgcacgatgccttgcaggatggacaggatgacagacagggacgaagcagagacctctacagacccaagtcaccaagtggagcctttttttttcttattttaattttaatgaacaaggtggaccaaagggctgaaccagcccctcaaccaggaccctggggggcctgctgcctgggggccgtggccagagaccctcgctgtgctgctgccagcccctggctggggcagaaagtgccctcggcatgggcacctgggtgtggggtggaggaggagggctcgcgcctctggtctcggggccaggaattccaggtggcgtgagaagtacacactatttattttttggttttgtcagaggcaggcaggattttggagctggaagaatctgctctccggtggctgccctgtgaacagaggctcccggtcagcttcccaggcccttcgccctatgcccagagggcagactgcctctccctgggccggggtggcctgggtgccaggaggaggggagcataccccacaccctccctgccaccgttgccgttccagaacctcggtcagtgtttccctgtctgggggcagggcccagagcgagcacgcgtctggcggctgctgtcgttgtgttctaccccgtactgacccaacaccacaagggctttctctggtcccctgtccctaagacaataatcgctttctgacaaaggagcctgcacatttgggtgagcagacccaagctgtttacagctctttcttgtcctgccatccantaacagttagtcttcatccccacgtgaacaaaatgggaaggaccgtgagganaagaatgaggcaacaggcaccgaaatccctcgtccttccctctgtgtgctctgaatatgtccttgtccttcctgaccatctctgaacaactggaacctgcttgggtcccctaaacctgtgtctgggtgtggctcacagatccctatcagcctggttcgtgggagggctcttcctaaagggccccccatctctaagtcactctgaaagggagttgtggagaggagacgcctccagactctcagaagttttgaggactgaactgggtcactcgggatctgtgttcgaatcctccccacccctttctttgtggagtttcctaacctgctgctgaagcacaatgttttggtgctttcttttctcatttgttaaaggcagtgtccaaaagccattccagatgccaagaccaggggcttatttctagggaaggtaggtcggtttccatgtttccctcccgttatttttattttttactttttgcctgagacaagccgagtatgaggtggtttgatttaagaaaaatcaatgaaattgtttactactgttttaaaataaaaccgtaaactctggaaaaaaaaaaaaaaaaaaaaaaaaaaaa

SEQ ID NO: 893 - DNA, 2834 bp, Homo sapiens
aggagatgtatctgctcaaggccctcctcaggtctcctttttttgatacagggtctcactctgtcgcccaaagctcactgcagccttgacctcccaggctctgatgatcctcctgcctcagcctcctgagtggctgggactacaggcacatgccaacaagcccaggtcctgggatgacccgagcaatcctgtgcctgctactctgctgcccaggacactgagagaaccagtgttctctgggaggaaaccactggtcatggtcttactgctatgccctctctgatccagggatacagcagtgaaaggtcaccccacctgcaggaaggggtcgctgactccagatatgctgtgttctgtggagtatcccattgtcaccagagtccggaggatgtgtaccagctggggtaccacctggagggagggcacaactttgggcattcgttctaatcctctccagctaaagccccattccttccccactgaccctgtcttccaggcccagggcctgccccttcaccagcccacctttcggaagtgcctgagggctgcagggcttcgttcgcagagctccgtgatcagcgtgatgctgcccagcaggatgcctggggtcagcgtcggggaagtgaatggtgggggccaggggcaagagagtctattgcgtgtgtgcctgtgtgtgtgcactacccttctcctgtgagctggggttcccatccgattttcaattcttctgtccatagacctgaagcaaaggatggggggccccacagccttaccatggtgacgctcatgaagcagttgggcacagggtgggaggaagacactggagagttcagggaccttccggatcatgtgcactgcagtcagaatagcctgcagaggtcaggggcctcagacaggggtcagaggagatggacccctgcatctactactatatagcacgcagcaggcagtgtgcaggagcacgtgccaggagtcccggcatctcaccttcttgcgcacgtagggactgggctgcaggagcagtttctccacctctggggccaggtctcggcacatctcagcagagcccatggtgctcaaagtgcacaaggccaggccttgtactggctgaatcccctggctcaggtcactgcagggtttgggaggacggtcagtcaaacctctgagaaaatcagtccttttcaatacccacaacaggcagtcccctgggatttccaaggtccctactctcccatctccctgattccaagtgattgccagaaccctctcacttcttgatgctgttggtaatgagcaggtgggcatcgtgcctctcatccaatagaagcatggcccccaggtagcccaccctcttgtctgtgaatctggaggaggcgatcagtttcaggcactccatctatagtgaagggggcagaccaggaagaggcaggggtgaaaccatagacactcacatccctgttccatcttcctctttaaaaccagattaacctgtggggcatcatatctcatcactctcccttcaacaagaggagaagcttaggaaattcaggcgttagtgggtaggaggaactaggagttgaggaggatgggagcggagaggaggagatgcctgccctaaaggaggctggccagagaatgaagggttcaggccagctgatgaccagtaggggtagcaatggggaaagaggtttgcagtgcaggctgtgaagactctgaaattgtagaatttaaaaaaccagggcataaacaggtgagagagtctgggactctgccccactagccttcatcaagctcaggagggaggtattcctggccagtacctgtccaaagtgggcggggtagcccaacatgtggacgtagagcagtttggccagctgccggtgcctgtgcactgggtccccgtcgcggaaggaggcccggatgtgggcacactccttttggatcacctcccgctcctgggcctgagtcttggccccgcgaatctcttcgatgaggtcctgaagcttcagcgaaggcaccaccatcctgactggcagagtccgggagtggagaaacactctctggtcgggcgtgcctgggctttcggcccaggcccgtcctgtgtcaagaccctaagagcccgggtcccacaggtaccctaaaattgcgcccgcattttacctttcccgaagtgggtctccaaattccgcgcccaccccaccgcccgagaagcccactacgcatgcgtccgcaccccaccggcgccccttcctattgagcatgcgcgggagccccacctatttctctctaccgtttcctccccctacctggtaccccatccctagctcagccattgcttttttttccacgaccctccgctgtttcttccgcgagcttcctcccccgatttccatctcaggcagcggcagcggcagcgacagcctgcctaccccaggactccagcctcacctggcttctgcctcaactccgctcctctgccccccagcgcttcctggtacggggccgagcaggggttggtgctccgtgcggtccttccctctccccgcctccaccacgggaccccgccctcctgggccgactgcagagccttcctgaatcctctgacctcgggcctcaggctttagcggagagacagcatgataggcctggagttcttcaagaggcctcctcgcacatccttaccacccggagagcctcagtttggatttgaagccatcgcaccccaaaggagatgacaatccccccccttttttgaacttttttattaatatattttttttgttaaaaaaaaaaaaaaaaaaaaaaaaaaaaaaaaaaaaaaaaaaaaaaaaaaa

SEQ ID NO: 894 - DNA, 1380 bp, Homo sapiens
gccctttgcaaaattaactctatttaaaatgaagattttagtcctttgaaatctctgcttcacaggagcattctctacagagggcctcccaagctctatgttcccattccttcaaggtaggatctcaacatgggagtggcccagcctgagggggagacacagaggctcaagcaactccagtgcaacagaaaggaacagtcagttttggattttggttgggtggaatatccaccgtataaactcccttggattcttccttcctcttgcttccagggggcagacagcatatgctttgctctctgattacacttagaagtctctttctggagtcagtgcagttggccagcaaaggatgttctgagcaaaccttttcagggttaccctacagcacagaatttattcattaaagaattttaccactacaatataaatgggaaataagaagatatactgctaaaatgagacataaaattgggtatataaattgctattttctgattaaatctggggagtacagtcactggggatggagtcaaattccttcaatacatttccttatgttttgacgagacagggtcattttgacctttcaaatgcgttaatcaaattccaggtgtctgtggttgacacatgggatagaaaaagtaagaagaaaataaacaattttatgctttaaatctgtgggagatgagtaaacaatgtgagtacatgaataaaattcctgtttaggtccaaaacatcccacataaacagattatttttataaaatggttttggtaaatgttatatattcaaactatttaaattgattcagtgtaaaaatgaaagtacctcatggagtaaaactttatgttaactcaatgtatgtctattttcatttatatcacaatttattattaatatctattaaggtatatatagtgccatctgtatttgagataattcattcaccctcagtttaaatatactgtcactagcaggcttcagataacataagagattaggcaaaatgcaaagcagggaatataacagaatggacactttatgttatattctgttactaaaagatgcagagaggctgggcatggtsgctcacacctgttatccaagcactctgggaggccaaggtggcagatcacatgaggttgagagttcaagaccagcctggccaacgtggtggaaacccatctccactataaatacaaaaattaggagggcatggtggtgggcgcctataatccaagctactcgggaagctgaggcgggagaatcacttgaacccaggaggtggaggttgtggtgagccgagattgcctcactgccctccagcctgggcgacagagagagactccacctcaaaaaaaaaaaaaaaaaactcga

SEQ ID NO: 895 - DNA, 1140 bp, Homo sapiens
gtgggggcaggccttcgtgcacgtggccgtggccggtggcctctgtgccgtggctgtgttcacgggcattttcgacagtgtttccgtgcaagtgggctatgaagcactacgccgaggcgcccgtggccggcctccctgccttcctggccatgccgttcaactcactcgtgaaacatggcctacacgctgctggggctgttgtggctgcacaggggcggcgcggtggggctgggtccccgctacctgaaggacgtgttcgcagccatggccctgctctatggccccgtgcagtggctgcgcctgtggacgcaatggcgccgtgccgcggtgctggaccagtggctcacactgcccatctttgcatggcccgtggcctggtgcctctacctaaaccgcggctggcggccctggctgttcctctctcttgagtgtgtctccctggccagttatggcctctctctgtgcatccccaggggcttcgaggtcgcactgggtgctcacatgtggccgctgtggggcaggcgctgcgcacccaacaggcactatggcaacaccacctcggctacctactcacctttgggggtgcccctcttgcctgggctttgtggtcctcaagctgtgtgaccatcagctcgcacggtggcgtctcttccagtgcctcacaggccacttctggtccaaggtctgtgacgtgctccagttccactttgcgtttttgtttctgacgcatttcaacactcacccaagattccatccctctggcgggaagacgcgttgaacccagggaagaacctgctgaaaaccgatgacccccagcattgaaatggactctgagatggcagcgtggtgccagtgtcagacatcctgtgtgtgatgatatgcactgatcacacaagactgccctttcctgagaagctgcgggcttcggtgtggaggggtggagtgctgtgatctcgacaacttactttcaaagacataaagcacagatctccgcacaggggatgtgtgtgttcctgatgtaatttgcataacttttctgtagtttgaaatgtttccaaataaatattggcaaggggagtggaaatgacaccaagaagcccctcatgctcatggttggacagagaaaaaaaaaaaaaaaaa

SEQ ID NO: 896 - DNA, 1305 bp, Homo sapiens
ggcacgagcaatataaaatatgaaactcaataataaacagtgccacctgtacatgggcaccatgccctcctcctcgtgctgtgttttctagtgcatgccacagttcgcagtagagggtgttttcaccttccaagacatggggcaaagtttggagacacctggttgtcactggagggggtggtgctcctggcttctcctgtggagcccggggtgatgcataaaatcctgtgtgcctgggtcagccgcatcacagacaatgacttgacatgaaatgtcagctgtgctggggcagagagaccttggaaggaagctcttggaaaatacgttgtatctcagtttgatgaaccaattcacaagaggctaggccctctctagcaaagttatgggctgctttactgaaaacagaatggaagccctgaagtcaacactccatggagaagcgtgtctttcctaatgtcctggtgttctgttgatttaggtgcttgggaacacaatgctcccagttctgttaggacaggcatactgttactttgcaatatccactttataaaatagctcctgcccagtggctcttgattcctgtcaaatgtggacctgtagtttaagaatgacaggtggttagagacccagatatttaaaaataggtgttcaataagggaatactgattgtgcattgtatctggatagcatgcctaattgtgcatttctgaaagttaccaattcaaaatgtaattggaacagttatctttgattagacaagcctgggaagagaatgttgaggtgcagagctcaccagccaagttcatgcccctctcgggcctttgtggctgagaagtgggacagaaagatgattaaggtaatgtgtcctccctgtagcattgtccagggccgttgtgtagatatttgacttcactgacagaaaagaaaccagggagtttgtagagactgtgcatttttagtataacattttcaccatctgatatggtttggctttgtgtccccacccaaattgcatctcaaattgtaatccccatgtgtcaagggagggacctgatgggaggtgatgggatcatgggggtggtttcccctatgttgttatcataatagagagggagttctcacaagatctgctggttttaaagacagcagtttcccctgctgtcactgtctctctcctgctgccttgtgaagaaggtgcttgtttctccctctgccatgattgtaagtttcccgaggcctccccggccatgtggaactgagtcaattaaacttcttgtttataaagtaaaaaaaaaaaaaaaaaaa

SEQ ID NO: 897 - DNA, 1962 bp, Homo sapiens
ggcacgaggacggactgggcagcagcctgtcgctggccgtgcccccaggccccctcagctttgaggcgctgctcgcccaggtgggggcgctgggcggcggccagcagctgcagctcggcctctgctgcctgccggtgctcttcgtggctctgggcatggcctcggaccccatcttcacgctggcgcccccgctgcattgccactacggggccttcccccctaatgcctctggctgggagcagcctcccaatgccagcggcgtcacgtcgccagcgctgccctagcagccagcgccgccagccgtgtcgccaccagtaccgacccctcgtgcagcggcttcgccccgccggacttcaaccattgcctcaaggattgggactataatggccttcctgtgctcaccaccaacgccatcggccagtgggatctggtgtgtgacctgggctggcaggtgatcctggagcagatcctcttcatcttgggctttgcctccggctacctgttcctgggttaccccgcagacagatttggccgtcgcgggattgtgctgctgaccttggggctggtgggcccctgtggagtaggaggggctgctgcaggctcctccacaggcgtcatggccctccgattcctcttgggccttctgcttgccggtgttgacctgggtgtctacctgatgcgcctggagctgtgcgacccaacccagaggcttcgggtggccctggcaggggagttggtgggggtgggagggcacttcctgttcctgggcctggcccttgtctctaaggattggggattcctacagcgaatgatcaccgctccctgcatcctcttcctgttctatggctggcctggtttgttcctggagtccacacggtggctgatagtgaagcggcagattgaggaggctcagtctgtgctgaggatcctggctgagcgaaaccggccccatgggcagatgctgggggaggaggcccaggaggccctgcaggcttcattgcccatgccattcgccactgctaccagcctatgggaggaggagggagcccatcggacttctacctgtgctctctgctggccagccggcaccgcagccctggcctgtgtcttcctgggggtcaccgtggaccgatttggccgccggggcatccttcttctctccatgacccttaccggcattgcttccctggtcctgctgggcctgtgggattatctgaacgaggctgccatcaccactttctctgtccttgggctcttctcctcccaagctgccgccatcctcagcaccctccttgctgctgaggtcatccccaccactgtccggggccgtggcctgggcctgatcatggctctaggggcgcttggaggactgagcggcccggcccagcgcctccacatgggccatggagccttcctgcagcacgtggtgctggcggcctgcgccctcctctgcattctcagcattatgctgctgccggagaccaagcgcaagctcctgcccgaggtgctccgggacggggagctgtgtcgccggccttccctgctgcggcagccaccccctacccgctgtgaccacgtcccgctgcttgccacccccaaccctgccctctgagcggcctctgagtaccctggcgggaggctggcccacacagaaaggtggcaagaagatcgggaagactgagtagggaaggcagggctgcccagaagtctcagaggcacctcacgccagccatcgcggagagctcagagggccgtccccaccctgcctcctccctgctgctttgcattcacttccttggccagagtcaggggacagggagagagctccacactgtaaccactgggtctgggctccatcctgcgcccaaagacatccacccagacctcattatttcttgctctatcattctgtttcaataaagacatttggaataaacgagcataaaaaaaaaaaaaaaaaaa

SEQ ID NO: 898 - DNA, 1880 bp, Homo sapiens
ggcacgagagacgccagaggtgcagctccagcagcaatggcagtgacggcgttggcggcgcggacgtggcttggcgtgtggggcgtgaggaccatgcaagcccgaggcttcggctcggatcagtccgagaatgtcgaccggggcgcgggctccatccgggaagccggtggggccttcggaaagagagagcaggctgaagaggaacgatatttccggtgaggctcaccgggtcccaagtccagccctggatctcccaatggccttccaatccttaaactgccaatcgccccacccgttcctacctggtgccttgggcgccccatcccccaacagaactcccgggccccaatccagtataccctaacccttgatgtcccgaccgttgccacgtatagggcactcccagttacctgcacaacagtttcaggcccccaaaccgtttccaccggcgggtctccaaaacaacccacggctcaactcctcctttatcattaccatctcccgcgtggagttctcctcaggtcgtgcgaaacaccccctagattcttcgcacagtgtctagatccgaccgcccaacgtttgcctcccagcctgactccctcggcccttacccacctgtcaccccctctacgctctccttcctcgccagcacgccttagctttgcaagcctgcatgcattcaggcttctcaggtgtttctagacccccgactccgcaagagtgaggatgatgggagctggtcatgggagctacttatggttggacaccatcttctaaaggcttttgccctactcagcccaacctagacctgtagatttccctctcctgcttaggagtatggagtgggctgggcctccctttgccagccttgagttatctttaactgacttctgtccactctggagagcagtgaggaattaatcttgcttttgcttgtcctttggcctttcacttctgccttctgttgagaattatcaccatgacacctgccataccgtatagagagccaaggtacagccgttagagactatctaattgagcccctacattttgtagttaaggaaaactgaggcctaaatgtgaccaaaccaacattgtaatccagtcccttcttggaacctaaattgaactgccaagtactgcgcatgcaagagaccctttattggccttacagtgggccattcatttctataggcaaagaaagctctagacagattggaataggaaatggatatttgccttttagctacacccctttgtctgtcttcctcattttgttcctttttttttccctaaaggggagtcaagttccctgggttgttcccctcataaggtattagggacttgtgtcaaatctttctggagttttctattttaaagaggaatctgaaagcaataagctctttggtcttcttaagatggctacacctcaatttaagatggggtattctttcactagttgaggagtagaagaggatgaccagctagactcccatggaattggaactcctattccttgcttagacattacaggttatgctttgagatctctttggggtgaaggattgaaattaaaccctgagccaccgtgtccttgtagagcacagagtagagaacaactggcagctttgaaaaaacaccatgaagaagaaatcgttcatcataagaaggagattgagcgtctgcagaaagaaattgagcgccataagcagaagatcaaaatgctaaaacatgatgattaagtgcacaccgtgtgccatagaatggcacatgtcattgcccacttctgtgtagacatggttctggtttaactaatatttgtctgtgtgctactaacagattataataaattgtcatcagtgaaaaaaaaaaaaaaaaaa

SEQ ID NO: 899 - DNA, 878 bp, Homo sapiens
ggcacgagccctcccaggtctggttagggcagttgttacatatgaggggcgtggagttttgtcttgtattttggccttgttggtaaagcattccaaagcttcgacacaccctcctttcagcccattaggaaaggctgttgattgtaatattcacacagctccctgggctatggttaagagccttgcagaaggactgggagaagccctgtgtgtttgaagtattgtagcatcagaaaaaaacaccggaagaaggcaggtggggacaaggagcctatgtctgctccttggaattcctttccttactgtccgaggcaactacagggaaagcaaagcgtgagcccccaaatccacacctgggaggaacgttcccctttgcaaggcatgggactggctggccctgtgtctcacgggggctctgagttttgaggtcacactagcctcctgaggcctggctgagagggctgggttgggggtcaggaggccccctgtagccacgaagctcctctggggcattgttaaaggttcaccctcttttttgtgggtatcctggaagatctcaagaaactgagcttggaagaagagaggctgagagggtctcccgccgcctgcgttctctgcagctatggccccacagcctccagtgaccatggaggggaaggtgccacccgccttggctgctgaaagggtgatgctcttatgcctgagtcttggctcctgtggtcctgcagagaccctgtgggggccgcccggtcgtcacctgcactcatcttgggttttccttccttttccaccctaagctgaaggtatttttttcctgttttcttcactctaacttggggaagaaggaagatcctttatggaaaaaaaaaaaaaaaaaa

SEQ ID NO: 900 - DNA, 2320 bp, Homo sapiens
gttaatttgtaaaatattttacctttttttccccctgccctctccagaaatgttacagaaaaagattgagtacatttctgccatgatgcagagaaagaaactggtccattattactcattgtgtaacaccataagaaggttcaaaggagctcataccttctgtatgttgatgccaggaactgtgtataatgaactggccttctatagttaggattggtacataccgctcattcagcaaatgagtattacagtgatattcaacatgtgtccattgactacagcatcagaagcactaagtgctattaaaatgcagattctaggcctcatcctactcctgctgaatccaggtatctcaggagggaattcatgagactgcatttcaaataaataccccatgtgattcttgtgcatgctgaaggttgagaaccactgatttattaagtatcttgtgtgttcattatgctttatcccctctaatcctcttgtctaggactccttaaatttgagatttagtattccctttaatataaacattaaaattgagattagtgtaaatttgtaaagagactatttagctaatctggaggaaaaagagtaaaaagcactgaatttagcagcaatagaccttccacttggctgctgtagtaagtaaacatttgcaaccacgtgtttggatttaacaaatgttattaggacttttcacagagactctagagtcttgcccagagcaaaacattcagaaacgatcctctctgagagtgcagggtttgtttttttgttgttgttgttttgttttgttttttaacctgtctagtttctgttaagatgctactggccaggtcttcatggtcccttgacattggcagctgtctgttcatcacacttgggacacaagaaccttccgaccaaggagcccagtgccatgggtctctggggccgggcacggtggctcacgcctttaatcccagcactttgggaggctgaggcaggtggatcacctgaggtcaggagttcgagaccagcctggctatcatagtgcaatcctgcctctactaaaaatacaaaaattagccgggtgtggtggcaggtatgggtctctgctataccacatgaccatttctagcaaaggctctgcttccaccacaggtggtaatagggaactggatatataatttatgtactccaaagtagtagccacaatccactgcctgttcccttcctggagcagtgtccctctttctgatttttctctctcactattctccaaggcaatccctgctctctcctacctctctaggaaatgaaacacgatttccaaaatgaacttaatctttcatgagaaactgaggatagagatgtcaataaggcagccactgtttccacctccccacctgaagagctaggaggacaactacaaagagcctgactgccttctcggaatgaggagagaggaaaacagcaacagtatcagtatgttagccttctacactaaatctcaagcaagccaacctttcagaccttcagtttgctcatatgtatagaaataatcattatactaccaatttctcaagttagtgtgtaaatcagaaagccaatgtctgtattgtaggatgtttagcaagaaaataaaaaataataacaaaaagccaatgtctaacagataataagagctcagtaaatgtgattgaattactaacaaagtatgtgaaagcagacgacacagtacctggcacactactaaactgtaaatgttttcaaatctgaatctgagaattctgtaaggttttatgtaatatgaatatcattagctattatggctctggaatttttttttccaggttttcaagatggcagcatctatgcatggtcagcccagtccttctctagaagatgcaaaactcagaagcccaatggtcatagaaatcatagaaaaaaattttgactatcttagaaaagaaatgtaagagaaatgcccaggctgaaaatcagttcattttatttgcaagtcttttgtattgccattgtttctaagatcctattctttcttaccttttctgttatctaagatcctattctttgagttggctatgaagaacacatctttaaaaaaaagaatgggggaaacaagaacagatgaaaatggtggtttgttggaatatttcggattgtggataatttcttttgtttcttaaaaagtatccaaaagtattgctaaaacttaaagtataataaaaaaaaaagaaaaagaaaacagcttaactagaacacatattcaaaatttaaggttatttatataatcactaaaaaaaaaaaaaaaaaa

SEQ ID NO: 901 - DNA, 1669 bp, Homo sapiens
  misc_feature (1554)..(1554): n equals a,t,g, or c
cccacacgtaagggacaaaagatggacaccaccgcggtggcggccgctctagaactagtggatccccgggctgcaggaattcggcacgagttagcttttaaaatgtatttttgtttttacttaagagttttaaaaagtagtcatattttaaatttacatattgttgggaaaattctgccaatggtaggataaaacaatagatttcaattgaaatattgaaagcaacttgtgttggtaaaagatgagaagtgaaggtggaagactgattaaaactaccaaaaatatcatagtggtaacacttttatttttctttttttgtgggggtggggatagtaccattataaaaatacaaacataagctgcttttgtacatcaccaaataattcattgaaatttaaggaaatcaaccagttatgtgtgtacacacacacacacacacacacacacacgatctcatagagtgaagggttaattggaatactgactgagtgcaatgtacaagaaaatgtacacactgaatacaaacaagggaaaaaaatcaactttgcctaggagaataataaatataattataggaaggaggggggacagggtaggtgttaaaaaggagtttcctgggaaaataaggaagtgaagaaaggcattccaggcataaaatatgcttgctatgtgcaaaacaacagtgggaaatagcatagactcttccatgtacatactgcaagtgggtatgtgatggtggagctacagttggaaaggtaggtaggggtcgtatcatctagcccgatttactagagtttaactttatttaytcatgaataggtagatcttgacagattttaatgaggggagggacatcaggtgccaagtacctacaaacatttaaacaagggaagggttttatggttgcagtgattaggacacgtttgaggaatatttagacaattaagttagtggaacttatatttttataggatgtaaatgaaggggcacagggaagccaccgaaggtgatttctgagattctgttttgcataacttggtacatgatatgccacagacataaaggggaaatgctttcaaagagatctgtgtttttctcaaattttacccaatatatttgcataaagctcaatgtagattggaactatggcaatttgattcagttccacagcttaagtaagtgttattttgttcagttaattgaaaatgaaactatacctgacaggaagctgattacttatatgctaatgtgacagtattatagatcataggacttataacacctattaatttggtaaatgggaaaaacaaaactgtatactgtgaaataagaatttacgttatgtatataagaaatagttgatttaggctgggtgtggtggctcacacctgtaatcccagcactttgggcagccaaggcagctggatcacctgaagtcaggagtttgagaccaacccggccgacatggcagaaccccgtctctactaaaactacaaaaattagccggatgtggtggtgtgtacctgtcgtcccagctgcttgggaggctgaggncaggagaatcacttgaacccaggaggcagaggttgcagtaagcccaaatcgcaccactacattccagcactatactccagcctaggccacagagtgagactgtctaaaaaaaaaa

SEQ ID NO: 902 - DNA, 1668 bp, Homo sapiens
  misc_feature (1553)..(1553): n equals a,t,g, or c
cccacacgtaagggacaaaagatggacaccaccgcggtggcggccgctctagaactagtggatccccgggctgcaggaattcggcacgagttagcttttaaaatgtatttttgtttttacttaagagttttaaaaagtagtcatattttaaatttacatattgttgggaaaattctgccaatggtaggataaaacaatagatttcaattgaaatattgaaagcaacttgtgttggtaaaagatgagaagtgaaggtggaagactgattaaaactaccaaaaatatcatagtggtaacacttttatttttctttttttgtgggggtggggatagtaccattataaaaatacaaacataagctgcttttgtacatcaccaaataattcatgaaatttaaggaaatcaaccagttatgtgtgtacacacacacacacacacacacacacacgatctcatagagtgaagggttaattggaatactgactgagtgcaatgtacaagaaaatgtacacactgaatacaaacaagggaaaaaaatcaactttgcctaggagaataataaatataattataggaaggaggggggacagggtaggtgttaaaaaggagtttcctgggaaaataaggaagtgaagaaaggcattccaggcataaaatatgcttgctatgtgcaaaacaacagtgggaaatagcatagactcttccatgtacatactgcaagtgggtatgtgatggtggagctacagttggaaaggtaggtaggggtcgtatcatctagcccgatttactagagtttaactttatttaytcatgaataggtagatcttgacagattttaatgaggggagggacatcaggtgccaagtacctacaaacatttaaacaagggaagggttttatggttgcagtgattaggacacgtttgaggaatatttagacaattaagttagtggaacttatatttttataggatgtaaatgaaggggcacagggaagccaccgaaggtgatttctgagattctgttttgcataacttggtacatgatatgccacagacataaaggggaaatgctttcaaagagatctgtgtttttctcaaattttacccaatatatttgcataaagctcaatgtagattggaactatggcaatttgattcagttccacagcttaagtaagtgttattttgttcagttaattgaaaatgaaactatacctgacaggaagctgattacttatatgctaatgtgacagtattatagatcataggacttataacacctattaatttggtaaatgggaaaaacaaaactgtatactgtgaaataagaatttacgttatgtatataagaaatagttgatttaggctgggtgtggtggctcacacctgtaatcccagcactttgggcagccaaggcagctggatcacctgaagtcaggagtttgagaccaacccggccgacatggcagaaccccgtctctactaaaactacaaaaattagccggatgtggtggtgtgtacctgtcgtcccagctgcttgggaggctgaggncaggagaatcacttgaacccaggaggcagaggttgcagtaagcccaaatcgcaccactacattccagcactatactccagcctaggccacagagtgagactgtctaaaaaaaaaa

SEQ ID NO: 903 - DNA, 1677 bp, Homo sapiens
  misc_feature (40)..(40): n equals a,t,g, or c
  misc_feature (91)..(91): n equals a,t,g, or c
  misc_feature (99)..(99): n equals a,t,g, or c
  misc_feature (1155)..(1155): n equals a,t,g, or c
aaaaacaatcctcccccaaccctggccaacaaaaactgangggccaaaaggaaagggcctggggttttttcaagccttcctgggaaccccngaggaaanaacccccaaccctcactccctcccttccccccagtaccatccagacctggtttaggaaggccatcccccagaaggggccagccctcatgccccccggtttccagccccctaaaggtaaatgaattgtccttgaactcctgccttggcatttcgcctcggaatcacggcagacttggagtgtttccttccaaggcaggcatcctgccttatgagccaaggtcaaagatttttcaaaatattgtgcattaattcattaaagctactgttaaatatttgctgtttttagattggcgtccgtgctaattctgcagttgtagcactgtatattttatctcatttctgtgccaagaaagttcatctttatgtttttctaatacacaatcttgatcatgtttccaaaataaagcttcagctccttggtcaatagaagtaagggtgtagccatccagggtctcccggctctaggcagaccggatcccgcggttcatcccatggttgttgaaatgtacctcgatcagtcatctctggtattcctcactctggccatgagccattgccatcttatgggcccgatttgggtactctgaattatgtcatggagtagacagttacttctaaatcccagcaaccaagttgcgtatccttccttatagctagtttctatagagaagtgaaaaagaaatctgggcttccttaataagatagttgagcctatgacattaaggagcagcgctgctggcggaagattctagattcactgggtggtttaagagacccagggatttagttcttactggtgcataagtgttttcccatgctaaccggaaaaccactcacccaggcttcccccacttcccctcaaattttctcagctctgccgctggtctccatgaacggcaaggggaaccaccactcattcactgtcagtgtaggtaagacagaggatgcccttgcaaaaattgggactgaggacagtagcacacggaatggtggatcgtacatttgcacccagagctactaaacgctcagtgaccccagagaccattaatttcccanagtgaargggatgggggtagagctaattggaatttttattatccaggactcatcctaagaagaatgttggcctctcttcatccctggcttagccgtcaggtagaacgcttactcacctgacaccgacttcttagagaagcgagtcttttttgaatggaggagcgatggtaaccccactagggggcgcccatgatcggctcccagtgcacccccttaagggtaagcaggccrcatatctagagtctgatagtctgtgtgtacataaggtctagaagtctgtggaaacgccctgaaacytgtagtattatcttaactaccctcttatgttaaggtttacataataggatttttaaacaaatgtgtttaattttttaagatctcttgtattaaaattttcttttggaataagctgtggaaattttgttacaacctggttgagatcaacctctttacaatgacacaaattgtgacattttataaattagatacttcagtgaaaaaaaaaaaaaaaaaaaactcgaa

SEQ ID NO: 904 - DNA, 992 bp, Homo sapiens
ggcacgagcagcgcacaatgactggacgccagtccctccgtccaggctgcgccttactgctcctcccctcagtcttctcgcagctgctatccttaggggcacctgggagtgaatgaagctgcacgaggtccgcgagcctctgcccagcccctgtccctgcagcctaggatgcaaagggaggctcagaacccaggtcgccctgactgtggccttggtaaagtctggaaacagtcctcagcctctgatatgccagatatccccagggctgctggttccgatgtaggaactgcccagggtctgcacgctcggcccggtccatcctaccacggccgccccctgaggggcccagggcagcatctcccagccccaggggcaccccaacctgctgtgtctggggaagtggaaagcccggatcctccagtatgggggcggaactgcccctaccaccaatcccctaatccaaaggcacatgtcaactaaaagataatgtggggtctcctggtttgagtgttccctgggctgcgccttctcaacatccagcgtgccaccgcagacacccccaagtccccccatggtggacttacctacaagaaccacagccacttctcaccacagaactcctcctaatggctctgggggtcgcatgggccacagtccaccccctcccagcgctccatcccccgcttaaggaggtgtgctgggcccacgagctccggagcacccactggagccacggcctccctcccactgcacactcccagcactgagctggggagccagggcgcctacctgtcccgccagccctcccacccacctcagcccccccacccacctcagccccaagacacacacaggccggcctggggctgcagactgagttattttatttcgctatttccagtttgaagctactatcatgggcgtttagagttatacaaatgacacttacaaaaaataaaagaccaagacacccaaaaaaaaaaaaaaaaaaa

SEQ ID NO: 905 - DNA, 2150 bp, Homo sapiens
  misc_feature (13)..(13): n equals a,t,g, or c
  misc_feature (1984)..(1984): n equals a,t,g, or c
acccacgcggttnggacccgtggggccggcttggctagsgcgcggyggccgtggctaaggctgctacgaagcgagcttgggaggagcagcggcctgcggggcagaggagcatcccgtctaccaggtcccaagcggcgtggcccgcgggtcatggccaaaggagaaggcgccgagagcggctccgcggcggggctgctacccaccagcatcctccaaagcactgaacgcccggcccaggtgaagaaagaaccgaaaaagaagaaacaacagttgtctgtttgcaacaagctttgctatgcacttgggggagccccctaccaggtgacgggctgtgccctgggtttcttccttcagatctacctattggatgtggctcaggtgggccctttctctgcctccatcatcctgtttgtgggccgagcctgggatgccatcacagaccccctggtgggcctctgcatcagcaaatccccctggacctgcctgggtcgccttatgccctggatcatcttctccacgcccctggccgtcattgcctacttcctcatctggttcgtgcccgacttcccacacggccagacctattggtacctgcttttctattgcctctttgaaacaatggtcacgtgtttccatgttccctactcggctctcaccatgttcatcagcaccgagcagactgagcgggattctgccaccgcctatcggatgactgtggaagtgctgggcacagtgctgggcacgrcgatccagggacaaatcgtgggccaagcagacacgccttgtttccaggacctcaatagctctacagtagcttcacaaagtgccaaccatacacatggcaccacctcacacagggaaacgcaaaaggcatacctgctggcagcgggggtcattgtctgtatctatataatctgtgctgtcatcctgatcctgggcgtgcgggagcagagagaaccctatgaagcccagcagtctgagccaatcgcctacttccggggcctacggctggtcatgagccacggcccatacatcaaacttattactggcttcctcttcacctccttggctttcatgctggtggaggggaactttgtcttgttttgcacctacaccttgggcttccgcaatgaattccagaatctactcctggccatcatgctctcggccactttaaccattcccatctggcagtggttcttgacccggtttggcaagaagacagctgtatatgttgggatctcatcagcagtgccatttctcatcttggtggccctcatggagagtaacctcatcattacatatgcggtagtgtggcagctggcatcagtgtggcagctgccttcttactaccctggtccatgctgcctgatgtcattgacgacttccatctgaagcagccccacttccatggaaccgagcccatcttcttctccttctatgtcttcttcaccaagtttgcctctggagtgtcactgggcatttctaccctcagtctggactttgcagggtaccagacccgtggctgctcgcagccggaacgtgtcaagtttacactgaacatgctcgtgaccatggctcccatagttctcatcctgctgggcctgctgctcttcaaaatgtaccccattgatgaggagaggcggcggcagaataagaaggccctgcaggcactgagggacgaggccagcagctctggctgctcagaaacagactccacagagctggctagcatcctctagggcccgccacgttgcccgaagccaccatgcagaaggccacagaagggatcaggacctgtctgccggcttgctgagcagctggactgcaggtgctaggaagggaactgaagactcaaggaggtggcccaggacacttgctgtgctcactgtggggccggctgctctgtggcctcctgcctcccctctgcctgcctgtgggccaagccctggggctgccactgtgaatatgccaaggactgatngggcctagcccggaacactaatgtagaaaccttttttttacagagcctaattaataacttaatgactgtgtacatagcaatgtgtgtgtatgtatatgtctgtgagctattaatgttattaattttcataaaagctggaaagcaaaaaaaaaaaaaaaaaactcga

SEQ ID NO: 906 - DNA, 939 bp, Homo sapiens
ggtagaacctgattgttttcttctaatggaaataaataacaaatgtataggagccaagtgtttaaatatttgttatttcaaatgtaatagtttatctactgcttatgtttgctaagaccaacatattttatctgctggatatatttgctaggacagcattgacttttgtgcatttattttataattggccatgtactgagctgacttagaccgtgactaataggttttcagatggttcttttgagagttcttgctagtcatttacatcatttttatttctcttttacaatatgtatatttcaatctgcttatatattaacccttctgttggtggttttaatgacatctgactagaaatactagttaaaacattaatgtaagtaaatgagggattgcatatcmaatatgaccacgtggaagcatgcaawtaacataaattcacaaaacaatacttcaggtgacaagaacactataaaaatgttcacatccctagtaattaaaataatatacattaaaaatggtatactactgggattgcaggcatgagccactgcgcccggccacggaagatttccattttaagaaatatgycttgaaaaaagtaatttgataaatattaaaatgcttgtaaacagrtattwaycataataagaaaaaaaggcmgcmatataatatctaaaccctaacagtcattctccagagatgctgttctttgtacctgcaatgtggttaagaaaagcattttatttttctttaataattatacattaacatgtaaaaatcccatcagagtcccagcacagtggcttatgcctagctgtaatcccagcactttggtaggccaagcagggaggatttcttgaggccaggaattgaagaccagtctgggcaacatagcgagacccctgcctctacaaaaaaaaaaaaaaaaaactcgag

SEQ ID NO: 907 - DNA, 641 bp, Homo sapiens
ttttttttttttttttttttttcctgcctcaggtttatttgtacaaatagcacaggaggaccccagccccatgcagatggtagcccagggcgggggtggggggtcgcaccagtccttctgtcctcatgttggcagagatatctactctgaagcctttgtaggggcctgggtacgtttgggagcctgagctggaactgaagctggggctgcagcctgggccttggtttgatccttggccttggccttggcctttggccggcacagcctgagccccttggcaatacgggcacgagcacgcttcccaagcttggggtgggcaatgtaggcaagtcgatcgagcttgcggctgacaccctttgggatcttgggcttaacctccttgggctttacgagggccttgatagcctcggcacgtgcactcatggccttggcattgttggcctgcatcttctttaggccctttttgttgtgcttcttggcaaagcgcatgttcctcaggaacttgggtccacccccttaagagattcgtatctttgtgatcggggtttcttgataccatttctgtgccattttcgggactggttgtgtgtggtgtggttcttggacttggccatgtctgcaccataagccgcgctcgtgcc

SEQ ID NO: 908 - DNA, 883 bp, Homo sapiens
gatctgggaagagagtgcacagtaagagactgaaggacagatcctgactgaggacaggtagaggagttgacaaaggagcatgcagagaggcaagggaaacttcaaaagcagaatgtcacaaaagccaagagacagcttcaaaggggacagtgtcagcaaggtaaaggctgccaagaggtcaagcaagaaaagtactaaaaatatccatagcattcagtggacaattcatgacattggcattcgtgaccttggttagagtgatttcaaccatcataggtggaatggccgaccagggtgaggtgaaaagtcagtgagaaaatggagagaaaagatgatggagatacttaattcaaggagtttggccttggggtgaggggagtggacagggagagggcagtagctgggagggcatgaggtccagaacttcttttcaaggtggcagagacctgagtttgtttacatgtggaaagaagaggccaggagagactgttggaaaatacgcaagataaaagaggtacattatggggtggggagtgcccttgactgaaggaagagagtctcttccactatcctagaagggaaggaggaaggagagcatgagtgtgaatgccagctggtgggaagctaaaggaactccagacccgtggcttcaattttctctgttcaaatgttcttctctgagagcaaggatggagcggggaaggtctgaaatagagtaaaaatggggggctgggcacggtggctcacatctgcagtcccaacaccctggaaggccgagccgggcagacgacctgaggtcaggagtttgagaccatcccggccaacacggtgaaaccccgtctccaccaaaaacacaaaaaaaaaaaaaaaaaaaaaactcgag

SEQ ID NO: 909 - DNA, 1350 bp, Homo sapiens
ggcacgagtgttgatcattacctgtaaatgaaagaccttaataggaaaaaaagagtaaagctcagtgtgaatgcaaacatccacaaaatatgatcttcgtttatattctgtgatgttgtttataaatgaatgcctcagttctctgctacccttttcacagctttgtactgtttgccttatattctatttgtgcttttaaagtgtgtctgttgggaaaacaaaatgtgtaggtggtttgtaagtgaataatttttatttcttcttgtattaaaattttgtttttttctctactttgggagatgtttatttacattgtcagactattcacaaaacagattctaaaatttgtttgctcgtatgctgttcccttcaatgtgatatcagagattactatgaatgttagtttcattccgtgaaacattacttccatataaagacagatctcttaataagtgaatctagtggaagaacataggtatcattctaattccatggtaaattttgtcatgattctatatgaataatggggtccttcaggaagttggaatttttgccttctcttttaattgcagtgaagttctctttataacttctaaaattcggaattctagatccttgcttttgcagaatttggtgctcagacaatatttaaggacatttcagcgagacaaagtgcatgtttttatcgagtaccctgtgcaccacattatatctggcaattctttttgtttcattatgtgcatcaatatttttctcagctactattacctgaaacttgtttaacatgtattagacctagaattttcattttctttctcacatagttgcttcctggtatctgatttagaaataacatttaaatgccaagtatctgggggattgaaggaagggtctatatgagcaggtgaattagcagtactgtttttgtttagtggatattgttagtgactttttgtgtgtgttttgctttgggacctttttattttggtgttgcaaaaagtaacatattttcatcattgcttcatacgacatggagttaggacagggaaaaatcattcaacactccttatgcattaaatgatcaaataaaccagtgtaggatattaagactatcaattggtgggattaggcttgacattttatttttataaatatatattttttctgaatgtgtctgagtccaagagtgggcaaaaaataattttctactttggactaatctatagaggtttttgaaagtctgcattactaacttgttgaattcatgatattctgcctatggcacaaattgtaaacctttgtttttctaaaataaagtaattgaaaacctgcaaaaaaaaaaaaaaaaaa

SEQ ID NO: 910 - DNA, 2541 bp, Homo sapiens
aattcggcacgagcaaggatgggagaagcgaaatctgcctcactgttacttcatcaatcacagcttcaaatgtctcaatcagcagaagattgtaaattcgatctttcagggaaattaatctattctgaaaggcaataacatgaagcaaggcaaaggaggcactgatggtttagtatactacataagggatttttttgttctattattaagaaaatctagacctgaaatgttttctcaactcttattgtactgtgtatatttatattgttgtcgtggcggctgtttttaaagggaaagtgttggttctattaatttgttaagtgtccatccaggtgggcctacctgattccacatatataagtacatatctgcttataaagcgctgtaaatggcagcaaggctgtttttggagaagagtttgggttttcctaccatccctttgaatgctacacatccgtctattttaacccaagtagttcrtatttcagatatattttctcctttcatctcctctcactactgcagagtccagtaatacctagcataggattctgtcctgtgtcaaatggctaaaataaatttttgccccaatagacatgctgcctcattcaaaagagctgccgctgtcatcttgaggttccaggtagtgagagaagaaactcgacctgccagggtcaacagccatgaagaggtsgggggagtcatgattcataaacactgaaagaagtcaaggcttttggcagagagtgttgatttagatttttagtcttgattgatgggcagtatgcatcggtgtctagctgaagttgtctttaaatgcccttactcgtcacagtttaaacacttaggatgtggcaatcttaagtatcaatggcattttatgtccagctaacatcctaaagcattagaaattaaaaacgaaagacttttaaaaacatacatcaaacatgcttgcaccagagaagctttttaaaataatacactctcatagccaggtgctaatttaattttacttatgaaattaagagaggtgatgggttctagcaacagatattttcacggacatattctaaaaccactagagaattcgctacctctcagagccatcgatgctttgagctacctttataaacagggcacaaatgtttactgctgtggtttacaagaaaagggctactcacttattttgaaaccaacgaaccaacttttaactagggtgaacaaagcactcaaagtgctttgtgaaattggagcatacagagattttgagcttcaagtatttgctagttttaaaaagaatacaccttttctttaccttgtagcagcaattaaaagtcacacaaagcttgcatcgagtagggccaactgccacttgggtagcctatggtcacattcaatactgagaatgacttggaactcacagattaatatgaaagaagcagcgttcatcccaagacccatgctcacaattacagctccgtgccctgaggtagagttgagatttggattaagaaatagatttctaatacgactcaagatcatcctacaatattttctttggaaactaatttagcccatgatattttaaagagagacaagagaaggcctatttatcttgtctaagtgaacggcatttgtatattcataagctatttttggtaagaattttaaatcttttagctcaaggcctacagggcatcatgatctttgccttccttgaaaatacaatttaaattgtacaaacactttataaaaagctaattattggtgttagaacatgaccccacacaatgctgcttgacccctgaaactgacattcatgagcataacctttgttacattgttctttttgatgtaatttgtagaaatgttttttagttcgtaatggaaaatgtatgtascctgawaaattacttattttgtttaactttggtataaaggtgttgggcattttcttggggagggggggattacaaaagaagtttgtctcccacatcaaaaaacgttcaaagaaattaagtatttattatattttttgcagatgtttccatacaattcacataacctttttgtaaagagagatgaagaaatggattaaagatttttaatatttgaaatggtaaatagaactaatttattgtaatatatttctgttatttatagatgtttccttaatgttttactgtgcattaccactttcatttaagccttatccttgtgaatttaccatttyttttttaaaacatgtctagatgcatattttaaataactggaatgtaaatcactagcatatctgaattcccaaatgtaatttttaaaaattattttggtttggaaaaaaaagattcatttgaaagccttcagatggaggggtgggaacatttttatggctttatgaattggaatttcataggcttatttacctagattgtgtgtgaacaaaaaaatattgtaaatagatgaatgtttcccataatgtaaaaagaagaaattaataaaataattaatgcactgctaaaaaaaaaaaaaaaaaaactcgag

SEQ ID NO: 911 - DNA, 647 bp, Homo sapiens
  misc_feature (594)..(594): n equals a,t,g, or c
gtttttctctgtgtacctgatactttttaattaaaggtaaaaggtaaccgaacctttaactcttgagccagtgataatgagaaaataaaatttcatttctaaaattagagataatggaacttaaaaaaaatgtgttctctgtgtcatctctgtgcaccccctcccactattcctctcacacgctgcactttttttttttttttaaagctgcattaataggctgttatatcctttgaaataccacaggtcttgagagggatgaatgatgaaatgtaaagatcagtgattgagcaggaatgggagaaagattagggattgggttttctggcacaaggctcctttctgtcaaaggactgcaaattttcctgggttgacgtgggcttaattttttttttttccccaaggcagaagaatttttcttagtacagaacaaaatggagtctcctatgtctacttctttctacacagacacagtaacaatctgatctctctttcttttccccacatttcccccttttctattcgacaaaaccgccatcgtcatcatggcccgttctcaatgagctgttgggtatttcaaaggatataacagcntattaatgcagctttaaaaaaaaaaaaaaaaaactcgagactagcggcacgag

SEQ ID NO: 912 - DNA, 1203 bp, Homo sapiens
tccaacagggcatgtcccgggaggaccctgagtgccagattcccctggacgctcctgctgattctktcggcagttgaaggcccgtctgaggccccgcaatgcgagggtcctgtgtcccacttcactgctccgaagggaactggctggctgtccgtccagtgagcggcccagaccccacctctgcgccattgtmaccagggccctgtcctggctgcctcacccatgtmaagctactgaggctgtgtcttgtttgttttctctgttacatttttgtttgctgttgtcacagtcagctggtttcggcgtgatgttgaccttttratgtacatactccgttttaaactcatttccactctagttgagttctgcagcatgcagcggtatgaccctacgggggtcaggagagccctgcggcccccacccaccagctcagaacctgtcactaatacagctgcctgtgaccctgggacccgcaaccttccagctgcttccctttgtcaaagtcacgagtgcgtctgccttgacagccctcgtcaacagaacttccagtgggttgtgggttcatttcctttctttttaagaacagggttgggaccttttctgcccctgccccttagctactgaggcatagggagaggaagttaatttcagagccatacaaaaataagccacaaccagcttcagaattaattcccaatcccccattccaccagggctgggagcccattcccagtgcttcccaaggccctcggggacatctaccgccaacccagctgcttctggcaggggctccaagccccagcgtggggaagggccctggagaagccctcatcctcatgggaaccacactgcagtgggtggggaaggttgttgtcagcaccgcccccggctcctccaggtcctgctggctcctcgggggcagggttccctggacctcccagttctgcgccttggggccagccagtactcagagaggaggaccttctcaaccacgtacagaacacgggttttcatggctgcctttggtttggttttctgagaagataggattggattggattttgcagagggtgagaacttctctgtgcctgctcagaggcgccctagggaagggccatgtttgagttttgctttgtatgttgttttgcaagtatctgcctggtactttgatttaaaataaaaacaattttcataaaaaaaaaa

SEQ ID NO: 913 - DNA, 1561 bp, Homo sapiens
  misc_feature (1507)..(1507): n equals a,t,g, or c
  misc_feature (1527)..(1527): n equals a,t,g, or c
  misc_feature (1544)..(1544): n equals a,t,g, or c
  misc_feature (1560)..(1560): n equals a,t,g, or c
ggttttttttctcaaatccacaatctaaaaaacttacttaaaattattttatttttataattaaatggattttgagcatttctaaagttagactgctgtatttgttttctttctgcatgtaggtttttattggaaacataaggtagtcataggaacaatggtggctagatgctttctgaccttcctgcgggtaaacagcctctctcaaggaactgtagagatgggggtctggtctgggttccctcctcagagcctcctcatcacagcacagtgaaggcactctgtgattaggcgtgtctccttaagtgttatgttctctgttagaatctgtcatctggaagcctgcagacaggtgtgtttgatgacgtttcatggggccttcaggagacatgcagaacttatggtcagggcatccataaacatgtgctatgaagagagtgcctcctgagatgtatycagtgggccttaggttgcaaatggggctcagtggttacagtttgtgaggacaggaacagtgtcttcctacaccgtggtattccccacaacacttaccacagggttaggtgcttaagagctggtgaagtcatcaggcaaggtggaagacagacgacgtgcaagaagtgtgtcacagccactcagctggccacacccctgcccatctggtcacgcagcttccttaaatagctgcttctcaggcaggccttgctcaaggccagagtcaagggagcctcagagacaagagtttgaacacttcctctcatgagaggacttcagcccagggatttcacaaagtcagtatctgcttcgcaattggtttcatgttctgatcccccatcttactaaacatgtaatctgggacaagccactggctctctcagaacctgtttcttcatctgtgaaatgggaatgcaaacaccagtttcaccagctgtcttaaacccaaatgagataatgcataactacaaaatgatacacaaatgaggttgactgtactattcttatyccttgatggcattaaagttttttttttttcataattagtactttttctttgaatgtgtgagtggtagatgcaattggaacccttttgcaactcttcttggttggaaagttatctaaagttgctaatcagaccctctgctaatgtaaattctatatactgagacactgctaaacacccattaattttaactttctcattaaaaaggatgacatagaaacccttctttgtagtcaatatagatgtattttctcaaagtgaatcattaaacttaagggctttgtcatgtgaggcctctgaaaattgtacaatattagaaacatcaatgtctgtgtttaataaacttactggtagctttactgtgttgaatgtctccacctaattttgtttgtttaaaaccttgcttttggaaatttagcccttcaacttttctttaacaaaatcttggaatgaacttctgatttaaagggggccccggtacccaaattggcctataggggagccgantacaattcactgggccgcgntttacaacgtcgtgacncggcaaacccctgggng

SEQ ID NO: 914 - DNA, 2071 bp, Homo sapiens
ggcacgaggatggctagtttcgcaaagtaaagcacagagccagtgaactgggggcaaactacacgttttggataatgtgagcctaaaaagaaaaaccctaaaacttttaaataaatttctaaaaaccaaaaccttttagtatatgaatttactggcttaaaactataaatattatagttttaataattttgtagatcaggaatttaggtgggactcagctggccatttgtttccatgtcatgtatccaaagctcactctgtagtatcacctggtagatgggttgacctgaaaggtccaaggtggcttcccttatgtgtctgccaccttacgggagatgggtgggaagctggctcatctggggctattaaccagaatactggcatttgtcctgtcctctggggtggatttgcccatcaaaacttgaagttctagcagggcagggtagatactcctactatagttccaactacctgggaggctgaggcaggaggatatctttagttcagcccgagcaagctagcaagaccccatctggggctattaaccagaatactggcatttgtcctgtcctctggggtggatttgcccatcaaaacttgaagttctagcagggcagggtagatactcctactatagttccaactacctgggaggctgaggcaggaggatatctttagttcagcccgagcaagctagcaagaccccatctcgggctattaaccaaaatactgacatttgccctgtcctctggggatcttgtaaatctatcaggtgactcaggagaaaagtccatgtgcctctctccattttatggccaccagatgagttgaaggatgtaatgcttctttatgtagtaattttgtatttttattaagatgtccatgtttaccaataggaatacccatttgtccaatatatcttagacttcatacaaaagtgtaccattttcttttgtacagtactctgttctagttattatttctccaaatgctacataccttaccaggcatgtctataaatacttacatttgttgcaacatttttctggaaatctgtcatttgggaatgtttaactgatagtttgaatgtaaaatgctcctaagtttattcctgatgctagtcaatcatcaagcacttactgaacttattgagcatggggagaaaaatagtgagctgcggttgtgctccctgggggtgtcttactggctgccacggtgcatactggagggaaaccaagtgccgaacaatgtagtgtggatattaaatagtaatgggaggatgaaggcttggggagtcttgtgcatcctggaagatggacacttggggcttcaagctctttgaaggatgggtgttttcaatgttaaaacttgtttgaaaggccttgccgaaggaagtccttgaagtagctttcttgtctgttgaggtatttctcactacctgaatcttctacagcattcctgcagactggggacatcgaacccattaaatgaagccattgtggttttgaacagttccatttttcgggccgccttccttttattaagctgaaatctgtatcacttcaccttccatacattgttctgatctcgtcccttggagacttagaggattcttgccataacgtcttcctcatggaggctcttcatgtgggcctgtgtagttggcacaccccctgcctgggcttctggctataggctgctcaggcctctgcttcctgcaacagccgttctgggtgaggtcttgtggacctttatcattcggccctttgtaaaaattgatgtctacaaagaggagaaagtggcaacaatggccccagccgtgtcccccagccagggcggcccccctcccctgcccagccctccttacccagcaggcaggcaggtatgcatgcatgtgtgttaacttagtgcctcctgggtgtgcatcagtgcacagttcctagactaacataaagtcacatataggttgtgtttgttctgttgagttgagcatgtctttatcccagctctcatttcccacaatgagaaagcattaatgttcggatttagtaaaaaaaaaaaaaaaaaaaaa

SEQ ID NO: 915 - DNA, 990 bp, Homo sapiens
tcgacccacgcgtccgtgaaaacatgaagaaagagccatcattctgtattttttctttctggataacgagccatgtactaaacatctttactgttatttttctactaatttcataggagacaaagctttataacttacttttgtgaatgagattctttttatttccttactactgtttcattctttcctgtcattcaaaactcaccttcttcggtatgttctttctttacctctgtccgttcagatcagctcttgattctttaggaggcttattacagtgggtatgcctcaatatagtaatacctcatgtagctgactgggaaactctcttattcaattggtgaaaaatggatgttctcagcatcagaattttccacctgttggagttataccagttaagaaataaaagagtccaagaagggatgttccagataggggtgccccacataacacagaaggataagagttcctagaactctgactcaagtctgcaaagataaattaattaacgtatagctaatcctacatttaaaaagaaattgttgagggtttgtttttttttgtcactaagttccagtttaggagctaacacattcaaatcaaatgttccttaaaagaagctttataaaaatcagattttctctgattattgcaattaagggttaacttaaagaaaaaaaattaatttccctaagaattccacaggcttccacggacttcacgtcattattggctcaactttcctcactatctgcttcatccgccaactaatatttcactttacatccaaacatcactttggcttcgaagccgccgcctgatactggcattttgtagatgtggtttgactatttctgtatgtccccatctattgatgagggtcttaaaaaaaaaaaaaaaaaaaaaaaaaaaaaaaaaaaaaaaaaaaaaaaaaaaaaaaaaaaaaaaaaaaaaaaaaaaaaaaaaatcttctatagtgtcacctaaaac

SEQ ID NO: 916 - DNA, 1780 bp, Homo sapiens
cccacgcgtccgttttggtttgttttaatcctaagttttgcattgagcaagatactctttttcctcttttctaagtctaacatctgtgggtttgcttttcagccatagtattgattacatgttaagtcttagctctctaagtcgttgtaagctttatgtgtactggctttgttctttgattttatttcatgggaaatacaaacaattcagtgcatataaatactggaagaagttgagttgaattgcagacactaatagtcgcagcagtgtcattagtgctgcatccgaagacacctcaccagggccctccagcgtcctggcttgtttcgctggtcgccatggttgttagtgcagacataagctttgtgaggctgactgatggcagatggagggacccggctgctccccactctaacctctagcataaggaactggctggaggataaatgggttaagcatgctttaatgtacatttaatgtacatttctattctcaaaacatgttgattatttttttgccttgatgaaaacaataatcctataaaatattaattgcctgctttagaaggaaaacttctgaactggaagcaactttcgttagctatagacctttaatgaaggcagaatttcttatataaaaaaggagctaggaaagtagaagtgtaaatagaaatatagttcatcaacattactatccacttctgatgtggacattaaagggatattaatcttttaagtccagaggctctcctaggtaagtcttatgacccctcagcttaaatctcttgcccagccctctccctgaactcccaagttgtgtttctgtttgctgacttggcgtcactgatggatagctcagacctgtcatggcacaaaactgaattcctgaccattcccaaactgttctccccacggtcttcccaggttcattagtggcaaatccttccttccatttggccgcctgagatcttaaaagtaatccctgattccatacccaacatcccttgagtcaacaagttgttttgtttctgacttcagactagaacaagaaccttccacctctgagctcctcttctgcttccactgtagcgcaagacctctgaggtagaagttcagccccacagggcaagcacttctctctgtttcattcatcactgattctcctgtgccaggatcagtgcctggcacatagtagggatacaataaatatttgcccaatgaatgaattcagaaactgactttaagtatataatgttaaactataaattgcacttgaatgattaaaaatacaattttatttctaagcaggactagaattttaagtaattttggaactctagtttgtcatcttgctaataacattatctaccatttataacctgctttccatatgccaggtactgtttaaggtgctataatacataattctcaagacaaacctagcagataagaagaattttatagacaagaaaactggccgggcgtggtggctcacacctgtaatcccaacactttgggaggctgaggcaggcggatcacctgaggtcaggaattcaagagcagcctggccaacatggtgaaaccttgcctctactaaaaatacaaaaattagccaggcgtagtggcacatgccattagccccagcttctcgggaggctgaggcaagagaatcgcttgaacccagcagacggaagttgcattgagccaagatcatgtcatagcactccagcctgggtgacagagcgagactccatctcaaaaaaaaaaaaaaaaaaaaaaaa

SEQ ID NO: 917 - DNA, 869 bp, Homo sapiens
tccacgcgtccgcttaccttccctctctcctcttcctcttcattcttcatggccttctcactgcctggctgttaaagctcaggtcgaaagcctacattgtaaggtgcccaagggcgcagatgttcgtggatgtttcttggtttctggtctttaccctgctcccctagggagcttcatgagaatgtctagagctgcacctggtgcttggtagatgttccataggtgtttgttggaggaaggaatggatgagaatgagaagggagggagcctctgtgcctgccccctctgcagaggaaaccctgctgcggtgcagagacctggcctcctccctgcgcctcctgcgggccgactgcctcagcacgggcatggagctgctccggcggatccaggagaggctgcttgccatcctgcagcattctgcccaggatttccgggttggtcttcagagtccatcagtagaggcctgggaggcaaaaggacccaacatgcctggcagtcagccccaggcctcctcagggccagaggcagaagaggaggaggaagacgatgaggatgatgtgcccgagtggcagcaggatgagtttgatgaggagctggacaatgacagcttctcctacgatgagtctgagaacctggaccaagagactttcttctttggtgatgaggaagaggatgaagatgaggcctatgactgagggggcagatgcaggaaacacctagagcagccccagagtcacggggctgagggggcgggagctgcccctgtcatagggagggggattcccagcgtctgtagtgcttcctgtttgctgaataaaggtctctttctcacaaaaaaaaaaaaaaaaaaaaaaaaaaaaaaaaaaaaa

SEQ ID NO: 918 - DNA, 929 bp, Homo sapiens
tttttaatccaatgcaaatataattttacagatgagaaatgattttgcctgcagttatctgcttccaaattagaatgtatttttaatttctgatgagtcacttttcgtgtgtaatactcattttgactggtattaggtggcatgggttggtttttagtcaattccagaatatcttcttacattgttttaatgtaaagaaaatgaaaatttgatgcttctgatctttcctaatacctctatttagagcaagatggagcatctgtctccttggatcctttatatgtctagctacattgtggatgtttgatagaaataataccatgcagtatagtctccgccccgacactgaaaaaaaaaaggagggaaagtatgtagaataaaaagacaaacagtgtaacgagctttattttataacactggaacattgaacttatctgttgaggtggtactaagtaacataacaacttcaaaaacctggacccggcaggcagctaatttagctacttgaaaatcactggggaaaaggaaatagatgctaagattactgaaaccagcttaacacctgccaagttacatcgcttttaaaaaatgctaggaaggcccaggcacggtggctcacacctgtaatcccagcgctttgggaggccaaggtgggcagatcacaaggtcaggagattgagaccatcctggccaacatggtgaaacactgtctatactaaaaataaaaaaaattagccaggcacggtggcatgcgcctgtagtcccagctactcaggaggctgaggcaggagaatcgcttgaacccgggaggcggaggttgcagtgagccgagattgcaccactgcactccagcctgggtgacagagcaagactccgtctcaaaaaaaaaaaaaaaaaaaaaaaaaaaaaaaaaaaaaaagggcggccgc

SEQ ID NO: 919 - DNA, 1759 bp, Homo sapiens
  misc_feature (367)..(367): n equals a,t,g, or c
  misc_feature (896)..(896): n equals a,t,g, or c
  misc_feature (1747)..(1748): n equals a,t,g, or c
  misc_feature (1754)..(1754): n equals a,t,g, or c
gaaaacatttaacaattcaaattatatgcaccttttacctagttgaaaaaaatacacattcctgtkttcacattatagcaactgattaagctgaagctgtaagtcattttttatagatgagtgatccgcatctccatcaattagaacactggaaaagatgttttataaaagaggtatttaattttgtttgtaggattaactcatgcaaataataaaaaagatatcctgttggttcaatagtacactgtctcctttaaggaaggaagcgtgatgaatgaatgatgtgtagacttgagggatgactattaaaggggacgtaggatgaagagaaagaacctacagatgacaatgaatgtaaacttatttntcttcatgtgtaagcagtgtgctcgctggtgatatccagatcctaacaagattacttggttagctggttaggaccagtaactggattgcgaccactatgataatattttgaaccaaatgttaatgcttgatgcagaattgtaaagcagcatctggttcctatatagccttaaggattaattttagtgatcctcaaggaattaaatagggaatttcagaaatgtagactgcaaaggcagtatacaggaaaaggtggagtgggttttgtttatgagggtgtctgaaaactaaaattgagcgggatatcatggtatagttggacagtattggtccttcacactttggccatattgtataatggagcttttaccaaagatgtatgagaagtgtaagactataaaaaaatgaactattcaaagtaaaactcttaacaaacattttacttaaagcagatgcaaaagggtattctcatgtaggctcctgttggtgcagagggatttttttgatttcaggatacaactaaagtacgnagttctcagtttcactttagtagaaagagctctagaaatgaggctgataaacacatctaagaacactggttgctttctaaaatttccaaagctccaccataaatgtaatttttagtgtttcaaatgattgcattttaaagtatataaatatgggttatccaatatcaatgctatagtaacatcctgaaacaaaacaagcacaaaggtataaatgcctaaactggaggaaacttgaaaccctcatgttaaatcttaaatgtagtatttctaacttgtgaagacagattggtaggcagccatttttttgtgtcttaaaataactgggggcatagttaaaattttatacatcaagtgattgctattattgaatgttgcaggtgagatgtggttatttttagtttatttgaaatgtttgactggaaaggggggagggggaagcaaatatttgaaatttggaaaaccctaaaccttttggtaagaaattgtaattttcacttaaaattttctttaaggatataagaggtttataattgatgtagttaaattgaacaataaccattggtgactggagcaggtaattatagcctgcagaaaaaattatctaagaattttaaaaataagatcctgaagttgtttaattgcatccatttctgtatttatgtgaatttataaactgcagtaagttttgaatgaggttaatcttgtttaatataagtaaatgagtctgtagactgtgatctccccaaactaaaaagtacagtacttggaattgtgttctttatggttgtagtgttggtaaagcactaatatgcagaaaataaaggaattacacagtgmaaaaaaaaaaaatnnaaaaanaaaaa

SEQ ID NO: 920 - DNA, 1718 bp, Homo sapiens
tcgacccacgcgtccggcctacctcctcctcaccagctacctggcaacttttgacttgttccttagaactctctttagttgtggtcaagtcatgaagcttttcctgccccggcctctctctgcagcgagagttaggggccttctcttttgcatcttcattgcactcagacatctggtactctgtgattatcacacttattaatgctctcaagatagagataaaatcttattcatctttttgctctcaggcattagcacatggggagttctcagaaaatacctgtcttataccaggaattaatgaataatcagtaggaatgagcatgacatgttcatgggacgttggagggtagtgcatggctgcagaggagaatgggaaatgaaggtcagataagttacgtgagggatctctaaggccaagagaagccatttaggtttgatttggttggaaaatgagcttattgaaagtttaaggcaagggactagcatcatgaacacatctttttagggaagtgtgtcttgtggtaagctgctggctggtttaaatgcagcagaatattccattggggatgccagctgggagacttgccacagttgcagcctgcagcagaaagaccctgggccagaatgggttgtgccatctgtcaccagatattgccaaggtagatctggctgactttgtgggacagcttgtttctcaataatcactttgcaggcactcttgaggctgtgagcatgctcccagaagatagcattacttctctctcagagcaggctcctttctaaggaaatgcaagtctaggcctgccctgctgtaatcytcatgtggaaacagcactctagcaaagamcaaggaacctgatgagcttttcaaaggaaaatcgagtagatmcaggaaaccaagaattttctaatgagcagatagaaaagagcaggtaggtgagaagttggtattagaaaaattaaagatttgaagggcttgaggacagagatgattgttggatgtttcatttttccaggcaaaatatgtggagcaaataatcaaatgacatggacttaccccacaattagggacggagatgaggaagggttaggaatagtttctgttagaatggtagggatggaagacaattgaaaattaaagagaaaataaatggagaggaaatctaggcagcagccattcttcattctgggggaaggtggtcaggaaaaggaaggaagaaaaatgtatagcatagtagctagagtggtccggcgtgatcaaagtgttttcaatatcatgttgactgacctgtttacgtttgaaggcagagaagatagagccagtagaaggagagaaaaatcaaagctgttttacggagttgtgaaagagctggataaggacaagactaaatgagttatttttaggccaggcatggtggctcatgcctgtaatcccagcactttgggaggccaaggcaggtggggcacctgaggtcaggagttcaagagcagcctggccaacatggtgaaaccctgtctctattaaaaatacaaaaattagctggacatggtgcatggtggcaggtgcctgtaatcccagctactcaagaggctgaggcaggagaatagcttgaacccggggggcggaggttgcagtcagccgagatcatgccagtgcattccagcctgggcgacagaacgagactccgtcaaaaaaaaaaaaaaagggcggccgc

SEQ ID NO: 921 - DNA, 2927 bp, Homo sapiens
caaagtgaatgatgtggttccatgggtgttggatgtgattttaaataaacatatcatcagccccaacccacacgtgaggcaagcagcctgcatctggctcctttcccttgtcaggaagctaagtacccacaaagaagtgaagtctcatcttaaagaaattcaaagtgcatttgtttcagttctatcagaaaatgatgaacttagccaagatgttgcatcaaagggscttgggttggtttatgaactaggcaatgaacaagatcaacaggaattggtttctacacttgtggaaacacttatgactggcaaaagagttaaacatgaagtttctggagagacagtggtatttcaagggggagctcttggcaaaacaccagatggtcagggcctttctacttacaaggaactttgttctctggcaagtgatcttagccagccagatctggtgtataaatttatgaatttagccaaccatcatgcaatgtgggaactctaggaagggtgctgcttttggttttaatgtaattgctaccagagctggagagcagctggctccttttctgcctcagctagttcctcgactttatcgttaccagtttgatcccaaccttggcattcgacaggccatgacaagtatttggaatgcgttggtcactgacaaatccatggtggataaatatttgaaagaaatyctycaaratttggttaaraaccttacaagcaatatktggcgarttcsaraatccagctgtttagctttgaatgatttattgagaggaagacccttagatgacatcattgataaacttccagaaatttgggaaacgctttttagagtacaagatgatatcaaggaatctgtacgaaaagcggcagaactagctctgaaaactctgagcaaggtctgtgtgaaaatgtgtgaccctgccaaaggagcagctggccagagaaccatcgctgcccttctgccttgccttctggacaaaggaatgatgagcaccgtgacggaagttcgagccctcagcattaacacccttgtgaagatcagcaaaagtgcaggagccatgttgaaaccgcatgcaccaaaactcattccagctctgctagagtccttaagtgtattggagccccaagttctcaattatttgagcctccgggcgacagagcaagaaaaggctgcgatggatagtgctcggcttagtgctgccaaatcttctccaatgatggaaacaatcaacatgtgcctgcaataccttgatgtgtcagtgctgggcgagctagttcctaggttgtgtgaactgatcagaagtggtgtaggtcttggaactaagggtggctgtgccagtgtcattgtgtcattaactactcagtgtcctcaggacctaacaccttactcaggtaaacttatgagtgctttgctgagtggcctgacagatcggaacagtgtgattcagaaatcttgtgcatttgctatgggccatttagttcggacctcacgggatagcagcactgaaaaactcctgcagaagctcaatgggtggtatatggagaaagaagaacctatctacaagacctcttgtgctttgactattcatgctattggacgatacagccctgatgtattaaagaatcatgcaaaagaagtcctgcctctggcatttttaggcatgcatgaaattgctgatgaggagaaatccgaaaaagaagaatgtaatttatggaccgaartgkggcaggaaaacgtacctggatcctttggtggcattcgattatacctgcaggagttaattactattacccagaaggctttgcagtctcagtcctggaaaatgaaagcccagggtgcaattgccatggcatcaattgcaaaacagactagctctctagtacctccatatctcggaatgatactgaccgcattgctgcaaggcctggctggaagaacgtgggcaggaaaggaggagctattgaaagccattgcctgtgtggtgacagcttgcagtgcagagctggaaaagtctgtgcccaatcaacccagcacaaatgaaattcttcaagctgttctgaaggaatgtagcaaagagaatgtcaaatacaagattgtagcaatcagctgtgcagctgatatcttgaaggccaccaaagaggacagattccaggagttctctaacattgtcatacctctcatcaagaagaactcacttgaaagcagtggggtccggacaaccaaaaatgaagaggagaatgaaaaggaaaaggagctccagctggaatatctgctgggtgcctttgaaagcctgggcaaagcctggccgcgaaacgcggagacccaacgttgttatcgtcaggagctgtgcaaactgatgtgtgaacggctaaaactcagcacgtggaaagtgcagctaggagtcctgcaatcaatgaatgccttttttcaggggttaatgcttttggaagaagaacatgccgatcctgaggctttggctgaaattctgcttgaaacttgtaaatcaatcacatattctttagaaaataagacctactcatctgtgagaacagaagctttatctgtgatagaattgctgcttaaaaaacttgaagaatctaaacagtgggaatgtttgacatctgaatgcagagtgctcctaattgagtctttagctactatggagccagacagcagacctgaactgcaggagaaagcagcgttactgaagaaaacacttgaaaatctggaataaattagaaggggaagaaacaaacaagtgccatgttcattgggggttgaagtggtggtgttctttgaaaaaccaagtgggaaaaagtaaagattaatctgtagcatgcatcattccttggctgaaataaaaagaaaaagccttaaaaaaaaaaaaaaaaaaaaaaaaaaaaaaaaaaagtcgtatcga

SEQ ID NO: 922 - DNA, 1677 bp, Homo sapiens
tgccgccagagtaaagctttctaccctttactccctgcaaagaaacaagagtgcttatcccagctaagctccagggtaatgttatcatgacagcttcaacttttagaccacaggcaaatgctttgttaaaactctatgctggtcattcccttcaggatttggcactcaccaacatacccttctttcaagtgaaaaggcatctcttttaatggtcctgacctttggaataggaagcatgtaccctggacagagcacttcaaactagaggaaccataaatccatggctaaccttgacaaatacactgaaacattcaagatgggtagcaacagtaccagcactgctgagatttactgtaatgtcactaatgtgaaatttcaatactccctctatgcaaccacctatatcctcatattcattcctggtcttctggctaacagtgcagccttgtgggttctgtgccgcttcatcagcaagaaaaataaagccatcattttcatgatcaacctctctgtggctgaccttgctcatgtattatctttacccctccggatttactattacatcagccaccactggcctttccagagagccctttgcctgctctgcttctacctgaagtatctcaacatgtatgccagcatttgtttcctgacgtgcatcagtcttcaaaggtgcttttttctcctcaagcccttcagggccagagactggaagcgtaggtacgatgtgggcatcagtgctgccatctggatcgttgtggggactgcctgtttgccatttcccatcctgagaagcacagacttaaacaacaacaagtcctgctttgctgatcttggatacaagcaaatgaatgcagttgcgttggtcgggatgattacagttgctgagcttgcaggatttgtgatcccagtgatcatcatcgcatggtgtacctggaaaactactatatccttgagacagccaccaatggctttccaagggatcagtgagaggcagaaagcactgcggatggtgttcatgtgtgctgcagtcttcttcatctgcttcactccctatcatattaactttattttttacaccatggtaaaggaaaccatcattagcagttgtcccgttgtccgaatcgcactgtatttccaccctttttgcctgtgccttgcaagtctctgctgccttttggatccaattctttattactttatggcttcagagtttcgtgaccaactatcccgccatggcagttctgtgacccgctcccgcctcatgagcaaggagagtggttcatcaatgattggctaaaattaagatatctctttaattacgcctttgtttacctacgttccttgtctttttccaaaggccagaattgtcaaccaatttctttaattgaacattgtaaaaaacaggaataagtacttttgtgtaatattcacagtcaacaggggtgtgatggtgaaggcagagtgtgaaaaacgtgagagaggaagagaaaatagatttacctgattcctctttaaaattcaagccactttcttatttaagaaacctagatcaagtttttacagatgtaaataaaagttgaatagtttaccttaaatttttttcaataagtaagttattgttaataatgcacagtaaatatgtgaatttttcctagatgtaaaaaaaaaaaaaaa

SEQ ID NO: 923 - DNA, 1343 bp, Homo sapiens
ccacgcgtccgcttatcttccccaagagaaaatgcttcttttgagcacactgtacctaccatctgcattgagcagaaagacttttgttttactgaagacaaaagatgtttttattttagacccagaagagaggagtttgctctgaatttgtaaataagtcttccccattcctcatactcgagcctctcctctctggttgcctcctgccaccagcatccatggctcatttgacacctttttaaatatcaggacaagtctgaaacaaagtagtaaaatgtatataactcttacctgttgtcattctttttcttttaaatttgttgctaatctctgataatgaagattcttactctgattctcagctgagctgtgagggcttccagggaaaatggaacaaaatggtgttcttaggtaatgggttgtagatactgagtcttcctttccttttctgacccttctcgaggacatttgctttcctcacacttttgtagtctctctttacatattactatatggaaatgaattgctctgtgctgaaatttgaagaccagataatgaaactgaaaagcaaacaattttactgaatctgtctacccttcattcatgagaactccagaatgagtgttgaccactgaagcatcttttaagtctgtgttccattgtgccattcaggtttgctgtcacatatgcatcatctgaaatcatttgaaatttttgtacaataaaatatcctggatttgatcctgaaggaaactagtaagatcagatttttgggtcatgtctgttgtattttcagtaatgtgatttcagatggtcatctggattctcccacttctctactccattatttctctacttttccttccagcaaacctgaaacgtgagggagatggattaatgtgagtaacaggaatgtgtctttaaaaagctagagtggttacatttaatcaggcgtaagataatttgggttcttgagttgttttggagtaatatcccacaactggggtaggaagctcaggacttttttctttaaagctagtcatttcaaaagcatattgtatttttttgaatgactacagtatggacaatttcaaaaaccaaaacccactttggattggtggaaataaaaactggtaactcactcaagtgaatgaatggtcttgcattttaaaagcttatgggaaactcaatttgaaatgattagaaaatgtcaagtattataagctggtatttaagatgcttgtaaatactatttatgtttttaattttgtaaaataaagatttctttttaaaaaaaaaaaaaaaaaaaaaaaaaaaaaaaaaaaaaaaaaaaaaaaaaaagg

SEQ ID NO: 924 - DNA, 1523 bp, Homo sapiens
gggttcagagcctggcagaattgtcagctttagtctgacataatctaagggtatggggcaaggatcacatctaatgcttgtgttccttatactctattatatagtgttattcatgattcagctgatcttaacaaaattcgtagcagtggaaccttgaaatgcatgtggctagatttatgctaaaatgattctcagttagcattttagtaacacttcaaaggtttttttttgtttgttttctagacttaataaaagcttaggattaattagaagaagcaatctagttaaatttcccatttgtattttattttcttgaatacttttttcatagttatttgtttaaaaagatttaaaaatcattgcactttggtcagaaaaataataaatatatcttataaatgtttgattcccttccttgctatttttattcagtagatttttgtttggcatcatgttgaagcaccgaaagataaatgatttttaaaaggctatagagtccaaaggaatattcttttacaccaattcttcctttaaaaatctctgaggaatttgttttcgccttacttttttttcttctgtcacaatgctaagtggtatccgaggttcttaatatgagatttaaaatcttaaaatgtttcttattttcagcacttacatcatttggtacacagggtcaaatagggcaaataattttgtctttgtataatagatttgatatttaaagtcactggaaataggacaagttaatggatgtttttatattttaatagaatcatttatttctatgtgttatgaaattcacttaatgataaatttttcaacatacttgccattagaaaacaaagtattgctaagtactataacatattggccactaaaattcatattgagattatcttggtttcttggaagagataggaatgagttcttatctagtgttgcaggccagcaaatacagaggtggtttaatcaaacagctctagtatgaaagcaagaagtaaagactaaggtttcgagagcattcctactcacataagtgaagaaatctgtcagataggaatctaaatatttatagtgagattgtgaaagcaaccttaaagttttgaagaagactgatgagactaggtgctttgcttcctttcatcaggtatctttctgtggcatttgagaacagaaaccaagaaacatggtaattactaaattatgaggctttgctttttgtttgcttttaagtagaaaaacatgttggcaacattgagttttggagttgattgagataatatgacttaactagttttgtcattccatttgttaaagatacagtcaccaagaatgttttgagttttttgaaagaccccaatttaagccttgcttatttttaaattatttccattcagtgatgttggatgtatatcaattatttagtaaataatctcaataaattttgtgctgtgggcctttaaaaaaaaaaaaaaaaaaaaaaaaaaaaaaaaaaaaaaaaaaaaaaaaaaaaaaaaaaaaaa

SEQ ID NO: 925 - DNA, 1691 bp, Homo sapiens
tgaagagatcacactgtactgaaacctacattattttccaaaatctctggatctgcttctgtcttgcaggcagagagctcatccagtagcccttagctcttcccagccccctcctttgatttgtgggtgccactgcrgcagctgctgagtctcagtggtttctagtcttcaccaagttctgcccacccagatggtttttacctgtcctcaccagaaacctgcactgtctagattgctgaggctgcttctccttaaccgatctgctatctgtattccaggggcaccccagggttagaggtaaatggcacaggccttgaaatctccaactgctctgactccaggttggtgcacttcaatgccaagtactaaccacacaattacaggatgccaccaaaaccttgatatggggctgctgcatcctaattaaaaaaaaagttaatagacattattttttagaacagttctaggtttacagaaaacttgagtggataatacagagagttctcctaggctcccctgtcctccagcacacaattttccctactagtatgttgtattagtgtggtccattcattmcaattgatgaaccactgttgatatgtcattatcaactaaagtccatagtttacattggagttcattctttgagtttcacagattatgggttttggcaattacataatgtcctaaatccccaatacagcgtcatgcgaaagagtttcactgctgaaaattccctgtgcttcaccatttcacgcrtcctcctctcctccacccctgacaaccactcaccattttactacttctatctttttgactttccaagaatgtcctagagttggagtggtacagtatgtgggtttccagactggcttctttctagcattatgtactttaagttccttcatgtcttttcatggcttgataacttgttttttaaaatcagtgaatcagatttccttgtatggctacaacagtttgtttattctttcgcttggtgaaagacatcttgggcacttccaagttttggcaatgatgaataaaattgctgtaagtatttctgtgcaggattgtgagtgaacttaagttttccaaagtgactgtacccttttgatttccactagcgatggaaagttctcgttgctcctcatctttgacagcatttggtgtgttcacctttttgaattttagccattctaaacagcttatctgcccctactgtggaatgatgtgacagacatagaataacacttacagtgattctagttcaaaatgaggcaacatggaagggataaagaagtcactgacccaaaatagtttggaaatggagctgggcaaaatccagcagaagtttcttaattaggatcgacagcctgggamcggcccgccgtcctgtgggtctttgcctctgggctgtctgctgkgcatttcttggaaccattattatttatctttttttctcgcacttttttgggtatggcttctatcgcactccaaatgtttttgagattcatccwtgttgttctgtgtgtcaccagtttgttcctttagccattccatggaatgagtgtatcacagtttattgatccattcttgtattgacagatacttgaatgttttcagttttttgtattatgaataaaactgctatgaacattaaaaaaaaaaaaaaaaaaaaaaagggcggccgc

SEQ ID NO: 926 - DNA, 870 bp, Homo sapiens
  misc_feature (18)..(18): n equals a,t,g, or c
  misc_feature (26)..(26): n equals a,t,g, or c
  misc_feature (30)..(30): n equals a,t,g, or c
  misc_feature (42)..(42): n equals a,t,g, or c
  misc_feature (50)..(50): n equals a,t,g, or c
ccggtttttattaagggnaaaccccntttnctcttgggttcncaattctnctcttggctgccacccatttaagacatgccttttgccttccctcccccagacacatggaactgtgagtccatttaaacctctttttctttataaatgacccagtcttgggtatgtcttaatcagcagcatgaagaagaactaatacagagaggctgagtaaacaccatgtggggtgtttgcatcactgagtatcacacagccttttcactcatggttagagacggagcagaaaggtggacagacaccccagcacaaagccgagtgaagaactctgaggaaggatgcgtgcttgggaatgatgcctcgaccctggtgcctgaagccgtgcctggtgcgtggggcgtccctgtttgctgaaggaatgtggggacagagcacaggagcaaagactggctgggaccgtgtgaaagcagctctctgctgcctctcatccagcccgctgtgtccttccacagcactcatctcaatttgtggttatttgacttttctcctgtccctctgggccgtccgcccccttcgttagaatgtaactgtgtggagtgcaggcctcgcctgtgttactgtgccctcatctcaagctcagcaccgcgtcctgccctgggggcccccatgaacatgtgccgaatgaacgagcggaggaatgggggttggggcatttttattagttttccattcgcccaatcatttctaatgtggatcattttctttcaaatgataagagcgatgtttacttttctatgtttgaaaataagataaaataaaacaaaagacgcctgttgttttctcgggcagaaaaaaaaaaaaaaaaagggcggccgc

SEQ ID NO: 927 - DNA, 1622 bp, Homo sapiens
  misc_feature (1607)..(1607): n equals a,t,g, or c
  misc_feature (1610)..(1610): n equals a,t,g, or c
cccacgcgtccggttgagttggtttctttctgattcctctactcatgtagaaaacacttgtacttctggaaatggactggagactttttaaatttgagtccactattgacatggaaaccccagtggaatcagattttccctcaaagaccatgatggtatcggactagttttcagacactgcctgttgctgtccatcagcacttggtctcttatcttcagtgagaaggtgacccgccttcttcccatggtggctgcctaaagtgcttcttttctaacccaaaacagttctactcacttccttttacagaattcaccggccattttcctgttacctgatccttctacaggatttttaaaaagtaagagagtttcagagaagccgatcccataatccccagtgcagccagggtttgtgtgtcatcgtactggagtagagggccgactcttcccatgaaggtgagcacagctgtgagtgagtgagctcatatctccatttgtcagtgctggactggtaccagatcgtaaccttcccgttggtcggaaactttccatctgtcgccctagaaaaagagaaagcttaccatcgagggtgtggttgatccttgaagctgcttggtaaagttatcatttcctcagtcttttcttttgtactcctatcatgtattcattaatatctaccagtcccttttcattctaagacaaaacatttctcctaaatctctgaataaaatcagtgctgtaggaagatggactgtgttgatcatgggtgtaagcaacccagtttaagaaacatggcaactaaagggatacctcaggctttctttcccagtgggtcatttttgtcctagttcagtgtgtctgttactatttaaatatttatacaaaagggtttttgtttatagcttaaggaatgatactgtgctctgcttggtgcatggagaaaaaggaagacccgtactctccacaccctagagcttttctctaaatattgtgcaaagtttttgctagttttatcttctgactttgggactagtttttgctgcagagttgtgttgctttgtgattttcctctgggatagtgtactgtacacaaccagatgtgttccacactccgtgactccgcagtttgtcctggagtgacatacacatccaccatggaaagggaagcatctctgcctgtggattctcaagtacttggaagcacctctcctgaggaacctacaggattctaaggtttcctaggtcactgaacaactaatcttggtccctgaatatttctaggtttgtaagtgcagcagttttatttcctctagaactcatcctgtttcaagggaagtacctaagaagatatagagtgtttctagggtaagggacctgcaggtgtaagcatagatgaaataactgtcctgtcacatgtgcagcaggccatggagtgtagcgggcatcgctgccgccattcctgcagcatcaccataagcagtgcagggtgtctccatcgagctgtttggttccatgtgtgtttaacatgtgcagaagtagcttctctgtttaagtttaataaagttgagtttcaccaaaaaaaaaaaaaaaaaaaaaaattactcggncgncaagggaattca

SEQ ID NO: 928 - DNA, 1482 bp, Homo sapiens
tcgacccacgcgtccgccggggcgcggagaagctgcatcccagaggagcgcgtccaggagcggacccgggagtgtttcaagagccagtgacaaggaccaggggcccaagtcccaccagccatgcagacctgccccctggcattccctggccacgtttcccaggcccttgggaccctcctgtttttggctgcctccttgagtgctcagaatgaaggctgggacagccccatctgcacagagggggtagtctctgtgtcttggggcgagaacaccgtcatgtcctgcaacatctccaacgccttctcccatgtcaacatcaagctgcgtgcccacgggcaggagagcgccatcttcaatgaggtggctccaggttcagggaggcgtggcacagctggtgatcaaaggcgcccgggactcagagcgggagcccagcagggcctgagcagagcctccgctgaactgtggaccccagactccgagcccaccccaaggccgctggcactggtgttcaaaccctcaccacttggagccctggagctgctgtccccccaacccttgtttcatatgccgcagacccatagccgcctgcaaggcagagaggacacaggagagccagccctgagtgccgaccttgggtggcggggcctgggtctctcgtcccacccggagggcacagacaccggcttgcttggcaggctgggcctctgtgtcacccactcctgggtgcgtgcagacccttcccctccaccccccaggtcttccaagctctgcttcctcagtttccaaaatggaaccacctcacctccgcagcacccgacttaccaggacgcatgcccctccctctgccctcatcaaacccacagacccggactccctttctgccaccccaggctggtccggccccaggtgtggggtccgctctctccactcccagggctccgcgcccaagtgagggggcccctgccggagcctcagacacactccagttcagggctgtggggggccttggccacatacctgtcccttggctatgagcaggctttgggggcccttccgcggcagccccgggggccgaggtagggtcgggggcttagaggctgggatggctcctggccccaccgccagggggcagcgcaggccgggctgggaggcggcggcggcggctcgggctggggggtcaggtggacgctgccctccggggctggtcgcgcatccctcagtccctcggccacccgggggtcgctccctcgtgcccaccgcacctgccgagcctctttggacccagatctgttcatgcttttgtcttcgtcactgcggcggggccctttgatgtcttcatctgtatggggtggaaaaatcaccgggaatcccccttcagttctttgaaaaagttccatgactcgaatatctgaaatgaagaaaacaaaccgactcacaaaaaaaaaaaaaaaaaaaaaaaaaaaaaaaaaaaaaaaaaaaaaa

SEQ ID NO: 929 - DNA, 1041 bp, Homo sapiens
  misc_feature (660)..(660): n equals a,t,g, or c
acccacgcgtccggtgagtgagggctggcagctgctgggccacctcctagggaaccatagatgacgttggaccctaaatgtctatttcagtcttttctcttctgcttagtttcctcatagatggatccttcagccttctgcccaggggctgccagaactttgcttcatagctagagaccaagaccttttaaaatttgtagtagagacctcacttccttttccctaccctatccactgttgtgaatctagagccttttttgttcaatctctctagagagtaagcctttgctatttataactggaaggctctagtataagcatcttaagacttgatagacattacaagttatactctgatcaataatgtatgaatattcctgtcttacatcctctgtgtaaatacttggtattttcctttgaaaaattcaccagtgtaataaatggaaaatgatattttacatatgtttctttgattgttagagaggttgttttccatatgttttatgggatttgtatattttgtgaattttctgtccatgtctttctttggtttttattctcaagtgcttactgaattttgaattctcttgctggtgtctggaagcaaaggsctcctttawttttgctggttggcatgattttgkctcctgacatggctcnggtagttcttgtgarggtggargcacctgaaacactttatcaggcacatgatagacattgccwatcaaatggctcaacatcagttccacaaaaaacctaaatggccattcaagacctgtttctgcctgtttcaagttccatataggaattagatcagtagttggcaaatgacggcctgtgcgccaaaatctagcccagtctgtaaataaagtcatgctggaacacagctgtgctcctttgttgatgtgttgccgtgttgcctgtggctgctttcacatcacaatatcagaaattgagtagttgatacagagactacgtgggcagcaaatctagaatatttaccatctagctctttaaaaaaaaaaaaaaaagggcggccgc

SEQ ID NO: 930 - DNA, 1783 bp, Homo sapiens
attggatctttgggattgaattctccatcaatttccacatctcttttattccttctttttgcctcataaggggcttgtcctttttaattacacaggtgcttcttcttctttcttatttccttcctcagagctccctgcagagattttgccacagttgattgataagaagatattgattccaaggtcagagttcagaaatattcttataaatgaatcatcttgttaataaagggtcacccaaaaagttcgaggatacagatgttgctgaaatcagagctctcagcaattgtagcaagagagataaaatggcccaatgtcccatgctcaagaaagtaaattaaaggaaaggagagatagaatcaaaattaccatttatcaagcgtctataatatggatgcaagagtcctgtttctacaatacaaaccttatgaccttgggcgagcttcttaccatcccccaaatcttagcttcttcaactgtaaagtggtatcattaacatcttcaaaggctgttgtcaggattaaatgatgtatgtaaagtgctttgcacagctgctgtcacataataaccaatatagaaatggtcgttgttaactagcattattggaattatttgtgcttttgtttaaccatcaccagtatcctaagtgataggcatcaactagaattctaggttggaaaatcataaagcaaagatattacacaactcttgcttgttgctagtgcaacagtgtttctctttatgatttacatatgaaaaacagaccaagtgatggctattagaaaagggagggatgtagaaaaataaagccagctgaggggcagaacttgtgcattttgcaaccatcctcagtttaatgtttggcattcaatcctcattactgactatgtatggcttcacaataaatcaagagtgtgctatatgagaaaatgaagatttatacaaagcgaaattgaacaaatggtgaataattgatttagctgacctgacaacacccacttataaataacacagaatgttttactttggcagtaatttagttttctgggcatcctggcttctagcaattctctatagcggcccagtgctttctgactttcccatacagaagaaaaaaaaacttagatcatgagctctgtcctcccagtatcaccctggcatgatctatagcaagtatggttcacattagacattccctgaagaatgtaccgatcctttatttagtcctctgatttaagaatatagtttggcctctacatagcaaaacttgagacgtatttagttagctttaagaattacagtgtttaccagtcttataatacagtcttaagaaaaaagtaaaataaacaacataactataaaataaaccatattgtgtcactgtttaaaatgcctttgctggcctctggatataatacatttcatcttagagcacattagtgtaggaagcatttatttccaagtttattatcccaaagaatggtatagatgaatatacaaatccttgggcatatccacaccaaaggctatatgaattcagagatggcttactaaacaagatacagaagcaaatgaggacattttggcagacatctttgtagcattccagaatcatagaatattaggattgaaagtgtcctgaagagattattctgtttaacctcttgattataggctcagtttcattcaataaacatacagcgaacttctggaatgtgacagggattaggctgggattaggtgatgggtatgtttagggaggggaaatgaaaaaaaaaaaaaa

SEQ ID NO: 931 - DNA, 2208 bp, Homo sapiens
cacacctctgctgccctggagactgtgctcttgacctgctccgcccccttccctggagggagcaccctctggacagacagaaccatctgaggctcacctttgggttttgtgacaagaaggggacgtgttgggtttttcttccttacactatattttggctgcacacatgtctttaacccaggagcccaggggtagacaaaggaggactaaggtaatcaatttgcacctttttttatttttattttttttctttttttcttcagtggtgacttccttccctttatcttttttcattcttcccggtcctctgccctgatctgtgtaactcttatcttgggtacttgagcagacggtatattccagaggtgggaggtgggaggggaagggagaaatccaaaacaaagtgttcttgctctgacagaatattaatcttgtacgcttggattgagttatttaatttttttttcttttgcacatttttcttgtattaagattgctcttcccaagagccacaagttcctggttttagtaaacccagctgcctgcattgcctgggactagaggctggggaggctaccatgaaacaaaggtccctccctccctctgactctttgcccagacctctttagtttgggggatcctcctcactctcctgaagtgtctcaagtataccagtgggagtgcargggaggagcacaggccttcagatggggcttcccacgtgtagctactgatcccatatttcctactcaccttccaaatggtgcgacccaacttcatttgtttacttgaaaattccccctcgaggttgagagaacctctgaggtggctgtattttctcctaagcttgagatagggggctgtggtccttcctttctcctgaggaraaagtccttgctctggtgacctgtaagttgcagaggagggtggagtgagagtgtcatgtattgggatagtcagggatccctgcctttggcctttcttcttcttcttcttcctcttccatagttggatcatgtatattttacttctaaaggagagaatgtcaaaaagttctgtatttttttatattctatatattaggtaggtcaatcttaattggtctcaagaggaagaactgtctgtcatttcggtaagtaggatactgtgaggaagaccaaaaagagatatggatgcttcctcgctcaggaggcctgagcttggtccttttcctctctgcttggattctggaccaccacctgggaccaaccttcagctctggaaccttcataaagcaggtcagcgtggcctgattgtcccaggacctgaagggagcaaggatggcctcagggcctggtgaagtctgctactctgtccttactgctgaacatcctgcttgtatcaggaaactcagaagcagtttgccttgtcaaattcaatctcaatggccattgtccacataactgatcacccatggctgcctctcctattatctattatcactgaaacttagtagcctgctytttttttttttttttttagagctattgcgtatcttccctgtttgggatccttgtacctggtttgggttttcccttccttgtgacaattataatccagatgcctcttctttctgtttgaattacggtagtgcattgccttagtggcttgcctgtgcctctgggtggattacatatgatagtaaagcccacctgtttggatgggagtagaggaagttggtgtagaccagctgtggagctgaaggcacagtctgccccacccccacctccccactgtggttagtcagaggcatcctgctccaagctctgcttttccttcctctgaaacaatgccattcttgcttctattgctacacatctccttctggctcaggtgaaatccatgcccttctgcttatagacctaaagttcaggtacttattattggccattgatcttgaatttgccctctcctagtgctgcagtcccacttcaaagccattttctgaggaggatggtttaggtctggcaattgtccttgaaaaatcccacccatgttgtaccaccttggtgagtcatatgccactcatcagcttgggaatgatggctgccaactcccaatctcccaggaaggcagggggcagaatctttttttcacttggcctgctacctccattaaaaaaccattctcttacagtttaaaaaaaaaaaaaaaaaaaaaggcggccgc

SEQ ID NO: 932 - DNA, 1097 bp, Homo sapiens
tcgacccacgcgtccggtgcagccgagtcactactgcctgcctgcctgcctgctacggctcagcagcaggtacgtacccaaccatgggctcgcaggccctgcccccggggcccatgcagaccctcatctttttcgacatggaggccactggcttgcccttctcccagcccaaggtcacggagctgtgcctgctggctgtccacagatgtgccctggagagcccccccacctctcaggggccacctcccacagttcctccaccaccgcgtgtggtagacaagctctccctgtgtgtggctccggggaaggcctgcagccctgcagccagcgagatcacaggtctgagcacagctgtgctggcagcgcatgggcgtcaatgttttgatgacaacctggccaacctgctcctagccttcctgcggcgccagcacagccctggtgcctggtggcacacaatggtgaccgctacgacttccccctgctccaagcagagctggctatgctgggcctcaccagtgctctggatggtgccttctgtgtggatagcatcactgcgctgaaggccctggagcgagcaagcagcccctcagaacacggcccaaggaagagctayagcctaggcagcatctacactcgcctgtatgggcagtcccctccagactcgcacacggctgagggtgatgtcctggccctgctcagcatctgtcagtggagaccacaggccctgctgcggtgggtggatgctcacgccaggctttcggcaccatcaggcccatgtatggggtcacagcctctgctaggaccaagccaagaccatctgctgtcacaaccactgcacacctggccacaaccaggaacactagtcccagccttggagagagcaggggtaccaaggatcttcctccagtgaaggaccctggagccctatccagggaggggctgctggccccactgggtctgctggccatcctgaccttgcagtagccacactgtatggactatccctggccacacctggggagtaggccaagaaggaaaatctgacgaataaagacccccgctgccccataaaaaaaaaaaaaaaaaaaaactcgtag

SEQ ID NO: 933 - DNA, 1123 bp, Homo sapiens
  misc_feature (755)..(755): n equals a,t,g, or c
ggctgccagcgagagccgcgggagagtgtgcagccgagtcactactgcctgcctgcctgcctgctacggctcagcagcaggtacgtacccaaccatgggctcgcaggccctgcccccggggcccatgcagaccctcatctttttcgacatggaggccactggcttgcccttctcccagcccaaggtcacggagctgtgcctgctggctgtccacagatgtgccctggagagcccccccacctctcaggggccacctcccacagttcctccaccaccgcgtgtggtagacaagctctccctgtgtgtggctccggggaaggcctgcagccctgcagccagcgagatcacaggtctgagcacagctgtgctggcagcgcatgggcgtcaatgttttgatgacaacctggccaacctgctcctagccttcctgcggcgccagcacagccctggtgcctggtggcacacaatggtgaccgctacgacttccccctgctccaagcagagctggctatgctgggcctcaccagtgctctggatggtgccttctgtgtggatagcatcactgcgctgaaggccctggagcgagcaagcagcccctcagaacacggcccaaggaagagctayagcctaggcagcatctacactcgcctgtatgggcagtcccctccagactcgcacacggctgagggtgatgtcctggccctgctcagcatctgtcagtggagaccacaggccctgctgcggtgggtggatgntcacgccagcgctttcggcaccatcaggcccatgtatggggtcacagcctctgctaggaccaagccaagaccatctgctgtcacaaccactgcacacctggccacaaccaggaacactagtcccagccttggagagagcaggggtaccaaggatcttcctccagtgaaggaccctggagccctatccagggagggctgctggccccactgggtctgctggccatcctgaccttgcagtagccacactgtatggactatccctggccacacctggggagtaggccaagaaggaaaatctgacgaataaagacccccgctgccccataaaaaaaaaaaaaaaaaaaaaaaaaaaaaaaaaaaaaaaaaaa

SEQ ID NO: 934 - DNA, 382 bp, Homo sapiens
  misc_feature (11)..(11): n equals a,t,g, or c
  misc_feature (18)..(18): n equals a,t,g, or c
  misc_feature (55)..(55): n equals a,t,g, or c
  misc_feature (378)..(378): n equals a,t,g, or c
attcaattatnggaaaanttgttacgcctgcaggtacsggtccggaattcccggntcgacccacgcgtccgcctcccccgtgtccgtattccttacctgcaccttttcctgcaggtgggactcagggtacttgttcagcacatgtgctttcctcttcgtcttctaggagggagtggttgggtctgggctccctgttcccaagcccacgttgtgttcatggctgtggctgcctgggtgatgagtgtgagtttgcacctgggttttccctgggccttaagcagacagcgtcaccctcagagccatcaccactgtgaatcatttggatctttttccatctgggcataaaattgtatgtgtagacaaaaaaaaaaaaaaaangggg

SEQ ID NO: 935 - DNA, 750 bp, Homo sapiens
tcgacccacgcgtccggtgaagctgtctggggaagagcattccaggtggtgggaacaggcttggcaggtgtgaagatgaggaaggaggcccctgaagagccggcgggaagagcgggtggatgggaacacagtttccccgtccgccagcaggtggcactgttggcccaggactgctcgggcatggctgggagagcaggtggggccgcgggttctttgacctcaggtttgtgattctggctgtgggctcatcacaggctctacctccaccctctggggagataagccctggccgggggcagaagagcagttgtaatggtttcctggctgttctccttccccaacgggtcttgctttcagtgtttctttgcttgctccctctccagaggtgacttccctcccggtttctgggtatctgtgtctttgctctctccttttgcttttctttttgctcccttggtctcttctcctccctctctcattgctccctgggggggcaggttcctgtctcaaagattaattacttgcttttttttttttttttttttttttgggaaacctcgctctgtcgcccaggccggaggttgcagtgagccgagatcgcgccattgcactccaacctgggcgacagtgagactccatctcaaaaaacaacaacaaacaaacaaacaaaaataatactgcgatttcctagcaatgcccagtgacttaccctaaattcagtgaaagttgaaaaaaaaaaaaaaaaaaagg

SEQ ID NO: 936 - DNA, 1238 bp, Homo sapiens
ccacgcgtccgctttccggaagggtcgactcaactggatgagcatggatgtccactgctggggagagcaaagagcttgatattttaatgctttggtttctctcagaagaatgaggcaggaagacttaaccgggctttgtaaattagttaacatactatttttttttctccagttttatactcttctcagttttttttttcttttaaaaaatgtgcacaaactatttgttgcagccgtgataatattcgtagtaaagagccaaaggtgctgcgtggctgggtctgcatcaggcctgggcctccgactgcacggctccaactacacagttgtttatggagaccagtcccggcctcctctgctgagagtaaaaacaggtgtgaaaggtaaggcctaagggtttcttttgtaaacctgagctctgaggctgatggacgagttttgggctggcctgccctcctcaatacagcagaaacgcttggtaataaaagtggactcaataatttaccttagtgttttgacaaagaatgcattgtctgaattatactaggtagtatattccatcaatcagtcaacaagtgtttattaaacacctctgggcttccctggcttttgctatttggtgagaaacccaactcagtaacctaatacctgcctttgtgtgtgtgtacaaaaataaatgatgcaaaattgtaagtttcaaagacttgaataactttattggctaatattaatttagcattgttaaccatcagattaattttaggcttggggcagttttagtgattgggggagaacaagagatggacttttgagttttaggtatctgtatgtatgtactttcttgacctctgttatatttctccagataagtactgtttaaataacatataaagatgtcagatgagcaatagatagataagaatggtgcaaaaaaaaatcaaaatatgaagctactgagagcaatttctgagtctcagcatactgagttttggccccaaagtgcctggggaaaatggacatatcatctaaaaagctgtaaataccagccaacaacaggaagtcttagactcctgtcccacacttctgagctgcagggtgtgggggaagccccatgcctttatctcactgtctctatctctagcaaggaaacctgtttcctgactctgcagaatttcgctttccccctttttccttaaaagcagagttacaaaaaaaaaaaacaaaaaaaaaaaaaaaaa

SEQ ID NO: 937 - DNA, 829 bp, Homo sapiens
ccacgcgtccgctaaaatacaactttatcatacaatcaaaccaggtagttcatataaaacagtgtaatacaagttttctataaagtcattactgttgcttaaacatatttcatgcctattaaaatatattttctactggtgatttcaacattatttctcatactgacttttattactggaaatgttcctgtacatgttggcagcagataaagatttttgaatgtttgaatgccctctgccttgatttggttggaatttttgctaaattggtaatgttgcttgaactttatgactacattttcttttaacttttttcatggacttccttatatgtacataataattaaatgttgaaatttatgaaatacttttatgaatttagataatttttaaatattgttaaaatttattgaactaaaaagtaatgtaaataaaataattcatgttaaagatggaacaaaataattaactttacatgtttggtgatacagatgcaaatgtttttgatatatggagatgttgagtcttttgactttactaaaggtgctgaatagcattaaattcactattttccttttctgttttacttgtgaaaataaaaatgcactaaggttgggtagaagttctgtttgcactcactaattgtgacagacagaggtttttgtaagtatttattgtacaattgatgcatgtttatttttagcgttgttattgcctctggtgttaataaatgaacaaatggctatctggaggaacagctacaaaaaaaaaaaaaaaaaaaaaaaaaaaaaaaaaaaaaaaaaaaaaaaaaaaaaaaaaaaaaaaaaaa

SEQ ID NO: 938 - DNA, 802 bp, Homo sapiens
cccacgcgtccgatcaaagcctcggtacgtggtggctcatccctgcaatcagagtactttggtcgacccatgtgaactggtcacctaaggtcacaatttcaaaagcaccctaacatggtgaaaccccatctctactaaaaatacaaaagttagccgggggtgttggtgtgcacctttagttccagctacttgggaggctgaggcatgagaattgcttaaacctaggaggtagaagttgcagtgaaccaaaattgtgccactatactgcagcctgggtggcagagtgagtctccatctcaaacgaagcaaaaaataacaaaaaaagacctcaaaaatgcttttcttctcgtataatggacttccttctttttctttctggttcctcttcatttctctctttatttttatttatttatttatttatttattttgcagtttgagtttgagataaatctaagttataaaagttgtatttcttaatacataatgacttctgaaagatgcctttgcagcatcctataatcagctcacatcattcgtttctgtacttgtatattttccagttattttccggttgaccccagaattcgttagatttttttaaaaaacaatttcaaaatagttgctgttttaaattagttgcatccagttcatatcaatgtctgcatgctttctagtctttgttatttattgaaaacctttggtacctaaacttaagtttgattgtttcagtgtgtacttggtaaatatgtcagtggccttttaactaaacatcaaaatgtactttaaaaaaaaaaaaaaa

SEQ ID NO: 939 - DNA, 1148 bp, Homo sapiens
tcgacccacgcgtccgctcctggcctcaagtgatcctcccatctcggccttccaaactgctaggattacagccgtgagccaccaggcccggccgagcttttcttaccatggtattcttgtgttcttccagagatttttttaaaatgcctcttccttttctcactccctccctctttttcttttaacacagatgggagcattgtgtgtgcattgttgtatacttgctttttgcacatacggatcagggatttctctgtttccttacctcctgatctgcctgcgtggcaggaacattcactatgcaatgactatccctgtgctcgtcaacgttcccgtgtgaccttgcagttaggtgggaccatgtaactacttctggctagcaaactgtgagaagtgagttgtcccacttcggggctgaagcactaggaacctccagctctgccacagaagctgtgtgtcatgtggtggagcctctatcagcctagatccctgagtgattacgtgaagccgaagctggcccttcccccctggcccctgctcagacccaacctatgctgaacacgtagttgagcaagaaataaacttctgttatgttaatttgtttctacatcacacagctcctcttgatatagctggatttctttttaatagctgtgaaattcataacactttgaatgaacccagttcagatgatcaaatgcttaagaacaaaaaagcatctaattaaagaataataactttaaatatacaaatatcagatcaatgcatcttatcccaatgtgttgccacgcaaatatcygtatacataatttctaattaaactttttaatttttttaaatttatttttctgagatggcgtctcgctctgtcgcccaggctggagtgcaatggcgcaatctcagctcactgcaacctccatctcctgggttcaagcaattctcctgcctcaacctctgagtagctgggactacaggcacatgccaccacgcccggctgatctttacatttttaatagagacagggtttcaccatgttggccaggctggtctcgaacatctgacctcgtgatccgcctgcctcagccaaccaaagtgctgggattacaggcgtgaaccactgcacccagcccagcccataattaaaaaaa

SEQ ID NO: 940 - DNA, 1095 bp, Homo sapiens
  misc_feature (69)..(69): n equals a,t,g, or c
tcccccgcgcsttgcccgattcattaatccagytgccacgacaggtttcccgactgaaaccggccagtnagcscaacgcaattaatgtgagttagctcactcattaggcaccccaggctttacactttatgcttccggctcgtatgttgtgtgaaattgtgascggataccaatttcacacaggaamcagctatgaccatgattacgccaagctctaatacgactcactataggaaagctggtacgcctgcaggtaccggtccggaattcccgggtcgacccacgcgtccgcaaaatttcttcagtttattatctgtaaattgtacagttttctttttgaaagttttaatattgtcttcctttttaataacttattttatacatattgtgcagatgtaaatcttgtaattaatggtcaaactgtataaagggattggtagtcaaaacatgtacaaagaaatacctgtaaaactgttttgtctcatgttttattggaccaaagttgtggtttgtatggagtgtagtagtagtgtgtacaggtagaaaacttttaaatacagcatgcaggtgtttcagttagcttgttttcatcaccataactgcaaagatgtggcttagttgtattgcatgcttcctataatttaactctccataattgatgcctgcagtagtgtaaggcatttcatactagtctcctctagtagacctgtgacttactgtgttggacatattatttagacttagtcatacaaagaaacttagctcttttttcatctcacagtaaagcctatttccccaggaaaaaaataaatgcctttgaatgaaaattctgaaattgtaaatgtctattttaatattcacctatgaaagaatctgtgaatatatgtaaatacgtttaataaattttattggtcatgttaaatcattgtaaaacttttttacattgcttaatgttttaagcttaatagcctttgcacttttaaaataaaaaccaagtatgcaaatcaaagatatttggtagtcaaaataagtaaaagaaatataggaatattccagtcaaaaaaaaaaaaaaaaaaaaaaaaaaagggcggccgc

SEQ ID NO: 941 - DNA, 1393 bp, Homo sapiens
  misc_feature (13)..(13): n equals a,t,g, or c
  misc_feature (24)..(24): n equals a,t,g, or c
  misc_feature (39)..(39): n equals a,t,g, or c
  misc_feature (58)..(58): n equals a,t,g, or c
  misc_feature (76)..(76): n equals a,t,g, or c
  misc_feature (1296)..(1296): n equals a,t,g, or c
  misc_feature (1299)..(1299): n equals a,t,g, or c
  misc_feature (1372)..(1373): n equals a,t,g, or c
tcggatgttgtgnggaattgtaancggataccaatttcnccccaggaaccagctatgnccatgattacgccaagtntaatacgactcactataggaaagctggtacgcctgcaggtcccggtccggaattcccggggtcgacccacgcgtccggggaattcttccataagttgggtaaattatatttttaactctggcatttgttcttatggtgagagttcattttttagcttctttagataaagctggccccactgatttggccctaagattaatatctgctgtaaagtataggcagtctctactgtagattctgtgcagccatgcacatatcagaaagtggtggccacaggacatacacctgactgtagctgtggctacactatggtcatcctctggacatcagtggtgagtccaaagctagttgtgaggagggaaagactatgaatgagtaatggaatgtaggaactaatagtacttgtgaactcagtagacccagactataggatttccatattgctttgaccacctttggttataatgatggaatcagaggtcttttaattatgatggtagttcctttggttttattataagtgacttttttctttctcaactgatttggtccatattcttatttcttaaactgaagtagacgtatagatccacattatatgtttcataagagttaaattatccttacatcctgaaaatagctgtctagtgtctagcccagggtcaaatgcaatgaaagaaagccaaccagttttttgctgttgttttgtttttgtttttgcagtggtacaattccacagtcctgcctctcatatatttaacacctttagcccacataattcaagaagcacattattaaggtgttgtctggctctgtgacccactagtatgcatcagtgaagccagtgctaggtttggatctgggtgtttatgagaaatgtgttgatgagaaattaagttttcccttgatacagcaggaggatttgaaatgcgttatcacagtgttctcaaggtagatgcagcaacagttgtagtaatggtagaattagaaaatttaatttgggaatattttttaagatttcagccaggcacgatggctcacgcctgtaatcccagctactcgggaggctgaggtaggagaatggtgtgaacccgggaggtggagcttgcagtgagcagagatcacgccactgcactccagcctgggcgacagagcaagactccatcttaaaaaaaaaaaaaaagggcggccgctctakaggatccaagsttamcgtaccncgngcatgcgacgccatagctcttctataggggcaccctaaattcaattcacctggcccgccgtttacaaccgccnngacctgggaaaaaaccctgg

SEQ ID NO: 942 - DNA, 1597 bp, Homo sapiens
tacgccgtgcaggtaccggtccggaattcccgggtcgacccacgcgtccgcctgcctgcagtaaaccactgcctgaaccgtgttcctaggtggtgctgatgctgggctgtctcaaaagcccttagtctgtttcaaagcttcctgccaatggcaagaatgtggatgatgtgattagaaatcaaatgaatgtaactgttacattgccaaaataccatttagctctcatttggctgctttttcactttgggtgggcattattatcagtttgctcaaaaacagtgcttatgratctatccaatgtccacaatgctgttataggataaaagsccatttcttattagtccaaataacagagtgggagacttttattcttttaattgattgtgaggttctaaaagagataattgtaaaagcaacaacaacagcaacagcaatcatggctgtatgcttatttgaacaagactagaaatgagagcagaaatttgaaaagttaaagtatttgaatgaccaccagatggcagtgtggggccacctggaagctgaagccaaagtcgtggttctgtctctctaggcagcctctgaaagtgtcagccccaaagaggcaattgctgtaaatgtataaggctaaagtatcttattaaatgattataaaatatatttaaatgcattttaaaaatgaagttcataagaattattttaggaaactgaaaggtttacatttactctaatacaaaattttagcccacaagtcttcaaaatataattaactcagagaagtctcataaatcaagacagagaattaatgaccacatagagaaaatttaagaaacaataattgatttttttaatagggaagagatcattaagcaaccacagccattacccaaataattatttttctcctaatggctacaaccattgtgcatgaaaatgatatgcataagtttcacttactctagaagaagtcaaactattttcacaaaatttctgcgtgttaaggtgaaaaatctgctgctgctttttaatacatcgtgacacaggtatggcaagcgaattcacaaggtaataccagagtattttggggtgtaaaaagagaaatccattttaaagtttgagaattcttagtttaaaatatactacaagaacgagcctctttatccctgctctgcccctgtcatagtgggagaatgtgccacaaaggccatattaatgagaggactggaaagaacacaaggagatacaaaacttcaagtcagtgaaaaagttacatgttacatgggattttggtaaattcaatgttctttccctttttccctctagaatcacaatttcaaagatgctttaatttcctccctccctccctgcctccctcccttccttccttcttccctcccttactttcttctgctctttcttgttttgatttacctccaagtggcagtaagtgctagctagcatttaaattctctacttgggtgttttatattaagttatttcatttaattatatctattcagtgaattagttatgattactggtaataataatgttaataaaatcaattttatgacaaaaaaaaaaaaaaaagggcggccgc

SEQ ID NO: 943 - DNA, 1641 bp, Homo sapiens
cccgggtcgacccacgcgtccgctaagtgaacaccatggtcagttgtgagcattttggtttccgcaaaggatggatggtgagcatcatgggaaagctgtagtttagtgacttagcccttagtgattaatagatttgcatgtacatagaagtctttgttggccttataatctgctgttatatttggcatggattttcatggttttgagaatgacatcctggccctgtggtccccgagggtcatggtccttgtgacctggcccctgttcactgcccccttcgctagcacgagttgctgtgcagggctggaggtagctaccatggcttgtttcaaggaaggaaactctggtacggtggcaccctcaggagtggaggacagtgaacttccttgaagagggagtgactaaggtgacctccaacctgccctgagccagctgccctgcaggtgccacgtgagcctgctctggcatccacaggatgctcctggagcctcttctctggctgctacctcagggcatggttgtggccccaccaacacctattttccaaataattattcattcttgtgacagtggcctgaacatgtttttaattttctcaacaagcatttagccagcacttatccagtgaaacaatttgataaggtttcaaggagtatctgatgggttaggaagtcacgaaatgaggagttcttgccacatttgcagagtccctccttgataaggtttggcggtgtccccacccaaatctcatgttgaattgtagttcccataatccccacatgttgtgggagggacccagtgggaggtaattaaatcatgggggtggttacccccacactgctgttctcatgatactgagttctcacaagtcctgtttgttttataaggggcttttcccccttttgctcaacacttcttcctgccatcatgtgaagaaggacgtgtttgtttccccttctgccacgattgtaagtttcctgaggccttcccagctatgtggaactgtgagttaattaaacctctttcctttataaattacccagtcatgggcagtcctttacagcagcatgagaatggactaatacactccccaaatgttttgaagattgttgcaccttggaactaccagtgtgcacacaatctggctcaatgtatatattggcccagcaaggcaaagaactgaagttccaggatggaagaacctgtgttctcctcataatagtatagaataattcaagataggcaagaaggacagcagtaaatgaagaccatggaagaaaagaaggaatgccaaagatcgaggaaatctaccaagactagtagggtagtccagaagaagctgtttcagggcctgttgccagctatgcctttgagaacctcgggatcccaaagaatgaggggaatttcttcagaaagacaatctcggcatgcattatttctttgttttgaagattcactcatgttgcatgcatctgtagcttgtgccttttttattgcctagtagtattctgtcatatgcctatcttacaatttgattatctattcacctgttgatgaatgtttgaattttttccatttgaggaattttatgaataaagctgctataagcatgaaaaaaaaaaaaaaaaaaagggcggccgc

SEQ ID NO: 944 - DNA, 1470 bp, Homo sapiens
acccacgcgtccgcaacattgtcctcatgtgtgtcacattcttatctgcttgctgcatctatgccttttatttgttgttgttcagtcttttcatacaagtgacaaaaaggatgctggagcaggcttggtgagaacaggaagggaacccatcaaggggcagagacactagaaagggtgtgaaataacatgaataactttctgacttcaccatggaccatggaggggtggccatccaagagggtgctgtacgaagctttcatagggagagccactctcttgtagatctgcataggtaaaccttcccaggtgagggcatcatggccagctttgcagtcttggaaactaagtttttaaagagaggaacacaggatccctggtgtaaccctgtgtgggaatcacagctacttgctgatgtaccctaaagggaaaacctgtgattatggtagaggggagtttttttcctcgcagcgacagttttgccatgaatttccaggcctcacttgatttcaggtcagggtctcttgggcaatccagaagaaattgtacaaggcaggatgactgaacaggtacagcaaatcagctcaaaacatatgtcaaacaaggtggggcctgaataaataaatacagatgagtagttcacttggctggagcatacagtgtgttgaggagagtggctacaagtagagctgactctgtgggctggaaacagattgcaaagagcttggcacattagctcaagagttttgggtttgacttgcctggcaggtggaagcctttgcagggagaatattaaatccaagcagcactatctatatactgaaatcgtaccactttgcatttaggtaatatgtggaaacttgcaaggtactttctcatttgtcatctcatttgagttttataaaaatatccttgaagtaggtaataccgcttctatcttatggattaggacactgagactcagaatggttaagtggcctctacagatctcagctaatgcgtgcagagcagaaggtgaaccaggtcagagtccaagaccatggtcatacccaccacatcatgcttctctgttaacttcacctggcactgggtgcatcacgagtcccacaaatgaagttttctagttkgtctyctgtgatattattttcagagtatcatgtataccatatattatatttgcttgtatgctctagacatttcattgcattttatagggcaatgcttcccaaacttggctactcattagaattactgtgacatttgatgaatacagatttctaggatctttcctttgagattctgatttaataggtgtaggttgggtcccagagatctgtattttttaaacatctgaccattactattaattatgagatttccttcaactttgaaacatgcttatttagtatggtttctaacatatctgacttcttgtggttcctaatggtaaaaaaaaaaaaaaagggcggccgc

SEQ ID NO: 945 - DNA, 604 bp, Homo sapiens
tgatgaaaccccatctccacttgccattacttttccttcccactctctccaacatcacattcactttaaatttttctgtatatagaaaggaaaactagcctgggcaacatgatgaaaccccatctccactgcaaaaaaaaaaaaaaaaaaataagaaagaacaaaacaaaccccacaaaaattagctgggtatgatggcacgtgcctgtagtcccagttactcaggatgattgattgagccttggaggtggaggctacagtgagctgagattgtgccactgtactcctagccagggagaaagagtgagatcctggctcaaaaaaaccaaataaaacaaaacaaacaaacgaaaaacagaaaggaagactgaaagagaatgaaaagctggggagaggaaataaaaataaagaaggaagagtgtttcatttatatctgaatgaaaatatgaatgactctaagtaattgaattaattaaaatgagccaacttttttttaacaatttacattttatttctatgggaaaaaataaatattcctcttctaaccaaaaaaaaaaaaaaaaaaaaaaaaaaaaaaaaaaaaaaaaaaaaaaaaaaaaaaaaa

SEQ ID NO: 946 - DNA, 981 bp, Homo sapiens
ctcctcccttcagaccctggcaaccactaatctgctttctgtctctctagatttgcctatctggacattttatatcgatggaatgatacaacatgtggtcttttgtgtctggcttctttcatttagcattttcaagcttcatctaagttctagtttatgtaggtattgcattgctggataaaattccattctagagatagctaccacattttatttgtccattaatcagctgatggacatttgagtttctgttttctactttcggctgttatgaataatgtcactatgaaagtttgtgtacaagcttttgtgtgaatttgtgttcagctgtcttgggtacataccttggaattgaattgttaggtaatatggtaactccgtgtttaacatcttgaggaactgccaaaatgttttccaaggtgcctataccattcccaccaggaatttctccacttcctggtcaatacttcttaatgttggtcttttttgtagccatcaggtgggtaggaaatggtatctaatgattttgatttgtatttctctaatgactaataatctgataatctaatgactaataattgagcatcatttcatgtccttatcagacatttgtatgtatcttttttggagaaatattgatttatatccttttgaaaaattggggccgtgcatggtggctcacgcctgtaatcccagcactgtgggaagctgaggcgggcggatcacgagttcaggagtttgagaccagcctggccagcgtcgtgaaaccccgtctctactaaaaatacaaaagattaactgggcatggtggcgcacacctgtagtcccagctatttgggaggctgaggcaggagaattgcttgagcctggcaggcagaggttgcagtgagctgagatcacgccactgcactccagcctgggcaacagagsagagactgcgtctcagaaaaaaaaaaaaaaaaaaaaaaaaagggcggccgc

SEQ ID NO: 947 - DNA, 1653 bp, Homo sapiens
  misc_feature (1555)..(1555): n equals a,t,g, or c
  misc_feature (1581)..(1581): n equals a,t,g, or c
  misc_feature (1584)..(1584): n equals a,t,g, or c
  misc_feature (1611)..(1611): n equals a,t,g, or c
  misc_feature (1626)..(1626): n equals a,t,g, or c
ggtcgacccacgcgtccgagcagatcatcagccgcctcttccatcgtcatggggggccagggcccggggggccggagccagagctgtcccccatcactgagggatctgaggccagggcagggccccctgctcctgccccaccagctcccattccacccccggccccgtcccagagcagcccaccagagcagccgcagagcatggagatgcgctctgtgctgcggaaggcgggctccccgcgcaaggcccgccgcgcgcgcctcaaccctctggtgctcctcctggacgcggcgctgaccggggagctggaggtggtgcagcaggcggtgaaggagatgaacgacccgagccagcccaacgaggagggcatcactgccttgcacaacgccatctgcggcgccaactactctatcgtggatttcctcatcaccgcgggtgccaatgtcaactcccccgacagccacggctggacacccttgcactgcgcggcgtcgtgcaacsasacagtcatctgcatggcgctggtgcagcacggcgctgcaatcttcgccaccacgctcagcgacggcgccaccgccttcgagaagtgcgacccttaccgcgagggttatgctgactgcgccacctacctggcagacgtcgagcagagtatggggctgatgaacagcggggcagtgtacgctctctgggactacagcgccgagttcggggacgagctgtccttccgcgagggcgagtcggtcaccgtgctgcggagggacgggccggagagaccgactggtggtgggccgcgctgcacggccaggagggctacgtgccgcggaactacttcgggctgttccccagggtgaagcctcaaaggagtaaagtctagcaggatagaaggaggtttctgaggctgacagaaacaagcattcctgccttccctccagacctctccctctgttttttgctgcctttatctgcacccctcaccctgctggtggtggtccttgccaccggttctctgttctcctggaagtccagggaagaaggagggccccagccttaaatttagtaatctgccttagccttgggaggtctgggaagggctggaaatcactggggacaggaaaccacttccttttgccaaatcagatcccgtccaaagtgcctcccatgcctaccaccatcatcacatcccccagcaagccagccacctgcccagccgggcctgggatgggccaccacaccactggatattcctgggagtcactgctgacaccatctctcccagcagtcttggggtctgggtgggaaacattggtctctaccaggatccctgccccacctctccccaattaagtgccttcacacagcactggtttaatgtttataaacaaaatagagaaactttccttataaataaaagtagtttgcacagaaattgaaaaaaaaaaaaaaagggcggccgctctagaagatccaagcttacgtacgcgtgcatgcgastcatagctcttctatagtgtcacctaaattccaattcacttgggccggtccgtttttacaaccntcgttgaatgggggaaaaaacccctnggncgttttaccccaaccttttaattccgncctttgggcaaagcnccatttcccccccctttttccgcccaa

SEQ ID NO: 948 - DNA, 939 bp, Homo sapiens
ccacgcgtccggccccacagtgaacactactctgagaaacctgggagctctgtataggcgccagggaaagctggaggctgctgagaccctggaggaatgtgccctgcggtcccggagacagggcactgaccctatcagccagacgaaggtggcagagctgcttggggagagtgatggtagaaggacctcccaggagggccctggagacagtgtgaaattcgagggaggtgaagatgcttctgtggctgtggagtggtccggggatggcagtgggaccctgcagaggagtggctctcttggcaagatccgggatgtgctccgcagaagcagtgaactcttggtgaggaagctccaggggactgagcctcggccctccagcagcaacatgaagcgagcagcctccttgaactatctgaaccaacctagtgcagcacccctccaggtctcccggggcctcagtgccagcaccatggacctctcttcaagcagctgacattcaacccggcccccaggtctgctgggtccccccacccccacagccctcacagcattccccattgctcctggctcttccccacccctaggtgggacagtgaaggggagcagtttaagccagaagattgctgctgcccttagggtctcagctccctcctcaggaatccctcttaggaaggaccctcaggacaccctctctgcaccctgtggtcctctagagtagctagctctgaggccccaaggtgggtacaaagcaggtatggccctcagagatgcagcctgctgctggcttttcagtcagagggttgggggctggccagccaagctgccttgccctggccgctcttactccctccctctgctgtctcacttcaggtccatgtatttcacttttcttaaataaaagaatcaggtaacctttcaaaaaaaaaaaaaaaaaaaaaa

SEQ ID NO: 949 - DNA, 737 bp, Homo sapiens
ccacgcgtccgctgaccccagagcagaaccggaacaccaggttggggccctggtgctgccacctcctctgctggtcgggctgggaccctttgccccttaggagaggtgttggtcacagatgtttacctcagtttatgtcactgtcgaagaaacaaaaaataatagcaaaaaataacactgtagacatgaagacttagaagacaaaaaaaaaaaaatcacacaaaaaatctcccttgttgcgattcttctgtgaaggtacagtgtgtatgtgtgtatgtgtgtatgtgtgtgcgtgtctctgtcccagaccctgtgtcccccacactgcccccctgtcttcggtgcttcccagagacccctctgagctggcctgtggggcacgggaagccccctggatgggaggcggggccacaggtcggctagagggtctccaccaggcccactgaacagaaccccacggctgccagaatgttccctgagcctacactgtggccagtgggacagtcctggtggctgacatcagcgtccatgcttggctcagggcctggggcggggtcctgggtagagtcctagccccagagccccagcccctcatgtcttgccgcccttcctccatgtgtttgtaaatactctggcatcctttggccctgagaaggtttttaaatgtgttatttacttctctaaacatgacgattgctataaaaataaacaaaagtttagaaaaatgaaaaaaaaaa

SEQ ID NO: 950 - DNA, 2286 bp, Homo sapiens
gatggcaatattgctagagctgggactctggtgagcatccgtcatttttagtccttcttgaggacattgctgaaatttataagaggtcgaatgtttctttctttcctttctcagtctaaaagtagagttatatgytctttgacttactatgattcaagcaatagattttgaagtcagtaatcgttaagctgggacataggatgcattctccaaaaacattaatttaattagacattagccaccctatatattttacatagattaatataaaacatatcctcattaaaaaatgtttttcttgaatgtaaaagatagtcttccaaaggatagaaatattttagttccaagagaaaagccatcatattacttgggatctgtagttttcatgcctatgaaatatttataatcctccctcaccccaaataaaaaatctcctacatgtgaacatagcctgtcactcatttgccatgaggtatgtgccatctccctgcagtgctatagttctcccattgtcttcctgtctggttaatgagcagctttgtagatgggtgtgtctagttagttcttgctttttgatggagttttttcctagaggccaactactgttgctctcgtttattatgatattgacattttgggttaagcaaggtgggtgggaaaggtggtcagatgttaaatataacttattaggaggaacagtgaactgtgaagtggttagaaaaaaaataaaaacttcttattagattagacctaggaaattcaagctgacccctttgcctaacttccctagagaaaaacctagaacttggtcatccctttataggagacccctaagttgttctcagggtttggagatgatgttctggagggagtacaagcaaataatctacttctggtaatctgagggtgctttgcgtatttggccattgctcagaagaatagaggttacattatattacattatatgaaaattatttagtttttctatagccctttgtagtttgcaaagcacttttccatatgtgtgtcctctcttccacaccatagccccctgaggaagtaattgttgtccccattttatagatgaaaaggctgaggcacagaggagctaaatatcttgttcaaggccatacaatgtgtgtgattattaggcttggaatcagggcctctaactctaaagcacatgttttttcaactatatgcagaaattgcctagccatggacacaagaaagctgggaggaagagttctacttgtggatgtttttaattttttttaaatatcaggagcaatccagggccatacagctatgaagcacttagtgaaaagaacacaagaagatttactaactgaagttagtattagtgattagaaaacaaaactgccagtttgtgcttcattaaggtgaactcatctctccaagcaggaagggaaaatttgctttccctagcagttgctgcatatgtgtgtacagactgcacaattctaagaaattgtgcaaaatggcatacctgtctttctcccagatacaccgccccctgccccccccaaaaaaggtcaggattaaaggtggtgagaagtgaacatttattaaacagaagttaaaccaatagagagaaaggaggtttgttggagtctaagaggattttgaccatgtagaaattccttgaaacagaccttaaaaggtattgaaaaattgaatcacaaagaaagtttacctttaaatacttgttaatggctcctagatcatggttataatttttctcaatgggaaaaaaagtcttaaaatttgttttaaataagatcctctaatgtctcgagctttttgattctggaaataatttgctttaaaatataaatcaatcagaaagtgatctaccactgaaatcattctaggaaactagcatgggatgcactgcacaatgttctttcctctaaaggcatgggccccataaactgtggcatctggcagcaggatgccatcagtcctttagaaagcctaattttgggccgggtgcggtgctcacgcctgtaatcccagcactttgggaggccgaggcgggtggatcacaaggtcaggagttcgagaccagcctggtcaacatggcgaaatcccgtctctactaaaaacacaaaaattagccgggtgtacgtgcctgtagtctcagctacttgggaggctgaggcaggagaatcacttgaacctgggaggcagaggttacagtgagccgagatggcgccatttcactccagcctgggcgacagagcaagactctgtctcaaaaaa

SEQ ID NO: 951 - DNA, 1875 bp, Homo sapiens
ccacgcgtccggaaatgtccaagttttactctcagctaatagttagaggagtgcttggactcggcgtgatttttggactctggacgttacaaaaggaagtgagacggcacttcggggccatggtggccaccatgttctgctgggtgacggccatgcagttccacctgatgttctactgcacgcggacactgcccaatgtgctggccctgcctgtagtcctgctggccctcgcggcctggctgcggcacgagtgggcccgcttcatctggctgtcagccttcgccatcatcgtgttcagggtggagctgtgcctgttcctgggcctcctgctgctgctggccttgggcaaccgaaaggtttctgtagtcagagcccttcgccacgccgtcccggcagggatcctctgtttaggactgacggttgctgtggactcttatttttggcggcagctcacttggccggaaggaaaggtgctttggtacaacactgtcctgaacaaaagctccaactgggggacctccccgctgctgtggtacttctactcagccctgccccgcggcctgggctgcagcctgctcttcatccccctgggcttggtagacagaaggacgcacgcgccgacggtgctggcactgggcttcatggcactctactccctcctgccacacaaggagctacgcttcatcatctatgccttccccatgctcaacatcacggctgccagaggctgctcctacctgctgaataactataaaaagtcttggctgtacaaagcggggtctctgcttgtgatcggacacctcgtggtgaatgccgcctactcagccacggccctgtatgtgtcccatttcaactacccaggtggcgtcgcaatgcagaggctgcaccagctggtgcccccccagacagacgtccttctgcacattgacgtggcagccgcccagacaggtgtgtctcggtttctccaagtcaacagcgcctggaggtacgacaagagggaggatgtgcagccggggacaggcatgctggcatacacacacatctcatggaggcggccctgggctcctggccctctacagggacacacaccgggtcctggccagcgtcgtggggaccacaggtgtgagtctgaacctgacccaactgcccccttcaacgtccacctgcagacaaagctggtgcttctggagaggctcccccggccgtcctgagggggaccaggcagccctcagcagccacaggccttccaggagctgttatcactaccagtttctggcacaattccagcacaattatgacaattcagagaagcaagtcaaaggactgggcacctgcctctgacagacaccagaccaggtccagggcctcctccacagcctcagctggggctctcagcaccaaagaacgaggggcccaggtcttgttggcaccccgggagccactgcccagggtgatggtggccagctcagggcttcctgcgggtgactgtcgcccagaccaggtgccattcatgactaatcaggagcagcgggctcacccaggcacctgtctgccaggaggccacgtgtgtcctgcccacccagggggagctgtattttggcagcaccccacgcttgctgcccgagggcctcttggggcacctaagacagcaccccctttcaggggagaccatggtggccccggccgcacccccccaccctggtgccaccactgcaacttttgtattcacaggcatcccatctccatcacagataaaatcttaggagataaacacattcaaaaaggaatgagataaaaagattaaggcaataaatgttgattggaacctctcaaaaaaaaaaaaaaaaaaaaaaaaaaaaaaaaaaaaaaaaaaaa

SEQ ID NO: 952 - DNA, 518 bp, Homo sapiens
ccacgcgtccggacgtaacggaggcaggttggagccgctgccgtcgccatgacccgcggtaaccagcgtgagctcgcccgccagaagaatatgaaaaagcagagcgactcggttaagggaaagcgccgagatgacgggctttctgctgccgcccgcaagcagagggactcggagatcatgcagcagaagcagaaaaaggcaaacgagaagaaggaggaacccaagtagctttgtggcttcgtgtccaaccctcttgcccttcgcctgtgtgcctggagccagtcccaccacgctcgcgtttcctcctgtagtgctcacaggtcccagcaccgatggcattccctttgccctgagtctgcagcgggtcccttttgtgcttccttcccctcaggtagcctctctccccctgggccactcccgggggtgagggggttaccccttcccagtgttttttattcctgtggggctcaccccaaagtattaaaagtagctttgtaaaaaaaaaaaaaaaaaaaaaa

SEQ ID NO: 953 - DNA, 1413 bp, Homo sapiens
gccttgaggtggaaggcgggaaaatggcggattcctcggggcgaggcgctgggaagcctgcaaccggccccacaaattctagcagtgccaagaagaaggataaaagagttcaaggtggaagagtgattgagtcccggtatctgcagtatgaaaagaagacaacccaaaaggctcctgcaggagatgggtcacagacccgagggaagatgtctgaaggtggaaggaaatccagcctgctccagaaaagcaaagcagatagcagtggggtcrgaaagggtgacctgcagtccacgttgctggaagggcatggcacagctccacctgacctggatctctctgctattaatgacaaaagcatcgtcaaaaagacgccacagttagcaaaaacaatatcaaagaaacctgagtcaacatcattttctgcccctcggaaaaagagcccggatttatctgaagcaatggaaatgatggagtctcagacactactgctgacgctactatccgtaaagatggagaacaatcttgctgagtttgaaagaagggcagaaaagaatttattaataatgtgtaaggagaaggagaagctacagaaaaaggcccacgagctgaagcgcaggcttctcctctctcagaggaagcgggagctggcagatgtcctggatgcccagatcgagatgctcagccccttcgaggcagtggccacacgcttcaaggagcaatacaggacattcgccacggccctggacactaccaggcacgagctgcccgtgaggtccatccacctggagggagatgggcagcagctcttagacgccctgcagcatgaactggtgaccactcagcgcctcctgggagaacttgatgttggtgattcggaagaaaatgtgcaggtgctggacttactgagcgaactcaaggacgtgacrgcgaaaaaggaccttgagctccgaaggagctttgcccaggtgctggaactctccgcagaggcaagcaaagaggcagccttggcaaaccaggaagtctgggaagagacccagggcatggcgccccccagccggtggtatttcaatcaagacagtgcctgcagagaatctgggggagcacccaagaacacgcccctgtctgaggacgacaacccgggtgcctcgtcagcccccgctcaggccacgttcatcagcccaagcgaagatttttcttcaagcagccaggcagaagtcccgccctctctctctcgttcagggagggacttgtcatgactcatggttacattcaggatacttgagcactttatatactaccgtagcactgtagctattttttatgtgataatcttgtttgataaaaaagtaaacctgttttgcaattgaaaaaaaaaaaaaaaaaaaaaaaaaaaaaaaaaaaaaaagggcggcc

SEQ ID NO: 954 - DNA, 2163 bp, Homo sapiens
gagcatccagcgcaaccgctctgcctgtcgtgtgctgcttcctggagctgagagtatgcagctggcaccacaagggaacatctggggctggccctggccctgaaagtgcccttcttcatcgtggtcagcaagatcgacctatgtgccaagaccacagtggagaggacagtacgccagctggagcgggtcctcaagcagcctggctgccacaaggtccccatgctggtcacctctgaggatgatgccgtcactgctgccagcagtttgctcagtcacccaatgtcacccccatcttcacattgtccagtgtgtctggagagagtctggacctcctcaaagtctttctgaatattctgccgccactcaccaacagcaaagagcaggaggaactcatgcagcagctgacggagttccaggtggatgaaatctacacagtaccagaggtggggactgttgttggaggaacactttccagtgggatttgccgtgagggggaccagctggtggtgggccccacggatgatggctgcttcctggagctgagagtatgcagcatccagcgcaaccgctctgcctgtcgtgtgctgcgagctggtcaggctgctacactggcgcttggggactttgaccgtgcactgcttcgcaagggcatggtgatggtgagcccggagatgaatcctaccatctgctcggtgtttgaggcagagatagtcttactgttccatgccaccamcttccgacgaggattccaggtgacagtacacgtgggcaacgtacgtcagacggcatggtggaaaagatccatgccaaggacaaactgcggacaggcgagaaggcagtggtacgttwycgmttcctgaaacacccagagtacctgaaggtgggcgccaaactgctgttccgggagggtgtcaccaagggcatcggccatgtcactgatgtacaagccattacagcaggagaagcccaggccaacatgggcttctgaacccttcaggcagggacagttctattgctgtccctacaatatataaggtgacttctggccatgctgccctgccattggcggctctgtgtgttaataggctagggagagaggggtgctgtctgccacttgctccctgccaactttctggagaggtgccaaacttggtgtggccaggaaagggcagtcctgagggagaagacaggattcagggcagtgctccgaagctgtgtgctcacctggttggctcatcaaacctggcaaccctgtggcctgtctgccggagctgactggatccactcatcaattcttcgtccccactactaagactgggcatgttttgctggtgtggtctctgcacttcaggaatggtcacaacagggggtagccctcaaaagcactcctttttctatacctcttctcaaggccatgtaagttgcccatctctacctggctgtggacaaaaggttatctgctcttggccatctggtggtggtggcggcccagagtctgaagaaatggcacagggacagtgaatggtagtgttgccaccctgtgctgaggcctgaggcctcttcctcagctttatctccctttccttcactcaagggccatttccccagtccctatctcccccatcccctcccggcttataggccccacaggtgctatttgttgtgctggcccaggcgtggggctaccaagcaaaggcttggcatataccaaaggccagctgcatgcccatcagtctggtctttttcctctgcggtcatgttggctttcatgctggatcaaatgttttactttcccagactggtggcatctgagttccccatcctaccactctcaccccactttcctgccccacctaaaccctcgttttagtaatttgtagtgactgttcccttccctctgttgcagggaaccaggaggaaagggaaagatgttgccatatttcctactctttaggcatggactctcctttccctttgttagtgtcctgggttcccatggactcagggatttgttggctaaggtttctctgtgcatatatatatatatacatatgtatatatatttaaatacacatatatattgtacagaataaaaatgttttattgaaaaaaaaaaaaaaagskcggscgctctagaggatccaagcttacgtacgcgtgcaa

SEQ ID NO: 955 - DNA, 2163 bp, Homo sapiens; identical to SEQ ID NO: 954

SEQ ID NO: 956 - DNA, 1588 bp, Homo sapiens
  misc_feature (1586)..(1586): n equals a,t,g, or c
ggaagggccaggggatcccgcggcggcgccacggaggcggaggagcaggcggtggaggcgaggcaggaagaggagcaggacttggatggtgagaaggggccatcatcggaagggcctgaggaggaggacggagaaggcttctccttcaaatacagccccgggaagctgaggggaaaccagtacaagaagatgatgaccaaagaggagctggaggaggagcagagaactgaagaataacgaaktatccttagcgtcctcctaaaggcttttccttttggcatcttaaaagcttgagagataaaacggaaaccccagagaggagtctgggcaggctcccagggtgcatgctgcctccataaatctgctgagctctagaccctcaatcaggacttgtcccttggctagcaggatcctgggaacacctttggccctgccctgtgtagagatgttcatgtctgttcctgtgggtcactttgttaagctgaagagttttaagaggtagagctcagaccctggactgggatttttcttaccactcaaacttgctatccacacaccctgcacaccttagataaaaagaacattttaaaagcagagttcactttcactccagtctcccctcttttgccctcactgaagccaaaccacagaagactttgaggaatgagagacaaatgaggtagagctcacctgtgctcaccagctccgtcagggtggtcagccgacccctttccctgggaaccccacttctctctgtggctggcttggttgtcgggggtgagatgccatattgattacagggcagcaaagaaccagtaccaggaatttacttgaccattccccttatttttcatctagaggaatctcggattcagccctttcattgctaagacaccttttcactgaggttcttaccagctcagccaaatctccactctgctatagcagaagcaataatgtttgctttaaaaagatttcttgacctatgccttttcttagaaagtttgatagattagttagaacttcagatcatcagatcagtctcaaatgggtttcttggaattttatatttgacaatatttatactataccaaactcatttgcagttcttaggtttgttggttaaaacatttttttaaagcagtaagtttatagaaaatgttttcatttaatggaaggctggggaatgtccagcatcaacccctatggcatgcattcccagtggccttctcatctgggcctggaacctttggttcagggcttaggggagaacaggccacatggcaacagccacacagtcattgccttcaacacagagccacgtgtccccaaacagcaatagtcatgcccttgtccaggctgggatctaattgatacaataggtcgttgactccctcctagtagagctatctaggtttgtctggaaagtttccgaccctggcttataggcaccacacctcatgtactcctcatggcttggatctctgtattcagcctttgttcagtccaataaactttgagtagatgatctcaaaaaaaaaaaaaaaaaaaytsggggggggcccgtacccattggcctttagggngc

SEQ ID NO: 957 - DNA, 682 bp, Homo sapiens
  misc_feature (7)..(7): n equals a,t,g, or c
  misc_feature (12)..(13): n equals a,t,g, or c
  misc_feature (20)..(20): n equals a,t,g, or c
  misc_feature (32)..(32): n equals a,t,g, or c
  misc_feature (670)..(670): n equals a,t,g, or c
acggggnttttnnaacgggnaaatctcccctnactattgggaacaaaagctggagctccaccgcggtggcggccgctctagaactagtggatcccccgggctgcaggaattcggcacgagaacacactcacatgcagtgagttacatgaagcagatttatgactatgctcacaggcatcaagggacaatagaagcctaggattcagtgtgatttgtccccttcatgtcccccagactccagaaaggtgctcaggttaaatggtgtctcatctgtgtatgccgcacttgcactacacctgagggtccctggaagacatctctctctgggttttatattccatggtgatatgacttgctggctaaagcattacagtgtactgtttctggtcgggactggaacagaacttgagctgttttggtcagtcccttcctatcttaagatgttgtgttgtacaattattcttaagaactacaagtgaaaaaaggaggagaactgggtggtccaaggccaccagagcactgtcctgcagatcccaaggagccaatttaaactaagaaaggtattggctgagatagtgaaagaagtctttcctccttctgatcagaggagtaaaaaaaaaaaaaaaaaactcgagggggggcccggwcccaattcgcctataggaggcgnattacaattact

SEQ ID NO: 958 - DNA, 907 bp, Homo sapiens
ggcacgagaaaatatctaccataacactttacattttttcttctgtaattagaaaatatgataattttttttcaccaggcactgtgtagatgcctccaaatgccctcctgttgtccagtgtgctaaatttttttttgctgacaagttttgtttgcaatgttaaaagggttgagaagcatcattctagtcaaatgtactcattttgtatgaagaaaactgaaatctacatagcaggctcagggatttgtccagtgtcctacagttggttggtgtgaggctggatttgaaaattggggatcttggatcttgactcttcagctctcatcacctcacactgaccccctctccccccgaaacatgagggaatattggaggaaggcattgatgataattgaaagacaaaaatacagaacctcagaggaattattaaaagaactgcacatatgtagttcagaaatctttgagaccctactgtatctaatagtgcttagaatcttcttatataataatattattaatattctataatctagaatagattatagtaggattcgttttatgatgacttgggctgtatctttaagaaaacaaaagattatagcaaaaggagtttagggcaaacataaataaaaattgatactaaaatcgtatgtatgctatttccaaaaaagggaggagggaatatatgagacctttcaagttcctctggtactataattacattttctctcatcttgcttttgattggattagaattcacgcaattaaagataatctagggccaggcacctataatcccagcactttgggaagcagaggcaggaagattgcctgagcccaggattttgagaccagtctgggcaacatggcaagaccccgtctctttaagaaaaaaaaaaaaaaaaaa

SEQ ID NO: 959 - DNA, 1508 bp, Homo sapiens
ctccactagattagaaacaagaaagcccaggcctttttctacaactaaaaatactcagatttcattgaatgtttgggtaattgaatttgagtggttttgtttctttgttttattgatgaatttattattgagtaaggacacttcctttttaaaaattacttggtatcctacatagattactatattaaagcattatttggctgttctcaatcagtgttttctttgttcagtgtgccaagatcatactctttagaacattgcattatgaaaatgaagttttgacagtcagttgtggagtttttgttttgtgtgtgtgtgtgtttatttgttttttaccttcccagttcttcagccctcttcccaccaccacaatgaccccatcaagagagacaataaatgtacccataatgtttgtgtaggatcagaatttattccagtattcacagcttttgaagcaagctttaagattgcataaatccttagtaatcatggtttaagagaaacaatcccagctcctataatttttcttcactccaatcagaaaggcaactggccatgaaatctcagctggaatatttaaaaggaaattcagatatggcttgctcgtttgttaacttattaccaaatgtattaaccaaaggaaagaatttaggccaaatctgacagggtcatatgacatatgcagggaaaagccaacaggttcctattaggctactcgaactcatcctactactactactcttttgcggggttaggggtaggttttttaaaatgttcttgtgtccatcagtcacaagaggaggtagttttcactaaagataaaaaattgaggcaacttttggaactatacattacccccttttgatagggtaatggaaattgacagggtgggttattgatggaaatgatgtcataactagtctgaagactatgttatgttaactaagtatgttattacttagtctgtttaaattccccttgatgaatgagggaagattgttaaataccttgtatggtgatagtctgccctttatttttttaagtttaaccagtaaagactataataaaaggtaagatttttaaaaattgctgatagaaaagaatcacaagcaatagaaacggaaacaacagatttttattttgtattttagaacacttggcttgtaatttgcatctaatgtttgcttgcatattgtcataaaattaacagttttaaggtagtacgtttgacatgtgtgtatttttataacagcctattaaaatgatgtggaagattatacttttaaatatgcccactttgtttttttaaactcattgtagtcttagtctttcctccaataaaattgttgtgtctttatatggcaaatgtatagttattataagcattctcacgcatgtgatcccagcactttgggaggccaaggcaggtggatcacgaggtcaggagatcaagaccatcctgactaacatggtgaaaccctgtctctactaaaaaaaaaaaaaaaaaa

SEQ ID NO: 960 - DNA, 1003 bp, Homo sapiens
gctgcaggattcggcccgagtttccatcttatacacaataaatttgaggcatagagaggttaaatttgagcagtgtcactgtaactcacttttaaaaactgtgtgataattaaatggcagtccttagttttaacccagttatggctggctgtaagttccatcccgtcatgaccattatgtttcctcaacttttctattttcctacttcctttgctgtgctctcagtcgctgggagacgaaagtgctgctggttagcacagaagaaactgctgctgctgcggcttctactgttgtctgccatctctgttaccatcgagaccggggctgtgtatgctcgaggtgcagggagctaatgtataaggagttaaatgaactcttgctgctgccaaatatgttgttatcactaactgcaccgctgctgtcattagtgctgctgccaacactgcaagccctgctgctgccagtgccaattctgctgatgccttgggctctccatgtcccagggtgattccatagacaagcagctgcttttagatttcacttgctcattacctgtagatcctttgccttaggactcaagcttaagcccatgaagcctgggatagaagacaattggaggtatgttttatcttctctagcatctgggacaactggccttgaaccaaacatgtgcacctcgtttttcttttcccttcttcctctgagatttcttttcccagaggctcttatttcatgcaatgatccactagccctggaaacaggaacataaacactcgaaccctagaatgaacataatttagtcttaactacattagatattttagtttgaaagaaatcactcacatttcataatcctgaaacatataaatttatacttagttatctgtgcaaaaattgaatcatgataattattaaagaattactatgcaagtgtaaatagctttggtattaaccaagagtggtttcagtgtgcttttgtaaaaaaaaaaaaaaaaaactcgag

SEQ ID NO: 961 - DNA, 678 bp, Homo sapiens
agtccaggggactacattgcatttagctgtcatgtctctccagtttcctggtctgtgatagtttcttagtttttccttctttttcatgaccttgacagtgttgggtagtactatacaggtattctgcagaatgtcgcccaatctgggtttgtctgatgattttctcatgattagatcagggttatggatttttagaaagagtatcacaaagaggaagtgtccttctcataacatcctatcatggggtgtataatagccacatgatgtcatggttgatattaaccttcatcacttggttagtgtttgctaggcttctccactgtgaagttactgtttttccctttggaagtaagtcagtaaatctaactaccctcagatgagagagagcaggaattaacttcctcctccaggggatactaaaatatacataacataaaatttacattttaaccatttttaagtgtacagttcatattgttttataaccatcaccaccacccatctctagaactgtttcattgtctccactgaaaccctgcactcataaaacactaagtgtaaagggaattcttacattaaattgtttggcatagcatctggcaatgcagaaggcacacaataagtgtgaactattcataagtcgttttcagtgagactctgtctaaaacaacaaaaaaa

SEQ ID NO: 962 - DNA, 3281 bp, Homo sapiens
aagcagacttttgtgggctcctctttggggtgaccactgctttcaaagccatctgccaaggctctccagggcaggacctgactggtggggaatgagtgttcagaagccttgggagaggccaaagagccattctagcatgatctgagaaaaccttcctgcagaggccagaaaccttgagcttaggtgcctggggaccagcttcgacattctctccagtttctgattctaatttttgccacgtgtcacaacttttccagtctctgagaaggtcccagcctttctcaaatattctgattttgaaaatatgtatccaaagtgggaggcccctgtgacattttgccaacttaaacgagaaaaagaccccccgcacccggcacactcccccttcctccagccccgcttcagccacatgctccagctgctgcccagtaaagccctgtgcctttttttcccctgaatactgcccaaagcatccccttcccatctgcctctcaggagttggggactttgctaggagattttttaagtgttccttactgggacaacgtggagccacgtttgcaggagctccatttgtatccctgctggtgttgacttctgtgtaggggccagttcatgtccctgactctcacctcccattagataaatgaagcccacccccctttctagagtgatgagagtcaagaagaggggatgtatgaacggccaaattcccatgtgagaggaagatgacctgatccacctagccttttcttctggatctgtcctccctcacccctttcacctgagctgtccacagtaggaaacataaagaaacaatgtcccctacatatccccatgactacataatccatcatcgtaggaaataggaaagcaaatttgattttggttttgtaaaacgtacatgcttcaataattcttttttgtgtcttaaatactcataggggaaaaaaacagctcacccaaggtgttaggtttcacatatatattcatcaactattttagaagatttaattctatcaaatcttgtattacctcagatcattttaaatagcaagccaataacgagctttgaaggctattttaccattcctgttcacaaaaggttctcatggtgcctgacaggttacccttgagggcttgtgtctactttttaaaagtcaatggttttttttcttgtgttctagtttccataataggagagaaaatatagaaatatatgcaaaaattatagttttctttagatcagaaactgatatttttgggtcagccatatgtattttgtttaaaggatttaaaataaagtgccgtcatgtagccctgtggaagggagcacataaccagctgtttggcatgacaggtgacttagtatatttgtaattggttttaaaaccaatacaccatactttctttctgcaaacagccatctttatacttagggaagaaaaattgttgggttctagacttttttaatataaattttgttgatatggaattaggtaagtttaagtgtctatgtgcatatgttttttatataagttttttctattcagtttcactgatccaactggcagtgggtaaatatggcataagttaataacacttttccccaaaatggtgctttggatttgaaaagggtctgatggggagaaggagaacgtatcatcctagcttcctctcttaataaacctagaaaaacgggtagtaaactgtggatagtcaggaaaacacccagcaagggacacagctgtcaggaaatgaatcttccccccaacccccaccatgcagatggatagacagaatctttcctgactagtcattaggatcaggggcctctgttggatttgtgtttcttgaagaatagctggcagagtggtataaaagacacgaatatctcctggtctataaggatactctgatttggggtttgcatttttcatggtttttatttcctgttccccctggagttttccattagtgagtttttgtgcaaggatcttatttgtgatgccttccctcccctagaaagattttgtgcaatatattaaatggggacagaattctaaatggataaaacaatggctggttctagccctgagtgacagtcttaaggctagatccttcccatagtatcatctgtcctctggaatgactctcctgtccctaaaggggttaagagagagatcacctagaaatccctctggacacttgtgggttctttagggtttgagtttcttcttccccttgagcttcagagaggagagttggcatggttaaatctgaatggttacctcactgctgaaaacccagaggggcgtggcacactcgcttgtgtggaaaagcctctaaatgcatcccttcctttctttcctgcttcctttgccttacaattgaagcagcccgtggtaccatcacagtatgcagagacttcctcacctttcatatctagggaccacccccgatgcattggtgagggtgggcacttataaatgcctgctattgttaagccattccagcctcttcctctgaatagaccagacgccctttcacttagttcagtgccagtccttttgccttcccaaccctgctgttaggcctgctgttccctttgctcttgattaggagagatggaaggagatgagctcccataactgaattggcctttggttcatgttttctccccatatgtatatatgccatatgtgaatatgccatatatatgtgccaacaaatctatctacgttgttcttttcaaattagcacgcagataggaattttgagtttcttcttcttttagtaactagtataacaagcactggtatttttgtacaaaaaagaaaaacaaaagattgactattgtggtctgcatgacataaacaaacaaatggtgatatcaaagcaacgtataccccagtccagtgtgtgttgccataatttgcaattcagcttaacagtgcacccaatctatatttgcattttgatattatttaagctctatgtacaaggttttgcatgtatttatatggttcttagggaaaaaaaatgctataaactgcaaatctgaaattcaaatgtgttgttccactgagaccagaagaagaagaggagttttaaaagggataatttgttggagccaataaagctttttgctgatgaacagaaaccaatactgctgtgcactgagaataaaaactcatgcccacttgtaaaaaaaaaaaaaaaaaaaaaaaaaaaaaaaaaaaaaaaaaaaaaaaaaaaaaaaaaaaaaaaaaaaaactcga

SEQ ID NO: 963 - DNA, 870 bp, Homo sapiens
  misc_feature (836)..(837): n equals a,t,g, or c
ctatgaccatgattacgccaagcttcgaaattaaccctcattaaagggaacaaaagctggagttccaccgcgttggcggcccgctctagaactagtggatcccccgggctgcaggaattcggcagagccaacctcaggagttgaagaggcttatgcggtgggggcaggaggagaactgctttccctcagctgagggaagaggggctattccagagggactgagtcagtagccaaagactcagcttcccctgtccttccccagtcccttcacttcccctaccctctgacctatctctgaaagccaagttatgcgtatgtgtgtgtgcacaagcttgtctttgtgtggtatgtgtgtgtgagtgtgcatgtatgcacacacacaggggttaaccacccctcacctagggctccagactccagttgtccctctcctcctacctgtgtctccttgttttggggtcctgactgaagaaggtgtccagggggcagagtcagggccaagcactggggtgcctcctctcacctggccagactctgacccacctacctcagctggggtgaggggcacccctcaaactcagtcatgtggttccaaactaccccattccccactccagactctgacccagcctcagtcctaactcctggggctgggctgaggggaacaagcatttgctgaaacttgaaaaaacaaagcaaatcaaaaacaggaaaaaattgtacctggtacttttttttagaaaaaaagattaaaaaagaaagaataaattcttgtttggaaacttgaaaaaaaaaaaaaaaaaaaaaaaacycgagggggggccggkacccaattnncccaaargggrgggtttaaaattmasgggcggg

SEQ ID NO: 964 - DNA, 1735 bp, Homo sapiens; identical to SEQ ID NO: 267

SEQ ID NO: 965 - DNA, 509 bp, Homo sapiens
ggcagagcagacatgcaagtgcatgacctcagcttttttaattcacttgactcttgttttagtacctactgtgaacaagacacaaactctgggctcaaaaatctcatgctctaggtaaggaacacagacatataaagatattatgagactagagcagctttccctgaggaggccagaaaatccttcacaaaacatgaaaaattctgtcttgagggatatatgggaatttgctgggtagagaaagagaggaaatgcattctggtggcatatagtctcaaagcatggaagagtatgctgtttacatactttcgagtttacaaagtgctttcctatatgtcatatgctttaatcattcactagctttgtatgatatcagatcaaaaggagttaagtgattatgcagtcaccggaataataggtatcagactagagtttgaattaatccatttcttccttgatttagtacttatctaaatccaaaaaaaaaaaaaaaaaaaaaaaaaaaaaaa

SEQ ID NO: 966 - DNA, 917 bp, Homo sapiens
gccgtaagatagctaggtcactaatagtctgtggcatggaaaaaaatttgttttgttttaatatggtgctaactaagcatatagagattgactctgtaactttaactccagtaacacactgttatcaccacgcaaattgaccagcctagttagtaacatcatatgcaatatcatacaaactacgtagaaccatgcctggggcactcatctgttagctcttacatgccctttgtgctcaaagagaacaatttgtggttgttgtatgccagtcaattcagtcatcatggagcttagttgtttactgtattgcatgctaagcagtagactctaggaatctaataaatttgattctcacattggtcctgtttgccacaaacattgccatgcctcaagaacctcacaagtttgtttttcttagaacagtgcatatgtagttctcatactctgcaagtgtttgcctcagcataattgtgtttatgtggaattgcactggcattgcaatgtgagaatgacagagttgacaggaccactaacatgtaccctgggaattgtttcccccatccccatagctggctgaagaaactttatttctgagttattatgtagggactgaaaggtttttttttgtttttgtttttgtttttttttacatatatacacagattgttttttacctacaatgagcaaaaataatctggacaaaaaaataatgctctccctgttttttctttcaaatgtatacatatatttgaaatcttaggcatagggaaaaacttttatgtcatcttcagagctacagccatattttttagctagaaccaactcttaaatctctcccgacagaaccttaaggaaggggacaaagtgatctccagtggaaatgtgaaaggcataaaaagaaaaaaaaaaaactcgag

SEQ ID NO: 967 - DNA, 676 bp, Homo sapiens
ggcacgaggcgctcagccccagcctcctcacgtgtacatggctccatggaggttctccagtcggttctgctgctgctgctgttttcgagccttatctcgtctgtgttcctcataagtgtagtcatcagtgggcagctcatggcggcacaagggacaggaatttgtcttgcttagccagggcagaatgcaactggaatgaaaaagatgttgggaagcatctcaatggcagtctcctcctcagattccaaaagatacacggggcacttgagctcagccttgagagcctctgatgactgtcctggagaggttctcaaccacaatcttggcagccggtggaggcaggtggtggtcccaatctactaccaaccccaagtcttcaaagtccatcctattcaaaagtgaccttacgagctccagcaccatgttggttcgagtctcctgcttgagggtccaacggctcacagtcgtgttcatcgatataggacgccatggctgcccagccgtctgacatgtgatattttgatacaggtatacaatgtgtaactatcaaatccgagtaactggggtattgatcaccttgagaatttatcatttctttgtgttaggaacagtccaattccactcttttattttaaaatatgcaataaattattaactgtaaaaaaaaaaaaaaaaa

SEQ ID NO: 968 - DNA, 1232 bp, Homo sapiens
  misc_feature (1204)..(1204): n equals a,t,g, or c
  misc_feature (1229)..(1229): n equals a,t,g, or c
gtgtgtttaatatgatttagtgacaaccaggaaaacttacttgggattattagcactttcaaacttagggacattattaaattggatggaatgcacttctaaatgtttaaattaaaatttcaaagctctttcgagattcaggttctcaataataatattcaagttttagagtttcactttgtactatttaaatttatggaactagtttccatactgacttgtaaggttttggggtcatatataaggactaaagccaagctaggcaaaacaatgacagcaccgttttttcagtgaagctctcagaatgtccagtacagatgttgcagataattccaagaactccttcagcaggtgttcttcaccattcgtaaacagtattttaagatgttcactttgctcttctttttggttacatacattttaataactggtatgttgaagtagtgtctaaaagtatctagtctttattcacagtacattatattgtgtgatgcactggactaactctkgtttaccattcatgtaacaaaacccagcacattatctgcactataagctcaaagaatgtcacatccgcccagacagctctttgatgagggtgatgggaactgaataaaccatacggactggcagtaacaagggcttttactgttctgttcagtggaaccttcttggtcaaattgtaattagctagcattatatttatatacagggtcttttttctttaccgatgtattttcctactcatagccaaccaataaattcagtatctgtttcaaatattttagaagtgtagtttgtatagctgtagtactgaggtttgaggaaaaataaatgttgatcagcagaccacgtatttaaaattctgaatcttctgggacagggttgtaactcagccttccaaagggaagagtgcagggggacggggccatgatatggggaaatggtgtaaactaatgtatttctttattggctgttattctgtataacactcatatctttgccaaagttcaattttatatttaggcaactgatggtccttttgcatttaggattttcgttgttgttaccttatacctcatgatataaggaatgggctcatgtgtcttccgtcttttggaaggaggttgacatattttaaataaatgcttttaaatacagtagcaaaaaaaaaaaaaaaaaaaactcggggggggccccggtncccaattggccctttagggggcggnttc

SEQ ID NO: 969 - DNA, 862 bp, Homo sapiens
ggcacgagttttatttcagtgtttgctcttcactagtatatataaaagttacttgagaaattgaaaatatttctgtaagcagaaatagtatttttttcaaaaagtgtttcagatgcttcagttattccttgcatcatttattgttcttttacagattttaatcccctttgttcttgttatgtgtgcttttgaagcagttcagttgactactcagttatcgtcaaaaaggtaagatgaattagtttaagaaacatttgatttgcctatttttaggagatgagagtaaactttcgaagacatttcatatgattgctattaagacactgtaacatagattgtttattacaaaaatgagaaaattttcacccgtttagtcagtgttgcttgtcattagaggaaattagttgattagggcctctagcagacaaacttgctttctcagcaataaaatgttattagagtattattcaagctagtgaagaacctccctagaaaacagtaaaacataaatgttaaattattgtagttaattacttgttataactgtgcctacaaaaagcaaaagatactctaacttttattttggtttatttcttaaatatgttatataaatatgttaacattatttcattttccatgacttaaaattaacttttctacatgtcaaaaatatactcagtttctctgtcatgatttctgtacatttgacaaatggagtaggaagtattctttctgagttttgaggaatttctggagcagtccgtcttaagcaatcaagactgtggaagaaaagctgtcaactcaactatttgctttttttaaccaataaaattgcctcatcagcaaaaaaaaaaaaaaaaaa

SEQ ID NO: 970 - DNA, 1388 bp, Homo sapiens
  misc_feature (1376)..(1377): n equals a,t,g, or c
  misc_feature (1379)..(1379): n equals a,t,g, or c
  misc_feature (1381)..(1381): n equals a,t,g, or c
ggcgggagctggggaacaggcatggacgtttccgggcaagagaccgactggcggacaccgccttccggcagaagctggtcagtcaaatcgaggatgccatgaggaaagctggtgtggcacaagtaaatccagcaaggatatggagagccatgttttcctgaaggccaagacccgggacgaatacctttctctcgtggccaggctcattatccattttcgagacattcataacaagaaatctcaagcttccgtcagtgatcctatgaatgcactccagagcctgactggcggacctgctgcgggagccgctggaattggcatgcctcctcggggcccgggacagtctctgggcgggatgggtagccttggtgccatgggacagccaatgtctctctcagggcagccgcctcctgggacctcggggatggcccctcacagcatggctgtcgtgtctacggcaactccacagacccagctgcagctccagcaggtggcgctgcagcagcagcagcaacagcagcagttccagcagcagcagcaggcggcgctacagcagcagcagcagcagcagcaacagcagcagttccaggctcagcagagtgccatgcagcagcagttccaagcagtagtgcagcagcagcagcagctccagcagcagcagcagcagcagcagcatctaattaaattgcatcatcaaaatcagcaacagatacagcagcagcaacagcagctgcagcgaatagcacagctgcagctycaacaacagcaacagcagcagcagcagcagcagcagcagcagcagcaggctttgcaggcccagccaccaattcagcagccaccgatgcagcagccacagcctccgccctcccaggctctgccccagcagctgcagcagatgcatcacacacagcaccaccagccgccaccacagccccagcagcctccagttgctcagaaccaaccatcacaactcccgccacagtcgcagacccagcctttggtgtcacaggcgcaagctctccctggacaaatgttgtatacccaaccaccaatttagatcatctttagcggtgaatgagtggattaattttactacaactactgatggtggtggtggaatttcagttgcttttttttgcgaggttaataggtctaaaattttacttttgtttgatgactagtggtttgaatttttcgctgcctgttatattgcttgtatactttgcctgtttgtgtcactgtccttttggattggagtcatactgtttttttttgtttattttaacttatctgtataaaacattgtattcaaaactagttattgktggtcagatttaatacaaatgtttttcctaaaaaaaaaaaaaaaaaaaaannananactcgag

SEQ ID NO: 971 - DNA, 692 bp, Homo sapiens
  misc_feature (13)..(13): n equals a,t,g, or c
  misc_feature (681)..(681): n equals a,t,g, or c
  misc_feature (692)..(692): n equals a,t,g, or c
gctcgtgccggtnctggggtatgtctttattggcagcatgagaacagactaatacaactgcctagaatagtcactgataaacagtaaactgactcaatgaaagtcagccattattagtacaattataaacctgtggcagaatgacttataaatttatactaattttaaaaattaagtaatactagaaaaattagcaaataatagtctgattaagaactgacattcctcgcctcttttcctttctctgccatcatggtgtgtgcttgactttgcttcttgccatgtcttctcacaagactttcaggattaagtgattgctggccaagaaacaaaagcaaaattgtcccattccccagtggattcagatgaaaactggtaataaaatcaggattttattaataaaataaaaccaaaaggagacaatggagaagaaccaagctgggtctataaggaattgcacatgagatggcacacatatttatgctgtctgaaggtcacaatcatgttaccatatcaggctgaaaatgtcaccactatccggagagtttgacatgttttgttgggaatatattttgtctctctgcatctgttatgaacgcattggttggctgggktcagtaataaatatgtgaggcctttcattaaaaaaaaaaaaaaaaaactcgagggggggggcccggnacccaattcgn

SEQ ID NO: 972 - DNA, 2629 bp, Homo sapiens
  misc_feature (2591)..(2591): n equals a,t,g, or c
tgctaccccactaaagggaacaaaagctggagctccaccgcggtggcggccgctctagaactagtggatcccccgggctgcaggaattcggcacgarccccaactcacttggaatgtttttatatgtaatcatttcccttgaagcttatactttataagggaagaaagaattcaggtgatatgggaaaactgcttggcagaccttcatcttctgcctcaactgtaaaccacatgtaaatgcttaatggagactgttttcattcttgtgatatttaacattcagaaaattacttcagctttggaaatactcaggctgtttttattctgcaggtaagtgttttgacttaagtactaatattccagaaatttttgaaagcagtaaccttaatttcctatgtatttcattccacttttgcatataggtcaaatagcaatgtgtatgcacattctctttagttaaggcaccaattgttttggttggttttcctaagacatactttaaaaagatgttctataaatttcctarttaaattatggggattttggagtatgtacatgataaattataatacgtatatggttgaagttattttattttttactaatgaattattttaatattccttattgaataaatgctgtaacttgtttgctatggaacttattcttaaagttctagttaaaaataatttttccacatgcatgaaaatatgtattaatcagaggtggcttaattacattgaaattgcttttttgttgttgtttttttactgaaataactcatgtttgtgtagaagaatgcctgtttactcagagtttatattttccttcagttatattttaaatcaaaaggtctgggtaatgtatacttttgattaatatatactttttttaaaaaacaaaaaacaatgtaatggttaatagtagaaatgtgccacacttttcaagttttatataacatatgaaattcagttaaaagaatgtgtgtttcataatgacttttaactggtaaaaatattacttgcacgaagtacttgatgtatggttatcctgaaatttcggagtatttggtgtgttctttgtctaaaaatagtctgttttgtcagtccttcagaatattatttattctgaagattgtccctcttgcacttggcagtttattttcggggatacattgttgggggagaggggtttctgccactctttccagattgagtctgtgctgtttaaggaggactaccatcctgcaactctttttctaattggggcacagaggatgtcgctaaagaaaagttgaagagccctttcagcactttctcatctgtggagaagatggaatcttaaaatacatttggagttttatctgttttacaagtccattgatggcctaagttcctcctgttttctgctgtttgatctctaaggaactcctgttgctaaatatgaagagtatggaacattcatatagtctctgtgaagcatggggggagggaagacatttctttttcttataggctttatgctcaaatgtcatagtctcctttcaaagaattgtgttgcattttaaatgcacccagcttaagtagaagacattgaaggatgcattaattttcaggaactattttgaattatgaaaagattcccaattgaaaaaattattcaacaagtaaaagctaagaaatttcattgaaatcataaggcagtttaagcataaattgataaaaatagctgtgtactactaattaatagaaaatcattcaaccaagagaagagtcaagtgaatatcgtttgtttatttgctagtgagtttctttgtaacgttgattttattaaatgataatatttggttagtatgtcctatgttaataaaaatgaacaaaattaattttgctatgttcaggtgtcttgataaaataacaatgctccagtgttgttgcttacatttagcactaaattttaacacagggtcagtgagtccaggttttaacttcttcatgcctggatgggataaaatgtaattcattgttaaattaattcatatttgtatttattaatcactgtgacaacattaaccatttgttcttaccaggaagtggtcagattatcatctgagttacagttagactggctaagtttggtattagatcaaggggaatgtccagtaaacagagaggtaagcatgatggaaataatgaagtggggtacacaggaaaaacctgactagtgaggaggagcagctgagagatagggtcagtgaatgcggttcagcctgctacctctcctgtcttcatagaaccattgccttagaattattgtatgacacgttttttgttggttaagctgtaaggttttgttctttgtgaacatgggtattttgaggggagggtggagggagtagggaagtggtccttttacaagaattttgatgcataagtgtctattgtagggtttggatgatctagtaaagtgttttagaacccctttttatcccatgcaccattcagtaaacataaaaatcacaattctgctaatgtcatttggaacttcaaaataaatatcttgtctaaaaacaaaaaaaaaaaaaaaaaccncggggggggccccggwccccatttggccctatgggggg

SEQ ID NO: 973 - DNA, 2017 bp, Homo sapiens
  misc_feature (2015)..(2015): n equals a,t,g, or c
  misc_feature (2017)..(2017): n equals a,t,g, or c
aggtggttcatgtatccagtttatccagtacagttatttgtcaagcttagctttgatttcaaaggacacgcttaccttgtctggcataagaattaatgctcatgtctgcagtggttgggtaggtcctgcttaggagaattaaaaaattcctctttccgtttggttgaatgttgcagtcaggaaccccaactcacttggaatgtttttatatgtaatcatttcccttgaagcttatactttataagggaagaaagaattcaggtgatatgggaaaactgcttggcagaccttcatcttctgcctcaactgtaaaccacatgtaaatgcttaatggagactgttttcattcttgtgatatttaacattcagaaaattacttcagctttggaaatactcaggctgtttttattctgcaggtaagtgttttgacttaagtactaatattccagaaatttttgaaagcagtaaccttaatttcctatgtatttcattccacttttgcatataggtcaaatagcaatgtgtatgcacattctctttagttaaggcaccaattgttttggttggttttcctaagacatactttaaaaagatgttctataaatttcctagttaaattatggggattttggagtatgtacatgataaattataatacgtatatggttgaagttattttattttttactaatgaattattttaatattccttattgaataaatgctgtaacttgtttgctatggaacttattcttaaagttctagttaaaaataatttttccacatgcatgaaaatatgtattaatcagaggtggcttaattacattgaaattgcttttttgttgttgtttttttactgaaataactcatgtttgtgtagaagaatgcctgtttactcagagtttatattttccttcagttatattttaaatcaaaaggtctgggtaatgtatacttttgattaatatatactttttttaaaaaacaaaaaacaatgtaatggttaatagtagaaatgtgccacacttttcaagttttatataacatatgaaattcagttaaaagaatgtgtgtttcataatgacttttaactggtaaaaatattacttgcacgaagtacttgatgtatggttatcctgaaatttcggagtatttggtgtgttctttgtctaaaaatagtctgttttgtcagtccttcagaatattatttattctgaagattgtccctcttgcacttggcagtttattttcggggatacattgttgggggagaggggtttctgccactctttccagattgagtctgtgctgtttaaggaggactaccatcctgcaactctttttctaattggggcacagaggatgtcgctaaagaaaagttgaagagccctttcagcactttctcatctgtggagaagatggaatcttaaaatacatttggagttttatctgttttacaagtccattgatggcctaagttcctcctgttttctgctgtttgatctctaaggaactcctgttgctaaatatgaagagtatggaacattcatatagtctctgtgaagcatggggggagggaagacatttctttttcttataggctttatgctcaaatgtcatagtctcctttcaaagaattgtgttgcattttaaatgcacccagcttaagtagaagacattgaaggatgcattaattttcaggaactattttgaattatgaaaagattcccaattgaaaaaattattcaacaagtaaaagctaagaaatttcattgaaatcataaggcagtttaagcataaattgataaaaatagctgtgtactactaattaatagaaaatcattcaaccaagagaagagtcaagtgaatatcgtttgtttatttgctagtgagtttctttgtaacgttgattttattaaatgataatatttggttagtatgtcctatgttaataaaaatgaacaaaattaaaaaaaaaaaaaaaaactcgagggggggcccggaaaccaaagccncn

SEQ ID NO: 974 - DNA, 1414 bp, Homo sapiens
  misc_feature (1411)..(1411): n equals a,t,g, or c
  misc_feature (1413)..(1414): n equals a,t,g, or c
ttctgtctcaaaaaaaaaaaaaaaaaggtgtgcccaggcccctagccattgccatgtgcccagccagagagccaaattagagggctggcttccctatcacacagaataaatgctagtgctagccaatgatccctttgcttttaatgtatagaaaatactgttgttccttttgtcatttccagtgacatctgttttctaagcagctcttttctagggaggaaaccaaaggggctaggttaagaccctaatagaaatgttttttctaatctctggtgagtctggaagtgtcacattcacagtccacccttgggagtggcttggtggagctggggacaaggttttgtttactacatagtgcacatgataaatggccttaaactgtgattctttctggtaggataagttataataaactgaccctaaagaatgcaatggcttttaaactgcagttactgtgttcttaatgaagcaatacccaaagctctgttcttttggagcacttgaggggagcttgaatgaaaggtgcagataagagcagtaccttgatcttatgctttctgagtgtcctgccttgttgccatctgcatggatgagtgaatgcttctatgcacgaggagactcaagccaactcagagtctgctttttccaacgctcttcccaggtttcttttgcaaagcttggtcatttggcccaggtcttcctggaaagtggagtacatgtcactgactagggtggcgtggtgtctttacccttaacattaagtcttgttacctcagtgatgtgaagccaatggttggaattataaaaagcatccttgctggttcttcacaggacactggaacccaccctgtcaattcagctagcatgtccacacagtcttgatgatccctctctgtaacaggcagctaacattaagagaagggggaaagagaagaagagagcaatagcttatgggagagctgagatcttacttcgttgacccatatttttcccctgaccaagttacctgtaaactggaatttgcaaggggatgctgtgatgataacccctttctattgctgtaatgttcatataacctgggaaactgagagaaggggatgtgtaaataaaagcttaaacattttagtaatgtgttaaaatgtcactctctcttaccctgtttcccttttttgccagatgatgatttttttatttttattttgtactttactggatgactgtgaagcgatgagtattgggttggggtaggtgtgttgattttgagagtgcatgttaagaactgaaggggaactacttgagatgacttaagaagcatcccatgcaaatatcttgttttgccctaataaaatattcagaaagataaaaaaaaaaaaaaaaaaaaaaactcgagggggggcccggtamccaaacngnn

SEQ ID NO: 975 - DNA, 1412 bp, Homo sapiens
ttctgtctcaaaaaaaaaaaaaaaaaggtgtgcccaggcccctagccattgccatgtgcccagccagagagccaaattagagggctggcttccctatcacacagaataaatgctagtgctagccaatgatccctttgcttttaatgtatagaaaatactgttgttccttttgtcatttccagtgacatctgttttctaagcagctcttttctagggaggaaaccaaaggggctaggttaagaccctaatagaaatgttttttctaatctctggtgagtctggaagtgtcacattcacagtccacccttgggagtggcttggtggagctggggacaaggttttgtttactacatagtgcacatgataaatggccttaaactgtgattctttctggtaggataagttataataaactgaccctaaagaatgcaatggcttttaaactgcagttactgtgttcttaatgaagcaatacccaaagctctgttcttttggagcacttgaggggagcttgaatgaaaggtgcagataagagcagtaccttgatcttatgctttctgagtgtcctgccttgttgccatctgcatggatgagtgaatgcttctatgcacgaggagactcaagccaactcagagtctgctttttccaacgctcttcccaggtttcttttgcaaagcttggtcatttggcccaggtcttcctggaaagtggagtacatgtcactgactagggtggcgtggtgtctttacccttaacattaagtcttgttacctcagtgatgtgaagccaatggttggaattataaaaagcatccttgctggttcttcacaggacactggaacccaccctgtcaattcagctagcatgtccacacagtcttgatgatccctctctgtaacaggcagctaacattaagagaagggggaaagagaagaagagagcaatagcttatgggagagctgagatcttacttcgttgacccatatttttcccctgaccaagttacctgtaaactggaatttgcaaggggatgctgtgatgataacccctttctattgctgtaatgttcatataacctgggaaactgagagaaggggatgtgtaaataaaagcttaaacattttagtaatgtgttaaaatgtcactctctcttaccctgtttcccttttttgccagatgatgatttttttatttttattttgtactttactggatgactgtgaagcgatgagtattgggttggggtaggtgtgttgattttgagagtgcatgttaagaactgaaggggaactacttgagatgacttaagaagcatcccatgcaaatatcttgttttgccctaataaaatattcagaaagataaaaaaaaaaaaaaaaaaaaaaactcgagggggggcccggtamccaatkcg

SEQ ID NO: 976 - DNA, 884 bp, Homo sapiens
  misc_feature (77)..(77): n equals a,t,g, or c
  misc_feature (771)..(771): n equals a,t,g, or c
  misc_feature (796)..(796): n equals a,t,g, or c
aggggtttataggcacgagaccctgcacccaacctagagttgccttttttaagcaaagcagtttctagttaatgtancatcttggactttggggcgtcattcttaagcttgttgtgcccggtaaccatggtcctcttgctctgattaacccttccttcaatgggcttcttcacccagacaccaaggtatgagatggccctgccaagtgtcggcctctcctgttaaacaaaaacattctaaagccattgttcttgcttcatggacaagaggcagccagagagagtgccagggtgccctggtctgagctggcatccccatgtcttctgtgtccgagggcagcatggtttctcgtgcagtgctcagacacagcctgccctagtcctaccagctcacagcagcacctgctctccttggcagctatggccatgacaaccccagagaagcagcttcagggaccgagtcagattctgttttgtctacatgcctctgccgggtgccggtattgaggcacccagggagctgttactggcgtggaaataggtgatgctgctacctctgctgctgcactcacagccacacttgatacacgatgacaccttgcttgtttggaaacatctaaacatctagtagatgacttgcaggctgttggctaccagtttcctgtctgaggtgtatatgttaacttcgtgatcagtttgtatgtttgggactcttgtcctatgtaaagttaaggtgggccgggtgcagtggctcacgcctgtaatcctaacnctgggaggccgaggcgggtggatcncctgatggtgaaacctcatctctacttgaaaatacaaaaattagctgagtggtgaaaaaaaaaaaaaaaaaaaaaaaactcgaggggg

SEQ ID NO: 977 - DNA, 875 bp, Homo sapiens
ggaarggttgtaggacttaatcacgtttcagcttggctgtcgggctgtgagtcacggttgcactgcgattatgtaagcacgcaggaataggtggcatgacatatatgctgccagcagccacgggcctcgcccttccgagtcaccactactttttaagccttttttkgratacaagtttcttkgggttcatctttgraatgraaatgraagcatgattgcagaataggcagamcaggaattatccatcaatcagagagamcccagacctttaagagaagctggaattagaatatggaattcctgagccttgagctggcatagccgagccctggtttatgctcttcctgcctccctccttttttccctcctgcctgtgtgctccacttcctctcctgagactcccccaaggtagcatcactcccaccaggagccttaggcaggaaaagtaaggcccagagaagggactgtccctggggacgtgcactgagtgtgtgtgagggtgcggggcaggaataggagtgccaggagtctacctctggagcaatgcctcccacagtatttctgtaggggaaaggatagaaactcacttcttgggttcctccaatcaccatgcacatgtcagtccttcagctatcaatgcaaaggaaacccagaactgagatttgagctttctcaccatctccatggtcagatatctccactgccaaagggttcattccgcctctgggtttatctctttcttcatgcttcttcctggcagtgtcctgttgaagcttaccttcccatctgtgtttgcatccactccctaaaaactacaagacaaaaaaaaaaaaaaaaaactcgagggggggcccggtacccaattcgggctatag

SEQ ID NO: 978 - DNA, 753 bp, Homo sapiens
  misc_feature (706)..(706): n equals a,t,g, or c
  misc_feature (741)..(741): n equals a,t,g, or c
  misc_feature (746)..(746): n equals a,t,g, or c
gaattcggcacgagctcgtgccgaattcggcagacgataccaggtgctgcagaagggattccatgaggtgcgcaaaggccctacttccgctttcaccttggagacggcgactctctgcgtactgattggaacatccgcgaaatgatacgcctctctgcaatgctattggtcgaaatgcatgtcaatctcccagcgtctttatccgtgttccttgactctgggcaacttaaaagccctaatacttttactttcgccacacaaagaggttcttcttagtggagggagagcagatgtagggcatcctaccgagaatttccggaaccacgtgcgagatgatgccagtcatgaacgtctccgcgcttcctttcgctttggaaatatccttaagtagaaaagaaattttctgagctttgcctaaaactagaatctgtgttgaggtttttcaaaattaagtaacgccagagacatactgtgacgtgaggaaacgctcttaaatgaaattttaagatctatttgagaaacatgtactaaaaatgtactgacctcctattaatgccaggcgctatgctgaattctgggccttcacattgtccttccattattagaactgaagcccagattatttgaaacaaaaaataaacttcaataatttattaaaaaaaaaaaaaaaaaamctcgagggggggcccggtacccaattcgcccnaaagggaggcggattaaaattccctgggccggcgntttanaaaggcg

SEQ ID NO: 979 - DNA, 690 bp, Homo sapiens
  misc_feature (352)..(352): n equals a,t,g, or c
  misc_feature (407)..(407): n equals a,t,g, or c
  misc_feature (439)..(439): n equals a,t,g, or c
ggataattctacttcttcccttccagtctggagggctttatttctttttcttgcctaattgtgctggctacaacttccaatacaaaatgagtctctcttttttttctttgtcggtctagctaaaggtttgccaattttcttgatctgtttaaagagccagtttgactttcattgatggtctttatttttctgttgtctattttatttgtctcagcyctggtctttattacttcctttcttctgttagcattggatttagcttgctcttctcttttcaggtttcttgtggtataaaatcagatggttgacttgagctcatttttcttatgtggatgttcacagctatgaattntcctctgagtgctgcttttcctgcatccctgagctgtctcgtgggtttttttgtntcatttatctccacatagtcatttctgctttnccttgtgatttcttctctggcccattggttgttttaaaatatgctgtttaattctcacagatctctagatagtacagggaaaaaaccaccctgtctaaaattgtgctgcaacttttagtgtccaagctgaatgaagggagtccccacttgatcaatgcagtgtggttttgggtggcttgtctctgtcaaggagatcttcattacaatgatgaaaaacaaaaaaaaaaaaaaaaaaaaaaaaaaaactcgag

SEQ ID NO: 980 - DNA, 1512 bp, Homo sapiens
aaaaaatgcaaagaatttgtaggtatgattagtgcattataggtgttttcaaatttctcctatgataaattaaaaatgtaatgttgggcattaatttcctaaacccaatgctcagcaattttctcaaattgtttacagtttttccaagagacttcagaaccattccctggagtgaattatttccaatggtgaagagtaatggatggatggcatgagattctcaaaaaaatcttgctcctatttcagaagtgtcactccagccccttgaaggtccaggaaacctggctgagtagtgtggtctatggaggtgcatgggcttcagaatcaggccaacgttgatcctgagtcccagccagctgcttagtagctgtgggatagttacacaagacacatctacaagaaaagtcatgataaaattgattgcaaaaacagcaatttgaaaaawttcttattgtattcatgtccttggaaatggcttttatagtcgttcctatcaagagacagattctgtttcccaaaccttgaacttctcttgacttatctgcactggcacagggtgccagtttggggcccaggtttaaaggtcctaaatgcttctgttatctttttcagaattcttccatctctatgacaacaagcccattttagctttctggagaatagcatctgagaaaagccaaagtgcctcagtttacagacagctcactcacagaagcagagccacctaattcaccagcatctaaccactcacacctgaaggagccaaactgagcccagaagaatggcccggctgagcccagcctaaatttctaaccagctcaatcctgagctagtatgtttcgggattgttatgcagttataagttagtaatatatacacccattaaagacaggatctcaggacagattgatcacaaataacctgcaaatgcttgccaccctgtaagtattgattttcttttttcctttatttaaagttagatttgttgtaagatgrtattgasttayacagaagtkaggcaggagaatarggtytggagrcagggaacttaakgccaattcgtgctgacttcctacaagaaaaaacaccaaggtctgggagcagggaacctaaagccagttaacgtgaacttcctacatctaaaccaaaaggaaagacctcatctacacccgagtagcaaaggatcgaaggcgactgtcgctacaaccctcccccttgtaccagttctctgatagaaaaggacagtgccttggagtggccgtgggccaagcacaggccatgccttcatctgcatagggtaccaattcgcctcaacctttgattagccaaggaccaaatccttcattcagataaggggtagctgataggaacctcaaaaggagtacttaaaacccagaaaacattgtaaccgggtccttgggcggcttgctggggctcacacccaccctgtagagtgctttctcactttaataaaatcttgcttttgctaaaaaaaaaaaaaaaaaaactcga

SEQ ID NO: 981 - DNA, 2120 bp, Homo sapiens
tgtcccagaaaagacaattgtacagcaaaggaatggacttttcctgaagctaaatggaacaccacagccagagttttcagtcacatccgtcttggcatgggccatgttcttattatagtccagtgttttatttcttcaatggctaatatctataatgaaaagatactgaaggaagggaaccagctcactgaaggcatcttcatacagaacagcaaactctatttctttggcattctgtttaatgggctgactctgggccttcagaggagtaaccgtgatcagattaagaactgtggatttttttatggccacagtgcattttcagtagcccttatttttgtaactgcattccagggcctttcagtggctttcattctgaagttcctggataacatgttccatgtcttgatggcccaggttaccactgtcattatcacaacagtgtctgtcctggtctttgacttcaggccctccctggaatttttcttggaagccccatcagtccttctctctatatttatttataatgccagcaagcctcaagttccggaatacgcacctaggcaagaaaggatccgagatctaagtggcaatctttgggagcgttccagtggggatggagaagaactagaaagacttaccaaacccaagagtgatgagtcagatgaagatactttctaactggtacccacatagtttgcagctctcttgaaccttattttcacattttcagtgtttgtaatatttatcttttcactttgataaaccagaaatgtttctaaatcctaatattctttgcatatatctagctactccctaaatggttccatccaaggcttagagtacccaaaggctaagaaattctaaagaactgatacaggagtaacaatatgaagaattcattaatatctcagtacttgataaatcagaaagttatatgtgcagattattttccttggccttcaagcttccaaaaaacttgtaataatcatgttagctatagcttgtatatacacatagagatcaatttgccaaatattcacaatcatgtagttctagtttacatgccaaagtcttccctttttaacattataaaagctaggttgtctcttgaattttgaggccctagagatagtcattttgcaagtaaagagcaacgggaccctttctaaaaacgttggttgaaggacctaaatacctggccataccatagatttgggatgatgtagtctgtgctaaatattttgctgaagaagcagtttctcagacacaacatctcagaattttaatttttagaaattcatgggaaattggatttttgtaataatcttttgatgttttaaacattggttccctagtcaccatagttaccacttgtattttaagtcatttaaacaagccacggtggggcttttttctcctcagtttgaggagaaaaatcttgatgtcattactcctgaattattacattttggagaataagagggcattttattttattagttactaattcaagctgtgactattgtatatctttccaagagttgaaatgctggcttcagaatcataccagattgtcagtgaagctgatgcctaggaacttttaaagggatcctttcaaaaggatcacttagcaaacacatgttgacttttaactgatgtatgaatattaatactctaaaaatagaaagaccagtaatatataagtcactttacagtgctacttcacacttaaaagtgcatggtatttttcatggtattttgcatgcagccagttaactctcgtagatagagaagtcaggtgatagatgatattaaaaattagcaaacaaaagtgacttgctcagggtcatgcagctgggtgatgatagaagagtgggctttaactggcaggcctgtatgtttacagactaccatactgtaaatatgagctttatggtgtcattctcagaaacttatacatttctgctctcctttctcctaagtttcatgcagatgaatataaggtaatatactattatataattcatttgtgatatccacaataatatgactggcaagaattggtggaaatttgtaattaaaataattattaaacctaaaaaaaaaaaaaaaaaaaa

SEQ ID NO: 982 - DNA, 846 bp, Homo sapiens
  misc_feature (775)..(775): n equals a,t,g, or c
  misc_feature (807)..(807): n equals a,t,g, or c
  misc_feature (821)..(821): n equals a,t,g, or c
  misc_feature (835)..(835): n equals a,t,g, or c
aattcggcagagacttggtttcagggaaggggaaagaggtcaccaagggcagagtccaggccggagccaggggccccactgttgggatgctggctgcagtggggcgccccaagcccaggtcccctctgtcttctctttcgactttgcagctgtacttgttttgctcctctacccgcagagctgacatggacccaaatcctcgggccgccctggagcgccagcagctccgccttcgggagcggcaaaaattcttcgaggacattttacagccagagacagagtttgtctttcctctgtcccatctgcatctcgagtcgcagagaccccccataggtagtatctcatccatggaagtgaatgtggacacactggagcaagtagaacttattgaccttggggacccggatgcagcagatgtgttcttgccttgcgaagatcctccaccaaccccccagtcgtctggggtggacaaccatttggaggagctgagcctgccggtgcctacatcagacaggaccacatctaggacctcctcctcctcctcctccgactcctccaccaacctgcatagcccaaatccaagtgatgatggagcagatacgcccttggcacagtcggatgaagaggaggaaaggggtgatggaggggcagagcctggagcctgcagctagcagtgggcccctgctacagactgaccacgctggctattctccacatgagaccacaggsccagccagagctgtcgggagaagaccagactctttacttgcagtangcaccakaagtgggaaggatggtgggatgggnacctttctaagaantaacccttttctgntttactggtaa

SEQ ID NO: 983 - DNA, 652 bp, Homo sapiens
  misc_feature (1)..(1): n equals a,t,g, or c
naggtaccgyccggaattcccgggtcgacccacgcrtccggtcccgaggagggcgcgcccyctgccacctcggccgagaggactaatgggggtgcggagccgcgcctgggcttttctgacattcacttcaactctcgcaacacgttccaggtgagccgcggtcagagcgcccgcgatcacctgcccccggcggggccgccggtgcccttgcccgccgcggagcagggtcctgcgggggcttcggcccgggctcgacggagtggcggcttcgcggacttcttcaccagaaacctttttccaaaaaggacaaaggaactcaaatcagttgtccatagtgctcctggttggaaattatttggtaaagtccctcctagagagaatcttcagaaaacatccaaaatcattcagcaggaatatgaagcacgaacggggaggacctgtaaaccaccacctcagtcttcaagacgcaagaattttgaatttgagccgctttctaccactgccttgattcttgaggatcgaccatcaaatcttcctgccaaatctgtggaagaagctttacgtcaccgacaagaatacgatgagatggtggctgaggctaaaaaacgagaaattaaggaagcacataaaaaaaaaaaaaaagggcggccgc

SEQ ID NO: 984 - DNA, 2909 bp, Homo sapiens
aattcggcacaggggcagtctggcatgatctttttggaggtaagttgtgcctcactgaaaactaatccccagcccatctttgcctgctttctagccctgtctatcctgaagcgggctcgccgggagcgcccaggccgtgtagcctttgatgggatcaccgtcttctacttcccccgctgccagggcttcaccagtgtgcccagccgtggtggctgtactctgggtatggcccttcgccacagtgcttgccgtcgcttctctttggctgagtttgcgcagkagcaagcccgtgcacggcacgagaagctccgccagcgcttgaaagaggagaagttggagatgctgcagtggaagctttcggcagctggggtaccccaggcagaggcagggctgccacctgtggtggatgccattkatgacgcctctgtggaggargacttggcagtcgctgtggcargtggccggttggaagaagtgagcttcctacagccctacccagcccggcgmcgtcgagctctgctgarggcttcaggtgtgcgaaggatcgatcgggaggagawgcgggagctgcargcactgcgccaatcccgggaggattgtggctgtcactgcgataggatctgcgaccctgagacctgcagctgcakcctggcaggcatcaagtgccagatggaccacacagcattcccctgtggctgctgcagggagggctgtgagaaccccatgggccgtgtggaatttaatcaggcaagagttcagacccatttmatccacacactcacccgcctgcagttggaacaggaggctgagagctttagggagctggaggcccctgcccagggcagcccacccagccctggtgaggaggccctggtccctactttcccactggccaagccccccatgaacaatgagctgggagacaacagctgcagcagcgacatgactgattcttcyacagcatcttcatcagcatcgggcactagtgaggctcctgactgccccacccacccaggcctgcctggccctggcttccagcctggcgttgatgatgacagcctggcacgcatcttgagtttcagtgactctgacttcggtggggaggaggaggaagaggaggaagggagcgtggggaacctggacaacctcagctgcttccatccagctgacatctttggtactagtgaccctggtggcctggccagctggacccacagctattctggctgtagcttcacatcaggcrtcctggatgagaatgccaacctggatgccagctgcttcctaaatggtggccttgaagggtcaagggaaggcagccttcctggcacctcagtgccacccagcatggacgctggccggagtagctcagtggatctcagcttgtcttcttgtgactcctttgagttactccaggctctgccagattatagtctggggcctcactacacatcacagaaggtgtctgacagcctggacaacatcgaggcacctcacttccccctgcctggcctgtctccacctggggatgccagcagttgcttcctggagtccctcatgggcttctccgagccagccgccgaagccctagatccctttattgacagccagtttgaggacactgtcccagcatctctaatggagcctgtgccggtgtgaggaccaggatgtcttttcccagccccaagagacctgttgctgctttcttgtaattatggggctccccagagtctgcgtaacagtctcccactggctggctcacccacaggtgccatgtgcacactcctggttttcaaacaattctctggatttatttatttgttttaacttttctgtgctgaagagaggactagggggagggggcttcccctttcagctgcccggccccccacacccacagcttgctcttctatctccacaacgtgagcctggaagaggagaaaatgtggctcctctggagcttggcagaccacttttcggtctttgcgtgatgttccttagcccaaagacggtgagacagggctgaaatcaggtggcttctgccaccctgagccctagacccatgggtggctaaatccactggactgtgaagactataatttatttccataatttatttggagattgaggaggctttggttgcacttctttggctggtgggtaatgccaggggtggggtgggcacaggccctcaagagccccttttgccttgtagtcctacaccttgccctgcctgggctttggtgcagactaggtgtggatttgagctctgtgatctatgtctgctgcctggctcctagatggctctgcgggcaggtgctggccaaggacatcatctaggcagggggagagcctgggctgaacagctgtgaccaaaactcccttctgccccaccctgccccctccacttcctgccctctgttccatcttcccccttcccaaaggccacagcctttattccaggcccagggatgtaggagggggaaggaggaaacaggaagcccagagagggcaaagggcctacctcggggcgcgaaccatgccccagactattatctcagggctttctgggcactgcacttcagcgtggcccacctgcccatgccctgaggccagttggcgaggggtggctcctgagggtttttataccctttgtttgctaatgtttaattttgcatcataatttctacattgtccctgagtgtcagaactataatttattccatttctctctgtgtctgtgccaagaaacgcaggctctgggcctgccccttgcccaggaggccttgccagcctgtgtgcttgtgggaacaccttgtacctgagcttacaggtaccaataaagaggctttatttttaaaaaaaaaaaaaaaaamaamaaaaaaaaaaaaaaaaaaaagggcggccgc

SEQ ID NO: 985 - DNA, 2918 bp, Homo sapiens
  misc_feature (2910)..(2910): n equals a,t,g, or c
aattcggcacaggggcagtctggcatgatctttttggaggtaagttgtgcctcactgaaaactaatccccagcccatctttgcctgctttctagccctgtctatcctgaagcgggctcgccgggagcgcccaggccgtgtagcctttgatgggatcaccgtcttctacttcccccgctgccagggcttcaccagtgtgcccagccgtggtggctgtactctgggtatggcccttcgccacagtgcttgccgtcgcttctctttggctgagtttgcgcagkagcaagcccgtgcacggcacgagaagctccgccagcgcttgaaagaggagaagttggagatgctgcagtggaagctttcggcagctggggtaccccaggcagaggcagggctgccacctgtggtggatgccattkatgacgcctctgtggaggargacttggcagtcgctgtggcargtggccggttggaagaagtgagcttcctacagccctacccagcccggcgmcgtcgagctctgctgarggcttcaggtgtgcgaaggatcgatcgggaggagawgcgggagctgcargcactgcgccaatcccgggaggattgtggctgtcactgcgataggatctgcgaccctgagacctgcagctgcakcctggcaggcatcaagtgccagatggaccacacagcattcccctgtggctgctgcagggagggctgtgagaaccccatgggccgtgtggaatttaatcaggcaagagttcagacccatttmatccacacactcacccgcctgcagttggaacaggaggctgagagctttagggagctggaggcccctgcccagggcagcccacccagccctggtgaggaggccctggtccctactttcccactggccaagccccccatgaacaatgagctgggagacaacagctgcagcagcgacatgactgattcttcyacagcatcttcatcagcatcgggcactagtgaggctcctgactgccccacccacccaggcctgcctggccctggcttccagcctggcgttgatgatgacagcctggcacgcatcttgagtttcagtgactctgacttcggtggggaggaggaggaagaggaggaagggagcgtggggaacctggacaacctcagctgcttccatccagctgacatctttggtactagtgaccctggtggcctggccagctggacccacagctattctggctgtagcttcacatcaggcrtcctggatgagaatgccaacctggatgccagctgcttcctaaatggtggccttgaagggtcaagggaaggcagccttcctggcacctcagtgccacccagcatggacgctggccggagtagctcagtggatctcagcttgtcttcttgtgactcctttgagttactccaggctctgccagattatagtctggggcctcactacacatcacagaaggtgtctgacagcctggacaacatcgaggcacctcacttccccctgcctggcctgtctccacctggggatgccagcagttgcttcctggagtccctcatgggcttctccgagccagccgccgaagccctagatccctttattgacagccagtttgaggacactgtcccagcatctctaatggagcctgtgccggtgtgaggaccaggatgtcttttcccagccccaagagacctgttgctgctttcttgtaattatggggctccccagagtctgcgtaacagtctcccactggctggctcacccacaggtgccatgtgcacactcctggttttcaaacaattctctggatttatttatttgttttaacttttctgtgctgaagagaggactagggggagggggcttcccctttcagctgcccggccccccacacccacagcttgctcttctatctccacaacgtgagcctggaagaggagaaaatgtggctcctctggagcttggcagaccacttttcggtctttgcgtgatgttccttagcccaaagacggtgagacagggctgaaatcaggtggcttctgccaccctgagccctagacccatgggtggctaaatccactggactgtgaagactataatttatttccataatttatttggagattgaggaggctttggttgcacttctttggctggtgggtaatgccaggggtggggtgggcacaggccctcaagagccccttttgccttgtagtcctacaccttgccctgcctgggctttggtgcagactaggtgtggatttgagctctgtgatctatgtctgctgcctggctcctagatggctctgcgggcaggtgctggccaaggacatcatctaggcagggggagagcctgggctgaacagctgtgaccaaaactcccttctgccccaccctgccccctccacttcctgccctctgttccatcttcccccttcccaaaggccacagcctttattccaggcccagggatgtaggagggggaaggaggaaacaggaagcccagagagggcaaagggcctacctcggggcgcgaaccatgccccagactattatctcagggctttctgggcactgcacttcagcgtggcccacctgcccatgccctgaggccagttggcgaggggtggctcctgagggtttttataccctttgtttgctaatgtttaattttgcatcataatttctacattgtccctgagtgtcagaactataatttattccatttctctctgtgtctgtgccaagaaacgcaggctctgggcctgccccttgcccaggaggccttgccagcctgtgtgcttgtgggaacaccttgtacctgagcttacaggtaccaataaagaggctttatttttaaaaaaaaaaaaaaaaacttcgggggggggggcccggtaacccaatttgggncctttaag

SEQ ID NO: 986 - DNA, 2918 bp, Homo sapiens
  misc_feature (2910)..(2910): n equals a,t,g, or c
aattcggcacaggggcagtctggcatgatctttttggaggtaagttgtgcctcactgaaaactaatccccagcccatctttgcctgctttctagccctgtctatcctgaagcgggctcgccgggagcgcccaggccgtgtagcctttgatgggatcaccgtcttctacttcccccgctgccagggcttcaccagtgtgcccagccgtggtggctgtactctgggtatggcccttcgccacagtgcttgccgtcgcttctctttggctgagtttgcgcaggagcaagcccgtgcacggcacgagaagctccgccagcgcttgaaagaggagaagttggagatgctgcagtggaagctttcggcagctggggtaccccaggcagaggcagggctgccacctgtggtggatgccattkatgacgcctctgtggaggargacttggcagtcgctgtggcargtggccggttggaagaagtgagcttcctacagccctacccagcccggcgmcgtcgagctctgctgarggcttcaggtgtgcgaaggatcgatcgggaggagawgcgggagctgcargcactgcgccaatcccgggaggattgtggctgtcactgcgataggatctgcgaccctgagacctgcagctgcakcctggcaggcatcaagtgccagatggaccacacagcattcccctgtggctgctgcagggagggctgtgagaaccccatgggccgtgtggaatttaatcaggcaagagttcagacccatttmatccacacactcacccgcctgcagttggaacaggaggctgagagctttagggagctggaggcccctgcccagggcagcccacccagccctggtgaggaggccctggtccctactttcccactggccaagccccccatgaacaatgagctgggagacaacagctgcagcagcgacatgactgattcttcyacagcatcttcatcagcatcgggcactagtgaggctcctgactgccccacccacccaggcctgcctggccctggcttccagcctggcgttgatgatgacagcctggcacgcatcttgagtttcagtgactctgacttcggtggggaggaggaggaagaggaggaagggagcgtggggaacctggacaacctcagctgcttccatccagctgacatctttggtactagtgaccctggtggcctggccagctggacccacagctattctggctgtagcttcacatcaggcrtcctggatgagaatgccaacctggatgccagctgcttcctaaatggtggccttgaagggtcaagggaaggcagccttcctggcacctcagtgccacccagcatggacgctggccggagtagctcagtggatctcagcttgtcttcttgtgactcctttgagttactccaggctctgccagattatagtctggggcctcactacacatcacagaaggtgtctgacagcctggacaacatcgaggcacctcacttccccctgcctggcctgtctccacctggggatgccagcagttgcttcctggagtccctcatgggcttctccgagccagccgccgaagccctagatccctttattgacagccagtttgaggacactgtcccagcatctctaatggagcctgtgccggtgtgaggaccaggatgtcttttcccagccccaagagacctgttgctgctttcttgtaattatggggctccccagagtctgcgtaacagtctcccactggctggctcacccacaggtgccatgtgcacactcctggttttcaaacaattctctggatttatttatttgttttaacttttctgtgctgaagagaggactagggggagggggcttcccctttcagctgcccggccccccacacccacagcttgctcttctatctccacaacgtgagcctggaagaggagaaaatgtggctcctctggagcttggcagaccacttttcggtctttgcgtgatgttccttagcccaaagacggtgagacagggctgaaatcaggtggcttctgccaccctgagccctagacccatgggtggctaaatccactggactgtgaagactataatttatttccataatttatttggagattgaggaggctttggttgcacttctttggctggtgggtaatgccaggggtggggtgggcacaggccctcaagagccccttttgccttgtagtcctacaccttgccctgcctgggctttggtgcagactaggtgtggatttgagctctgtgatctatgtctgctgcctggctcctagatggctctgcgggcaggtgctggccaaggacatcatctaggcagggggagagcctgggctgaacagctgtgaccaaaactcccttctgccccaccctgccccctccacttcctgccctctgttccatcttcccccttcccaaaggccacagcctttattccaggcccagggatgtaggagggggaaggaggaaacaggaagcccagagagggcaaagggcctacctcggggcgcgaaccatgccccagactattatctcagggctttctgggcactgcacttcagcgtggcccacctgcccatgccctgaggccagttggcgaggggtggctcctgagggtttttataccctttgtttgctaatgtttaattttgcatcataatttctacattgtccctgagtgtcagaactataatttattccatttctctctgtgtctgtgccaagaaacgcaggctctgggcctgccccttgcccaggaggccttgccagcctgtgtgcttgtgggaacaccttgtacctgagcttacaggtaccaataaagaggctttatttttaaaaaaaaaaaaaaaaacttcgggggggggggcccggtaacccaatttgggncctttaag

SEQ ID NO: 987 - DNA, 1891 bp, Homo sapiens
ccacgcgtccggtcctgggagactctgagcatcccctttgtgaggaaggtggtgtgctacgtgaacatgaacctcatggatgcctccgtgcctcccctggcccttgggctgctggagagtgtgaccttgagcagcccagccctgggccagctggtcaagagcgaggtgcccctggataggctgctggtgcacctacaggtgatgaaccagcagctgcaaaccaaggccatggccctgctgacagccttgctgcagggggccagccctgtggaacgcaagcacatgcttgactatctttggcagaggaaccttcgccagttcatctataagaacatcatccacagtgcagcaccaatgggcgacgagatggctcatcacctgtacgtactgcaggctctcatgctggggctgctggagccgcgcatgcggacgcccctggacccctacagccaggagcagcgggagcagctgcaggtcctacgccaggctgccttcgaggtggagggggagtcctcgggtgccgggctaagtgctgaccgtcgccgttccctctgtgcccgagagttccgcaaactgggcttttctaacagcaacccagcacaggacctggagcgcgtgccccccggtctgctggccctggacaacatgttgtacttctccagaaacgcgcccagcgcgtacagccggtttgtgttggagaacagcagccgcgaggacaagcacgagtgcccctttgcccggggcagcatccagctgacggtgctgctgtgtgagctgctccgtgttggggagccctgctctgagacagcccaggacttctcacccatgttcttcggccaagaccagagcttccacgagctcttctgtgtgggcatccagctgttgaataagacctggaaggagatgcgggctacacaggaggacttcgacaaggtcatgcaggtggtgcgggagcagctggcccgcactctggccctgaagcccacttccctggagctcttccgaaccaaggtgaatgcgctcacttatggggaggtgctgcggctgcggcagactgaacggctgcaccaggagggcacactggctccccctatactggagctgcgggagaagctgaagccagagctcatgggcctgatccgccagcagcgcttgctccgcctctgtgaggggacgctcttccgcaagatcagcagccggcggcgccaggataagctgtggttctgctgcctgtcccccaaccacaagctgctgcagtacggagacatggaggagggcgccagcccgcctaccctggagagtctgcccgagcaactccctgtggccgacatgagggcactcctgacaggcaaggactgcccccatgtccgggagaagggctccgggaagcagaacaaggacctctatgagttggccttctcaatcagctatgaccgtggggaggaggaagcgtacctcaacttcattgccccctccaagcgggagttctacctgtggacagatgggctcagtgccttgctgggcagtcccatgggcagcgagcagacacggctggacctggagcagctgctgaccatggagaccaagctgcgtctgctggagctggagaacgtgcccatccccgagcggccaccccctgtgcccccaccccccaccaacttcaacttctgctatgactgcagcatcgctgaaccttgacagtgtggctggccatgggccacagctgcggcactgcagcagccatgaagggcagtgggtagaggagtgcaggcaccctgaccagcagagattgctgcagaaataaagtctgcttggctcttgggaaaaaaaaaaaaaaaaaaaaaaaaaaaaaaaaaaaaaaaaaaaaaaaaaaaaaaaaaaaaaaaaaaaa

SEQ ID NO: 988 - DNA, 1487 bp, Homo sapiens
  misc_feature (432)..(432): n equals a,t,g, or c
  misc_feature (1024)..(1024): n equals a,t,g, or c
gaattcccagtcgctacttcctaaaatcaattttgaagtttaatcgatatcatttgaggtccctgcggcttttaatttgttattcatagcagccaattctttctcctgctgcttcttgagatacctttgcgccgtagcagtcacaatttgaatgaagaagttaatgagcattaatagtactacagtgttccaaactgaagctaatgagagatcccactttttcacctgataagaatgaaggttttacgaaaaatcattgacaaaaataaggtattgtaaaaatgaacctcacaaggttgcctcgtcaaatgaagatacctttatattggaggtcacatgagatggggttgtcatatacttgtcttttatggcatgcaatttggcaacaaggttggggaggatagatcaaaacccaggtatgaagctgagaanccaaatcaactcattctctatccagttaagtagttgattattgcagactgatatgatgaaaattgtctgcaaaagataattaatataatcaagaaaacttccttaatcttacagatcaaggtttaatttgccaagactccaactcctatagcttcataatgatgtttttgtgatcagagaaattaattgcatttatattgcgtttagaaggattaaacaaacttttgaaatgtagtaaaaaggttaaaaaaaagcaaagcactcaatatacccagcaaaataaatcaagaaataactccaaacgacatcagtagtccaaatcgtgtggaaaaagaccttcacaaacctgtatgtgagttttaataattgcttttccaaccatcgtagccagaaaaaacttccagaaaggaattccaaattgtccacacataatgccagcaaggtcgaatagaggatttggcacctacaaaagttattcgagttaatccacaaaatacttgccgataaactgttagacacacatattagtgaaccagggctctataaattattccatgtgtcgatatatagacgcgagaatatattttcttgnatcactctgccaaattgacacattgacaggtattttatgaagcagcattgktagataacaggtgtgtgtgagaaaaaatcaaatttagtgcaaaaaagaagaatcaaactaaccgaagcaagcaccaacacagtaaagaagttcaaatactgtgcatgtgaaaggaaccagcgcttaaattgattcagacgggtagctatccacccatcatcttctgaagaagaagcgctcaattcttccactgtatctagttttccacctgataagcttgctgcatgaaattattaattatgtgtttaattacctttggcaacttaaaaaacagaattaaaaaactttgaccaaattcaagattgatagtcttagcatgtatggtttatgacctttcaaagattatacaaaccgcgaatcgtagaaaacctatatcagatcaactacaagttacaaaagcaagcagctcgag

SEQ ID NO: 989 - DNA, 262 bp, Homo sapiens
cggcacgagaaaagatcaagtccaagccattaaatgtaacatctaacagtctccatgacctggcctctttaatttgtaaccttccaccctttactttgaacttttctgccaagagcactgagcttcctttatgtttttgcccatagttgggagccccctatctggaatatgctcttacccctttgctggtctagctcctactctatttttattttctgggcaacagagcgagactcttgtctcgaaaaaaaaaaaaaaaaaa

SEQ ID NO: 990 - DNA, 773 bp, Homo sapiens
  misc_feature (38)..(38): n equals a,t,g, or c
  misc_feature (769)..(769): n equals a,t,g, or c
accaaaatcaaggggattttccaaaatgtcgtaacaantccgccccattgacgcaaatgggcggtaggcgtgtacggtgggaggtctatataagcagagctggtttagtgaaccgtcagatccgctagccgcaattactgtgagttagctcactcattaggcaccccaggctttacactttatacttccggctcgtatattgtgtggaattgtgagcggataacaatttcacacaggaaacagctatgaccttgattacgccaagctcgaaattaaccctcactaaagggaacaaaagctggagtcgcgcgcctgcaggtcgacactagtggatccaaagaattcggcacgagcgttaccggatctgcgtggggctggtggtggttggtgtcctgctcatcatcctgattgtgctgctggtcgtctttctccctcagagcagtgacagcagtagtgccccacggacccaggatgcaggcattgcctcagggcctgggaactgacccagctggtcctgaaggagaagccaaatggctgcactggccgattctggtctccagaggaccttggtgtttgctctcccttgacccaccccagtgagtgccaaagggcagccccaacatgtgcacccctgcatttcctgtcatgccacagactggcccttgagggcagcctgctgtactggccatgctggccagccccacctggagctcagtaaaaactgctgtttgattaaaaaaaaaaaaaaaaaactggagggggggcccgnaacc

SEQ ID NO: 991 - DNA, 218 bp, Homo sapiens
ggcacgaggatagaggtattttctgtggccctgggagctgtctgtctttcccctacccccaaggatgccaggaagacgtccaccattagccatgtggcaacctttacttctatgcctcacaagtgcctttcagagagccccaattctgctttcccacaaaataaacctaatgccatcaggcaaaaaaaaaaaaaaaaaaaaaaaaaaaaaaaaaaaaa

SEQ ID NO: 992 - DNA, 488 bp, Homo sapiens
ggcacgagcaggtctaatcatgcctctccctgcctaaaaccttcccctggctcctattctggaagagtgtcgtagggcagcatgtaaaacgccacacatgccccgcccagcctgccttttaatcttcatctctggccacactcttctagcactgcctgtctgcccagctcccgcccatgcccccccgccccgcgcagcttctgtcctgtaaccatcttccccacaatatgccatcattccccctgttaatagctctgcccttgcccactgtcctatcctggaatgactttccctcatccttctttcttctaatgacctcctattcatccctcaaaacccagtgcaaaggatcccatgatctcctgcctccaggcaaaatgactcaccttcctcctcaggccaccccagctcccactattggcgatcccatcatcctttgctaacacaccacctcctggatcacctgggcaacaaaagcggaaatccgt

SEQ ID NO: 993 - DNA, 1269 bp, Homo sapiens
gaggattctttaacaaaatagggacaatgacaaggttactggtagcccttttattctcctcatttttaaagctgagagaggtggaatccattagtaagataaaaaacaaaatgtcaaaaagacaagacttaagaacaggttgggcatgctccaacatgacagcatgcacactttggggaaaaatttattggtctagccaggtgtgagcctccattccttaatgtgccagctggactccccttaccaaatcttggccccaagagtttgtttccagtcagtgggctttgctatactgacagacatgttccatacaggagcttctgatgggcaaacagtgggtgatacagtcacactcactaccttctacctcctgtcttctctcaatgccagtgacctaccaccatgctgcccagaaccttcccatcaggcaaataaaaacctgcatatttgtcacacactttgggtctatatagaccattaacaaagtgatgaaaacatctggtgctaaatgacagcatgatgtggcatctcttgcctggcccagccaaggatcagagagtgaacaggacttggtaaatagcttctctcatctttctctctctgccctaagcaagtaaaactaaaaaccacaacaataaataaactcataacaccctcagtttcttcctcttttttttttttaccatctgatagatgtcaggacagatgttgtccacaacacacttgccaacaaccatttcagtgcttcctgacatatgtttaagaaagatggctgctgtataacggattttacttaaatgccgataagcaaccttccataacattgttcagcgaagataaaagataatgccacttctgtccattctggtgcccatgtcaacatgatcactaattcaaatttttagggatcaaaaaagtcaacaccaagcttatataaatagcttttaccatctggttgctcaccttgactgtaggaagcagagtcctatcaattcttttctactaggaaaaaggtgtctcatcatagagaggaaggggaggaataataaaagaaaaacaatttgtaatagcatgctatcccttttttcctgttgacaggaaatcaagttctcagcttgttaattaagttaaaaatacagaagtttcctggttattctctcatcagtttcagagtgttcatgactttgaagtaggtctcaccggtgagtgcttaaacattgaactaatgagattttactgttttgaacagctggtcaagtttggaggccc

SEQ ID NO: 994 - DNA, 858 bp, Homo sapiens
  misc_feature (848)..(849): n equals a,t,g, or c
gggacaatttactttgttttgctaagtttacatgtccaatcggtgacagggccagaaagagaatctaggcctgcttcccagcaacagtgtagatgtgaaggtaaggtgaaccacctgtgtcccttgaattgcatgcttatccattgtctataaggcagctttatctggcagtgaaattatgtgtcatttctggtgggtggctgggcctgccatagcaaattaccacaaacagaaatgtattctcttatataattctggaggcaaagtctgaaatcaaagcatcagcagggccatgctctctctgaaggctttagagaagtatccttccttgcttcttcctagtttctggtggttgccagcaatccttggcattcctggacttgcagatgcatcactgcaatctctgccttagtatccacatgaaatttttcctgtgtgtctgtctgtgtccagattgtctycttttwatgggggccattcattggattagggycttccctaatgcagtatggcctcaccttaatgtgattacatctacaaaaatactgtttcaggccgggcctggtggctgaagcctgtaatccmagcgctttgggaggctgagacgggcggatcacgagatcaagagatcgagaccatcctggtcaacatggtgaaaccccgtctctagtaaacatacaaaaatcagctgggcgtggtggcacatgcctgtagtctcagctacttgggaggctgaggcatgagaatcgcttgaacccgggggcagaggttgcagtgagccgagatcgcaccattgctctctagcctggcgacagagcaagactgcgtctcaaaaaaaaaaaaaaaannaaaaactcg

SEQ ID NO: 995 - DNA, 1107 bp, Homo sapiens
gcacggagtcacccacatacaaagcagcttgggacagcacctcggctgccccaccagagaactctctcaggattaccatgacccaagagcgccaagccctggcatggctcttctctacacttaaggcagaacggccttgaataaggtctctctcagcctcggtttacccacgaagacacctaagccccaggcttgctgagcagatgacgcgatggaaagcatgtgaacctgaaggagccgcgccgtaccggcttctcggaggccctggcctgtgctgcctctcagtcctggaggtcgcccgcccactcctacctccatggggttgacggtgatggtcagggcagagtcgtcccagtccatctcgttctccttcccggtgtcctgatcccgcatggtccgccgatgtgcggcccggatccgaaatacccccaggataatcatgaacaccaggaagctgacgcacaccacgatcacaactgtcgcagtgctggggacgactgtggragaatgagggggcgggatgcgaggtcactcggcccagaaggccactgtgcccttgacctcctcggctgtgcctggtcaaaacgggctggacagcacgcttcagctgaacccacaggccaggaggaaataccaggaaaagctcgccatgggcctccaacctggctcggccacgtcctgctccatagctgcgggtgacatcatctgccctcttcgagggctttagtttccttgtgtgtgatggggaataattgggacagggaaagaccggcggtcatgctgagcaggaggctgtgcccacggtggggtgggggcagggcggacggcatggagcatctccgcttggtctccctccccatgtcctacctgcgaacgggtgggggttggccaggttgtggcctgacaggtcaacaaaggagcggtgttccgggtgcacgaactgtggctgggcagccatgtggttggcgtgttccatggggttggccgtgtggattacattcacctatagcagagaaagagaggatcgctggagacaggcatcctgagcctgtccaagaggtgacagtggagtcccgctgctggcatgaccagtgccactcagagtgg

SEQ ID NO: 996 - DNA, 1114 bp, Homo sapiens
  misc_feature (850)..(850): n equals a,t,g, or c
  misc_feature (866)..(866): n equals a,t,g, or c
  misc_feature (1076)..(1076): n equals a,t,g, or c
gcggacgcgtgggcggacgcgtgggcggacgcgtggctaaacatcatcctgatttgatcttttgccgcaagcaggctggtgttgccatcggaagactgtgtgaaaaatgtgatggcaagtgtgtgatttgtgactcctatgtgcgtccctgcactctggtgcgcatatgtgatgagtgtaactatggatcttaccaggggcgctgtgtgatctgtggaggacctggggtctctgatgcctattattgtaaggagtgcaccatccaggagaaggacagagatggctgcccaaagattgtcaatctggggagctctaagacagacctcttctatgaacgcaaaaaatacggcttcaagaagaggtgattggtgggtggccccttcctccccccaacatcagtctgctgcagctgccagaaaacatgcctactactaccagcagaaagggagcagagcccagagcatcaccaggagtgcctgctagtgtactggcagcttgccaccccctcctctcccttcacccagacacgtggtagggatggaaaaggattcttcacagagcactctggcacaccatatcggagaaaacttgatagattagttaatggtttttcttgaattcgagaagcatagatctgttctccatattggtatgttctccctcaaccaagatcttctaaaaagaaataatattttagtcttctgcttgaggaactgactgtgaagcgacgcccagtgaaaaacatgttcttgcagcagctctggtggcagctgtccttgaggaacctttggtgtgtggtgggaagctatcagaacaagaaatgtaggcatttcccgtttttttggggggngrgggtgggggggcangctctgccctcttgaaaggcatttacttgtttaacacttgtccagctacagtggggtacagtagctggctattcacaggcatcatcatagcccactagtctcatattattttccttttgagaaattggaaactctttctgttgctattatattaataaagttggtgtttattttctggtaaaaaaaaaaaaaaaaaaaaaaaactcgggngtacttctagaagcggccgagggcccatcggttttcca

SEQ ID NO: 997 - DNA, 371 bp, Homo sapiens
attcggcacgagtgaaaatggaaaagcaaaaaaaagttaatctgtattgtgttgaagtacagtttctgcctccttccaaaccaggttcaaatgcgtttcccccctgtttgttaatgtcctgctcatcccacagcttggggtcatcttagaccttttactctccctttctcccaactcctgtcaggtgtagcccccatcccctcctagttgtattgcttggttgtctccatggcatgctttcttgcagtggtgatgtgggtcttcctgcctgtggggtcttgcccactctagttcatgtagtttaagctgcaagaaaaagatcttcctaagtgacagtctgagcctgtcacttaaaaaaaaaaaaaaaaaaa

SEQ ID NO: 998 - DNA, 360 bp, Homo sapiens
  misc_feature (24)..(25): n equals a,t,g, or c
  misc_feature (29)..(29): n equals a,t,g, or c
gacagtcgacatggtgggtccaannattnggcagagtgccatyccagcaattgggcactgggatcatttgcaaggtcttcagggaagtttgcctttgcacagtttaggaaagattctgttaattaggtgaatggtataattgatacgacaagaggattgtttaacttaagggaagcaatttattatgcatgcatgagaagcttctaggtatttactgaccaattgcatgcccattacatatcctttttgtattttagagataataatcatcttatattgtttacctcctagcccagtttttggcacacttgaaagtactacaaattgtctttatgaaaaaaaaaaaaaaaaaaactcgag

SEQ ID NO: 999 - DNA, 505 bp, Homo sapiens
cggcacgagctgacacatgggacaaatgtgtcggagctggccactctctacagggagaaacgcagctcggtttctccccagcttccagaacacccggcagcgcctgctctgccatcttcattacctcaacctccagaaactggggtgcccagggcccaaacccaacgtgtctttcctctcattgatcgcattcagtctcatggctttaaacacaatatcacaccaaatttacctcccgcctgggcctctgccctgtccttgggcctcctgcattttactgcccacctgcacctatgtttggacataaaagaaactcccagcgccacctgtaatgcggcactccgtagatcctccaagtcggctctgtctactgcaactctgcccatctcagctgagggcagtgccactgtccagtggtcaaaagccctggagtgcccctgactcctgtctttctctcacaccctgtgtctgactcactggcaaattatattggctctacctcgag

SEQ ID NO: 1000 - DNA, 499 bp, Homo sapiens
  misc_feature (15)..(15): n equals a,t,g, or c
  misc_feature (19)..(19): n equals a,t,g, or c
  misc_feature (22)..(22): n equals a,t,g, or c
  misc_feature (488)..(488): n equals a,t,g, or c
  misc_feature (498)..(498): n equals a,t,g, or c
aaaaaaaaaaaattngtgncantaactaaaccacctctctctgttctcttctggggggtggggtgggtgtgtgtgtgggggtgggtagggatggggaacccaagccccagtaggagttggggctgagatcaggaggaggggaaggatatgagttttccatccatctccctggagaaggccatgacgggctctccaagccctggggagatctggcgagggactagccaagtcagggtgacctcttgacctgactagtttttctaacccacatgaacaccagggtgcctctctcttcctctagcccagggtagggggacctgagtgagagagagagtgagacagacagcaagattgagacacgcgggcccccactggtctctgagtgggaaaggcaagtgcgagagataaaggcctccaaaaaaaaaaawaaaaacttsgrgrgtayttctaagagcgggccgcgagcccatcgattttccacccgggtngggttaccana

SEQ ID NO: 1001 - DNA, 1545 bp, Homo sapiens
  misc_feature (556)..(556): n equals a,t,g, or c
  misc_feature (593)..(593): n equals a,t,g, or c
ggcacgagctaactccagcacctacatggtatgcctagtttatggcaggtgttcaataattaaaatgattatcttgaatacaataaaagtcctaatcctttttgtttttgtttttatgatgtgtgataatattcttggtattactcaaaaagagttgtacttttttaaaaaattcactttttaagttagtataaagaatattcagtccagtttagaaatgaacagtagaaaagtaagaaagagctagcacttgtggaatggggtcactctgttctggggtgccccagagaatcccatggaatgcctttcccaacctccttaatggaggtagcttctgttataaccccattttacaataagaaaactaagcaacagaagttgaacagtgtatccaaggtcagaatgaataattgagccagtatttgaatccaaactgtctggccccagagctagtgttccatatatcttttatttttctgtaactttacgcttggagaatagttgtaagaatagtaacgtgatgtctcatatgttctttcctccatttcactatatntatattttggctcacttgctttatcactctatgggtnttttgttgttgttgttgttgttagttttttccttgaaccatgtgaaaacaagttacagacatggtgctgcttataaacatttcagtgtgtgtataagaccaaagatatcatcttatgtgatcagagtataattatcaaaatcaggaaatctaatactgaagaaatgctcttatccgcagtctaaattatttcataccagtaatgttccgtatcgctgttgcttcctgatctttcccttccccagcctccagtccagaattcatcctgcatcacacagtgcatccagttgtcaggcccatcttggcgagacggggtctccctctgtcgccaggctggagttcagaagttctgcttctgtggtccaggctctacctcctggctccagcggtcctcccaactcaacctcctcaataactggccccacgggtacgtgactccacacctggctaatttttgaatttttttgtagagacagggtcttgctatgttacacaggctggcaggcccatcttcttaactgagagaccagtttatgctttcctctagggccatcatatacaaagtccagaaatttagtgtgtgtaaaggtagcttttaagtcaagcaataagatgaaattgtcagtaaatgttactgggatcggccgggcgcggtggcttatgcctgtaatcacaacactttgggaggccagtgtgcgcagatcacctgaggtcaggaatttgagaccagcctagccaacatggtgaaaccctgactctactaaaaaaaaaaaaatacaaaaattagctgggcttggtagcaggcgcctgtaatcccagctacgcgggaggctgaagcaggagaatcgcttgaacccggaggcagaggttgcagtgagccaagatcgtgccattgcactccagcttgggggagaagagcgagactttgtctcaaaaaaaaaaaaaaaaaaaaa

SEQ ID NO: 1002 - DNA, 552 bp, Homo sapiens
ggcacgagatattacatggagtccggacccaggaagaagctgtttgaataccagcaggctcagctggaggctgagatcgaaaacctctcatggaaagtggagcgtgcagacagctatgacagaggggacttggagaaccagatgcatatagcggagcagcggaggagaaccctgctgaaagatttccatgacacctaagttgggatgtggatgtgccggggtgaggaagatgtggctgcaaggtctcccggctgccatactgcatgctgcaggctctgcctttcatgaccccaggcaacagccagggccccactcctgagagacactggcaacacctcttagttgatttctgttttcttctcttttcactttttgtttctaccagggtagaggccatgttgaactggcctcttttcaggacttttatttccccctggatggttgttgggagggagggaaagtgttttctgaatggctattaatagtattagatcattacaacttatgtaactttcaaaggttgtacaattatacaaaaaaaaaaaaaaaaaa

SEQ ID NO: 1003 - DNA, 600 bp, Homo sapiens
  misc_feature (588)..(588): n equals a,t,g, or c
  misc_feature (599)..(599): n equals a,t,g, or c
ttaaatagagaatatagcccaaaccttaatgtgctggaagataattacttagaatatccgacagctttgcaggaggcctgtattactttaaaaggtataaatgataggttgtgtaataccctacattcttatcttgaactatattatcgggggctctttctgttttaccttaatgtgcccaggggactcctgcttagcttaataggacacccaaaaggaggaaatgcagagttaatggtttaacaaattctaaactttattagcaatttgcatttaggagaagggcagatggtgtgtggtcgaaagctcatgggactgtgaattggtagactttttttaaaatccagcttttgcccctaacttttggtctcggagacctctgtyctttaataactagaactgtaggccgggcgtggcggctcatgcctgtraatcccagcactttggtagggtgaggcgggcggatcacaaggtcaggagttcgagaccagcctggcccagcatagtggaaccctgtctctagtaaaattacaaaawttagccaggcatggtgacgtgcgcctgtagtctcagctacttgttaagggntgggggcaggng

SEQ ID NO: 1004 - DNA, 522 bp, Homo sapiens
ggcacagtggagatcccaggccagagtaaggtacctgaactcttcctcgcgcctccctgcacatgtgctcccccgcctctgtagaactgatgatggtcatcgtgtgtgtcattgtgcaaaaagcattgtccgtgccatcccctctccaagggacacttcttacccctatccttcaaggccttctgcaaatgccattctctccaggaaagcctttccgcattctcagttggatttgatcttctcttcgaactcccaggcccttttgttccctttgaggacagattgcattctgctttttaatctagctgtgttttatccccctcagtggatggaaggtgtcttcagggccagaactgtgggttcctcttccttctcatcagtagcatcgccatagctcctgatttctgaacacccactaaacaccaggcactgggctaggtactttgtcacaaaatttcactgaaacctcccttacagcaactcccaagaggtgggtggtgccgtaaaaaaaaaaaaaaaaaa

SEQ ID NO: 1005 - DNA, 573 bp, Homo sapiens
catcctgggggctgtgtgtcatgctcacctgacccaggtgtgtgtcccggtgtgaaatcgaggaggggactggaagcccttccctgccttgaaacatgaaagctgattttctgagcagcagatacggtcagtggcaaagctgcatctgaagggcggcctgggaaagggccctgtgctggccccgggtccgccccacagatccacacagcaccacctccagaagggctgggcccggggtcctgcaggcggcaccttttggtagagtttgtttccctggaaaatggggaaaatgtttcaagccaggtgaggggggaagttaacactgaaatatgtattgtttttaaaaatcaaatgcacacgcatggaagctgcttgtccatgcactggttttgtcactggcgtcctggaatccgaccgtgttggggtgcaggcgctgtcagactccggctgatcctggctcgagcacacacatctaagggccaggctggttccgcatggtgatctccgtcttgtatgtctgaatgttggcctaaaataaagattactgttgtaaaataaaaaaaaaaaaaaaaa

SEQ ID NO: 1006 - DNA, 597 bp, Homo sapiens
  misc_feature (7)..(7): n equals a,t,g, or c
  misc_feature (15)..(15): n equals a,t,g, or c
  misc_feature (39)..(39): n equals a,t,g, or c
tggcccnttgctggntgaggggcacaccattgccagggntcagccttcgcacccaggccaggcagaagctgtgctctgaagctaggacagctggctgagaagtgggttcaggcgaagggtgaagccatgtgtagcagttcctgccagtgcagatctggagaggagctggcccggaaggcgtggttgtgaaagcgcccttcttatgttaggaggccttggcaaaattggatttcttcaaaaatacatgtaaaggtctgttgttgaattgtactctgcccctggaagcagatacagatggctgcctgctgctcggctttgcttttgcttttcccaccgtgttttcatctttgttcacttgaggctttccccagctggtgtgtgcaggacagttcatggtaatgttgccctctgaggccccgtacaccagaagggaggccctggaaaattttgtgcttccaacgtggccttcaattcttgcttttttgcccctcrgaagcatggggcttttgagcacacttaaaaaaaaaaaaaaaaacggcacgagagtacttctagagcggccgcgggcccatcgattttccacccgggtggggtacc

SEQ ID NO: 1007 - DNA, 594 bp, Homo sapiens
  misc_feature (7)..(7): n equals a,t,g, or c
  misc_feature (15)..(15): n equals a,t,g, or c
tggcccnttgctggntgaggggcacaccattgccagggtcagcctcgcacccaggccaggcagaagctgtgctctgaagctaggacagctggctgagaagtgggttcaggcgaagggtgaagccatgtgtagcagttcctgccagtgcagatctggagaggagctggcccggaaggcgtggttgtgaaagcgcccttcttatgttaggaggccttggcaaaattggatttcttcaaaaatacatgtaaaggtctgttgttgaattgtactctgcccctggaagcagatacagatggctgcctgctgctcggctttgcttttgcttttcccaccgtgttttcatctttgttcacttgaggctttccccagctggtgtgtgcaggacagttcatggtaatgttgccctctgaggccccgtacaccagaagggaggccctggaaaattttgtgcttccaacgtggccttcaattcttgcttttttgcccctcrgaagcatggggcttttgagcacacttaaaaaaaaaaaaaaaaacggcacgaggtacttytagagcggccgcgggcccatcgattttccacccgggtggggtacc

SEQ ID NO: 1008 - DNA, 1333 bp, Homo sapiens
gcttttttccaaagaaaaaccactgtggtcatttttatttttttaattaccgaagaaaatttctgcatacccaaccatgaacaaagaaacacaaagttatggtgagatggaatgccagccattcacttaagtcgttcttaggtcctcaggtgtttaagatccttgtcctggcaaaatggcaaatgactacatatcatggatctctgggatcaccccacagtattttgaatggtgactgtggtatccaagaatgccaagggtgttaattaaacatctgatctgttgctacactctgtccacctcttgttatacgagatgactctgaggcctcccattttactataaaactgtttattatcagcttccttgcaccccaagttccaagttctgcctgccatactggatggcctcccggcacccacactcatgggcttccctcccaggacatgccccaccccagtgggcgtgtcacgtgccaggtgtccacacctcccagtgcatcttgtttcctcaatactagacccagttggctagaaggactgtcattaccaatagcacatttagcactgaaggtactgactcatggaaattgtttcaaatacctctgcttgctctccagggaaacagatcaagagaaaatctttgaggtatgtttggatcatcaaaccatctcatatgagccatgctaaggtctaactaatccagcaagattataattgaccacatgatagccatcaaattaggcttgagttcaagcgtatgatccagtggtacttctatgtgctctacagttcattggactccctgtgtaatcactgtgtagagtacctcaaacccattttatagaagctggagtggcacgtgtttattgttttaggtgattacagatttttataatcttttaggatgtatttttgacttattcagttctgagtccttggtcaggagtacgtggtcccgttttactagttttcctatggtaaaatgcaatgtacctatttttttcattccatgaatattttaatgtttaaacaatccactctacactaagcacataatgagcgttcagcctctgacttggcactgaggttatgggcatgtgtggcacaggatagtggggagggcttgagcatgaaacttcgtgaaataagtgtgatctttgggcaaggcaggtggctcacacctgtaatcccagcactttgggaggccaaagccgtcacttgagaccaggaatttgagaccagcctggccaacatggtgaaatctgtctctactaaaaatacaaaagttagctgggtgtggtggcgcacatctgtaatcccagctactcgag

SEQ ID NO: 1009 - DNA, 391 bp, Homo sapiens
ggcacgagttagaggctttttttgctaaagctgagcttacatgccgtaaaactcagttccaaagtatacagttcagtggttttttaatagcgatagggttcataaaccagtgtttctcagccagaggtgattttgccccccaaggggtattatgcattgtcaggagaccagaaagggttgtcacaactcgggggtgccactagcatctagtgggtggaggccaagggtgctgcccaaatcctgcagcgtacgagatggctccatgacacagaatgacctggctgcggtgttgctgaggtggaggcgtcctggtctaggctggtgctccaggctgcttacagcctgctgcctcccaacccttcccgcaagctgaaaaaaaaaaaaaaaaaaa

SEQ ID NO: 1010 - DNA, 182 bp, Homo sapiens
ggcacgaggtaagtctaactattctgactgtatttattagctttacttttgttgatgacaaatccaatctcagattgatatgtgtgctttttaggtataatcatttgcatactgaacatcaaatgtattcaggtattagccatctctttgaagattgtaaagagaaaaaaaaaaaaaaaaaa

SEQ ID NO: 1011 - DNA, 587 bp, Homo sapiens
ggcacgaggtggcacgaggaagcagtggaataatcctccatggcacaagggagcggtggaataatcctctgtggcacgcgggggggggtgtggaataatcctccgtggcacgagggggtggtggaataatcctccgtggcacggggggtggaataatcctccgtggcatgagggggcggtggaataatcctccgtggcacgagggggcagtggtataatcctctgtggcacgaggggtcggcggtataatcctccgtggcacgaggatggtcaccgcattcgtcactcttagctgcagtgcgtgtgacagtcgccagggctgctgtttgaggaatgggagttgcctgcgtctgctctgccccaggtggtttgtagggtggtttttactccttgccaaagcccacacagccccgcaaggcaaacagtgttcaactcttttcatggctgaaaaactgggacatcagagaggttaagacactggccagggccacctggcagggaagcttccgggccttgcctgcaccaggactgtccgatggggacgtcatctgcctcccagacggtatcttaaaaaaaaaaaaaaaaaa

SEQ ID NO: 1012 - DNA, 1630 bp, Homo sapiens
actagtggatccaaagaattcggcacgagtggggaggcctcaggaaacttataatttgtgcctgcttccccttcaccttctgtcatgattgtaagtttctaaagcctccccagcccttccttacagccaatagaactgtaagtaagtcaaacttcctttctttcagtctcagatagttcttcatagcaatgcaagaacagactaatacagtatcttcataagtgaagcatgtttcttgtaggcaacagattattcggtcttgtttcttttcatccattcagtcactgtgtgtcttttgactgaatacttgagtccatttaaatccaacggaatttgagaagtggttgcctactgggaatgtggattgactgtaatgggactgatataaggtgatgtaaaaattatcccttttgataatgattttggctacaaagggctgtatatttagttagacttatcaactaatgaaaatcaaatttatgattttactatttgcaagtattgcctagatcaaaaaattaaataaattatgcaattttgtttgactccttgaggttctatataaagcatttttttcttgctaatattcctgttgggtcaaataatttttaaagttactttttatcaacctagaagtaaatagtctcataaatatttatttcattattattgcttttattatttgtaaaatgtcaataatgaatgtgatagtttacaaataaagtttacacatctaagactttacaattcaaatataagagatactgacactaagaaatgccatgttgctaatgtgagcaaacataagattagtatacatctgttttattgcttctgtgtcttttgtatttctccctatatttttttgtattatatttggaaaagacattacaggaactcctatttaaagagctttataaaaaagttcacagatgacttaagatatcacatgctcctgaaacctgggggctttcttcgtgggtagctattcaaagtctatttcagtacataaatgaaatatggattcaagttgaggaagtctttgtattaaatacactaaaagatagataggaaatgcattgtaacatttggtcttgtatttcttcagaaagtctatgtgtgtttatctgtatatttatctacgttttaatgtatacatgtatatatatttagatatatgtgtgtctcacacacatatacatatacttatatacagtctgacactgtattcatgggttccacatctgtagattcaaccaactttgtattgaaaatatttggaaaaagggcagagcaagatggtggaatagaagcatacattgtttctctcccctactggaacaccaaatcttaattatctgcacacagaaaagcaccatcacaagaaccaaaaatcaggtaaacaatcacagtacctatttttaactgcatttctctgaatgaggaattgaggagagcaggagagacagtctggatggtgatgccacccctcccccatccccccgcagtgacacggagagacaatctgggcattttggggagggagggtgcagtgactgaaggactttatattgaactcagtcctgccctgtcacagctgaaaataaagccatactgatctcggctgtca

SEQ ID NO: 1013 - DNA, 2139 bp, Homo sapiens
ctcgagttttttttttttttttttttttttttttttttttttttggttcaggagtatatgtgcaggtttgttatataggtagactcgtgtcatgggggtttgttgtacagattatttcatcacccaggtactaagcctagtacccaatacttattttttctgctccactcccttttcccatcctccaccctcaagtagtcctcagtcagacctgaattctgattccagcttggccacgcttagccacaggcaagcccctgaacctctctgtgctttagtttctttgcttataaacacctaagccatgcggctgttgtgaggactatttgagttgtacttatctcgcccagcacagagcatgtcctcaacagacagtagcttcggggctggaaaacatgtctaacgtgtaaaggcaattcagcagtcttgttcatgcatttttgtatgcaagtttctaatctgtgttacctctgtgggcatatacatcatggggatttgtagcttcattttataagaagctaatattggtcatgcttacctactattcttgggtgtttgccagagstgctttggagtatatttgaaatggccatctcytgcagtattttccatgcctacagattctgagttttcaccttgtccttccgtttgctgtcagagcattattttagcttctaactttgcagtttctaatcatatctacgtttttccaccacaaggaaagaatgttgagaatgagagtgaaggacagagataacaagtaaggctatacctgcttagctgctggatttccttccctcttattttgatgtggcactgtttgatttccctgtttgcaaattgcgtcttgcttcccattttgccaaattttgatcattttcttctttcagaaaggaaaaaaaaaacacaaacaaccaaattttattttccatatagtttaattgaattgatggctgctgtcacaaaataaaataaaaacctcacaaacaagaaggctgcaaatcctaggattaggctacttctgaagttttaaaaattcttcaaggcatttatttgcaaattctacccatttgcatattttataagcataatacaaaaatgtattatttatcaggtggtctaggcatgcttgtggaaaatgaatggttgcaaattcaaccttcattttaaaatcctcattgtaaatccatccctctaacttgcaggaaaactgggtttttcaaccctagttttttctgatctacttaaaatactctagactccacactgtgagcaacttttattgagtatgtgtctgtaatttgaagagaatggctgccaatacataaaatcacaaaatacagaataatttacaatgtcaaaatcacctgatctcattggctccattttatctggtcatcccactgacatccatgccaaagatattcttgcaagktttcgggcagaagtatgatctcacacttaggcaatttcagttgtcaatgacgcaatacttgggagtttcatgccttgatatcttgtctaacctttatgtacagtcaagagaagaaatctgatttgagctgttgctggttcctgttgagtttagactccatgggccagaaaatacmatacccccagatctgagacaattgatgagtgaataatcattacagtagaaaacaaaattaaatgagcatgccattctttggctttttgccattaaatgagcatgccattgtttggcttgtattttatgattcagtatccattttaaatatccatttttaagtatccattttaagtgagactttttaagtgaaatattttaaagtatccatattaagtaagtatgataactatattttaatatgattgctctctttggtgaaatgtaactaataggcagaaaatgctgcaagtggaggaggatttgctaaagcatctattaaggcttctttttgtaaggtagttttcttcaggcacccagaagacacttttgtccctgtagagccacatgatgttttctggactataggaagcaagacactggtacaatgacaaagtgctggtcctctctcctggctcccttccgcttgcctgtcatatcacatatctgaccactgatttgtatcctgtggacacagcctgtactatggc

SEQ ID NO: 1014 - DNA, 819 bp, Homo sapiens
ggcacgagaaagtatgctagtagtcattgtgttcttcactatcacacactcagagtaaaaaaatacgtttcacttaatcctaaatgaagaagtaaaaattactagttttctaagtctttattccttaaggacacatcttaattgcttgtgtgacaaaatgggaggtatgcctaaagcacttctgcatactgaagtatggtggtcgtcccaaaatgaaaacatttgtgtgtgcttttgacttgtgagcttgtttctgtttctggacctaccctgggcaggtttccacagttgagaatcttagcgtattgctgttacctcaaatttccacacactaccagtttgtcttttgaaatgttatttttataagatgtcaaccctggtatggttcacttttgttatatgttggcacctctgtgggttacggaaagctttgccctccaaagcaaccagttggtttttaggaaagggaaatattgatctttgtggataagtagagtcttgttaaaagctattaaaaggctctctttggaaaaaaatcagaaaaatcaaaagaactgtgaaaaggatgataataatggaaaagaggcctttgtagccttgtgaatgtaatacgtatagtcaccacagatttttcagggaggccagtcacggtggttcaagcgtgtaatcccggcactttgggaggctgaggcgggaggattgatagaaccaaggagtttgagaccagcctgggcaacatagtgagaccccatctctagcaaaaaaaatgtttttcagggaatgctgaaatgtctccttctcaaaaaaaaaaaaaaaaaa

SEQ ID NO: 1015 - DNA, 174 bp, Homo sapiens
attcggcacgagaaactcttgacaagaacagcaagacctctgtgaaaatatgaaaatgacttttatgtatggcagattaacattttttctctccttaccaactctttacttatgctatttttatttaccaaataaaattccatgaaataattctgcaaaaaaaaaaaaaaaaaa

SEQ ID NO: 1016 - DNA, 622 bp, Homo sapiens
cacgagatctaggagccttgttgaactgagtaattaagggcaattaaacttttctgcttgctctctgcaaaatatgctaatgatctggtctgctggaaggtggacatatgcagtgctgtttcactgctgtcagacgctgctgccctggaagktccccctggagaaggtgtggcatcaccaggatggtcaggtgggcagtgggttgagcgtgcagcctcgtacccagcctcctgtgtcctggctggctgttccaggacttgcaccttttcagcagttatctagacctggccgcagtggcctgagttgcagtgattcgtattcactcattctttgatgttctagatccaccattcattcgttgcgttatttttctgggatgatgaagctaccagggttttgtgcgtgttgtttcagcatatgacacgtggcaccagctgtacactgcccttctggttagtgttgttcttggtcaagggctccaggctgtcttccatgctatcttcatgagtgggtggcagcacgtgcccaacgctgcccactgggagaagcattgatactgtggccactcactgcagagagggttttttttggcamagcaaaaaaaaaaaaaaaaaaactcgag

SEQ ID NO: 1017 - DNA, 1993 bp, Homo sapiens
  misc_feature (365)..(365): n equals a,t,g, or c
ctgcaggtcgacactagtggatccaaagaattcggcacagcgttgaccgcgcgggccgaggcatagagcgtgtcgatcgtgaagctcgatttgccactgccgctgaccccggtgatgcaggtgaaggtgccgagcggcaggctggccgtcacgcccttcagattgttggcggtggcgttgtggacggtcagtttcttgccattgcccttgcgccgggtggtcggcaccgcgacctcccgcctgcccgacagataatcggcggtgatgctgttggggttggcgagtacttcctcgaacgtgccctgcgcgacgatcgcgccgccatggacgccggcacccggacccatgtcgatgacataatcggncggtgcggatcgcatcctcgtcgtgctcgaccaccagcacggtgttgccgaggtcgcgcaggcggcgcacgttttcagcagcatgtcattgtcgcgctggtkcaagccgatgctgggctcgtcragcacgtagagcacgcccgrcarcccgctgccgatctggctggccaggcggatgcgctgcgattccccgcccgacagcgtgycgctggtgcgatcgaggttgagataatcgagcccgacattgttgaggaagccgaggcgttcgaggatttccttgaggatgcgctcggcaatggcgcgttgctggtcggtgagatcggcggggaccgattcgaaccaggcgagcgcatcgaccaccgacaggcgcgtgacgctggaaatgtcgcgcatgccgatcttgaccgcgagcgcctcgggcttgaggcgcgcgccgccgcacacttcgcacgcggcgctgctttgatatttgctcagttcctcgcgcatccacgcgctttcggtcgagagcatgcggcggttgaggttgccgatcacgccctcgaacggcttcttcacgtcatacgacttcttgccgtcgatgaaggtcaagcgtcaccggcttgccgccggtgccgtgcaggatgatgaagtttcacctcgcccggcagatcctcccacggcgtatccaggctgaagccgaattcgcgcgccaggctgccgagcacttgcatgtaataggggcttggggggttggacttcgcccagggcacgaccgcgcccttcttgatgctgarcgcgtggttggggacgacgaggtcctcgtcgaacagcagcttttcgcccaggccgtcgcacgccgggcacgcgccttgcggggcgttgaaggagaagaggcgcggttcgatctcggcgatggtgaagcccgagacggggcaggcgaatttctcgctgaacacgatgcggttggcggggatgccggtgttcttcatgccgcctttagccctctccccttcagggragagggttgggagaggggyagtatcggaggacagcgcttgcgactgcccctctccccgaccctctcccccaagggggagcgggagagccagcgcggccaccgtcgtgtccaccaaatccacataagccagcccctcggccagcttcagcgccgcctcgaagcwmtccgccaggcgcgtcgccatgtcggggccgacgaccaagcggtcgaccaccacttcgatgtcgtgcttcagtttcttgtcgagcgcgggggcctcgtcgatctcgtaaatctcgccatcgatgcgcacgcgcgtaaagcccgctttctgccattcgagcagttccttgcgatactcgcccttgcgcccgcgcacgaccggcgcgagcagatacagccgcgtgccctcgggcagcgccatcacgcggtcgaccatctggctgacggtctgcgccgcaatcggcaggccggtggcgggcgaataggggatgccgacgcgcgcccagagcaagcgcatgtaatcgtaaatctcggtgacggtcgccacggtcgagcgcgggttgcggctggtggtcttctgctcgatgctgatcgccggggacaggccctcgatatggtcgacatcgggcttttgcatcagctcgag

SEQ ID NO: 1018 - DNA, 1094 bp, Homo sapiens
ggcacagcaaaaacaaaaataagttagaaaaaaaaccagaagaaacttgtccttagcgttcctaagacttaggagagctaagccggggagggcaggagtagatggacaagaccataccaaggtcagctgttcccctcgccgagaaggcagcagctgaactttccgcttacgctgcccagagctgccaggtgtagactgagaattcgagttttgtttcttccttggggttgtatctgcagctaaagaaagaaatcaagactcgtttgcttccttccctcttccagaaatggatggttgtgtctacccacttcgcatttcacactgagttttcaatgatggtatctctgaaaagattcaatcttctatggtttggttgcttggatggtgtttgtaagattaaggcgcgcacacaaaccgcttactgtgcagtaattactgggatcacccacaggtgactcaaactgagcttacctctatccaatcgttagcccccatctgtagcctttctccctcatcagactataaacttctgaaggagaggaaatctctctctttgtatctaacatgccttagacatagcaatgctcaagaccttttttcaataggtattaatctctacatcctccacaaatacctccaccacmaacagcagcccctcatcctggctcagcaacctacccttttctccctgggactccttgtctgctgccaatggagttgaagaactggaatgatgacacagctcttcttctctgttgggaaaaaaggaacaatttagtctagaaagacttcttggctgaagtattaaataatttctcacaccctcctaactaccaagtggccaacatctaaaacaaccatcatttaagatctcagtatgccaggataaaaaaagtcaacaggaaattccaacagaatgaagggaggctgttcacagaggccatgaagacagtttttgtcttaaaacaagcacaaacaataatcttcaaaccttacttacaacctaccaagtccctgggagttctagacacagatgtgatccctgagggagtggcattccagccaactgcaagcacctaggggatcagctcgag

SEQ ID NO: 1019 - DNA, 2439 bp, Homo sapiens
  misc_feature (429)..(429): n equals a,t,g, or c
  misc_feature (448)..(448): n equals a,t,g, or c
gccagaactcacgttgaaatgtgattcccaatgttggcggtggggcctggtgggaggtattgaatcacgggagcagatccctcatgaatggtttaacgccatccctttggtggggagtaagttctcgctcagttagttcacatgaaatctggttgtttaaaagagtctgggaccccccctttctcttgctcttgctcctgctctccccatgatgtgacatgcctgctctccctttgcgttctgccatgaatggaagctttctgaggccctcaccagaagtcgagcagatgttggcattatgcttcctgtacagcctgcagaacggtgtagccagttaaaccccctttctttataaattacccagcctcaagtattcctttatagcaatgcagggatggcctaatatagtaccttagtaccttgttctcnagatagcaatgagaaagcnttgaggttgtggttaagagcacaaactctgaacaagacaactgaagttttgatcccagctctgccacttwctagttgtatgaccttggacaaggtacttggcctctctgttcttcagtttcttcgtctgtgcaatgaggataacaatagtacctacttcacagggttgatgtgacctctaggctgtggacatctgatgtgttacatcaagtagaatccactctcactattcttgttgttccaggtcactgccatccctgccacccctgccaccccatgcacctgagaagtacctactccagtgttcagagaggcctcccagctggcagaagaagtgtgaactaggatcccagtactctgccctccagttctcatcttggtcattttctatcaagctgctgccctgatatgcgaggtcactgtcacttctgcagggctctctactatgctgatggccccctaacttccaggactcatggctccatcaggtggttttaaatcttgggatctgtcctctgaactccccagccccctatcctgcacatcacacaagtggtcagtgtccgtgcagccctatcattggcccctgcacccagaaacctgggcagctggagtccagttcagagtctctctttggccaccaagtctgcccaaccccatccaaacccaagaggaatcttagcgccctctctgtagatgaaaaagtagaagtttcttccctagtggaagaccatggaggggatgggtccttctttgcagaaaccaagctttctgcctacattgtcttgccctccggcccttcttccgcccccacccctcagccctcatccctgcagagtcgtaaaacacaggagtctttacttgactttgactcaagtactcagaggtcatcccaagggcctggggttcaggacctgcttatctatgcacagtcattttctacctcttttctccacttattcaacaaacaaactaccattctcattcagacctcccagcatttacccatgccatttcctccaccaggaaggtccttcctcctcttccctggcaaatcttacacatcagccaacactcagttacaatgtaattgtgataattagatgktccttggggctcccaccattggtcacagactgacgcartgagtggtgcctatagctggcttctcagttgtattgggaaggcagcatggatgggggttggagatgagatatgacttatctccagtgtctgacccagcatctggctcatagcagttctcagttatatgagtggatggatggatggatggatggatggatggattaatacaggtggataaaatggttacatggctaggaggtgartaggcaggtgcttggtggatgtatgggaagatgagtagatgacagaggagaacatcagtagacaatggctaggggcatgtgcgaaggttggatgacttttttcactgatctccctatcctgtctgtttccagtgtccactcttctgacccttctgacagacacatcttctctggcccggacacacagacctgcctttgttttatgaacacatacctatactgcagctctggagcagagagagctgaactaattgggtgagaggtggatggatggacccgtccaataaggagggactgaagaaccagagtcctggagttcctggaagagccaccgtcctccaatggggacataagctggggaagggagtctctctccccttggctgtcttttgcccttatgtgttggagttcctggaggtcccacacactctgctgcactgccttaaattctatcctttgcaatgaggccttgccttttccaggaagccccagctgaaagcagagttcttacttctgggagtcactgatgccttcatatgattagcttgtaagcctgctgaaagaatcatggaaaggtctctggttgtcaagagaaaggatagctttaagaacacacgaccaccaaatggtggggtccctcgag

SEQ ID NO: 1020 - DNA, 859 bp, Homo sapiens
  misc_feature (64)..(64): n equals a,t,g, or c
  misc_feature (86)..(86): n equals a,t,g, or c
  misc_feature (88)..(88): n equals a,t,g, or c
  misc_feature (91)..(91): n equals a,t,g, or c
  misc_feature (104)..(104): n equals a,t,g, or c
  misc_feature (108)..(108): n equals a,t,g, or c
  misc_feature (122)..(122): n equals a,t,g, or c
gcaattactgtaagttagctcactcattaggccaccccaggcttttccactttatacttccggnttggtatattgtgtgaaattgnancgnatacaatttcacncagnaaccagctatgacnttgattacgccaagctcgaaattaaccctcactaaagggaccaaaagctgaagctcgcgcgcctgcaggtcgacactagtggatccaaagaattcggcacgagtaagagtgttactgagattttcagtgatttgggaaaacttgatggatttaaagcagacatggtgaatatgggatccgcgtggccttttttatatggatatttttcactgaaaatggttttaatgtttattcatatttattcatgatacttggggttccattggaatcggtgcaggggcataaaccttatgttaagtggatggggaaatcggtgtctttggcattgtggcacgacccatgagggttcctgtcaagtttcaatgtgagactggcctcctcttgaggtgcgacgggaacttcgggattcctttccagacaaagcagaggaatcgaccctcatctcgagatgaggaggggcaaaggggctcagattgaggtgtgccaggaaaatcggtgttccgcttgagtggggatgggtatgtcggggaacttcttgagtttcataaagggtgttgagtaccgttccgagtttcaagagggaatgtgggacttctcttgagatgctgcagtgggaaagggcctcatcttgcgtttaggggagaatcccttggttttcctcgagagtacttctagagcggccgcgggcccatcgattttccacccgggtggggtaccaggtaaaggtactttaccag

SEQ ID NO: 1021 - DNA, 2295 bp, Homo sapiens
  misc_feature (646)..(646): n equals a,t,g, or c
ggcacgagcccctgcctggaagagtgactgctcttctgcatgctagggtgggagaccttgtggaagtcagtttatctttagagtttcagtttccttatctgtagaagggggtaagaatgcccccagggttgacccttcaggttcatgggatgataagaaaggaaaatggtggatgagaaaggtttctgaggctctgctgtgctcctggccctcttgcttgcttctgccctacctaaggcacagacaagttctctgtgtaggaaaaggattcttgttttccacatgtggcatcttccagagtatcctggaatgtctacatgcccgattagaatccagcattagaatgaagtcagactctcagcctcttctttgggaaacccctgcccatctggtcattggtgctgtgcaacaggaaagactcggggtgctggttgcattgctgcagcaggagagactcggggttctggttgcattgctgcagcaggagagactcagggttcttgttgcattgctgcagtaggagagacttggggttctcgttgcattgctgcagcaggagagactcggggttctcgttgcattgctgcagcaggagagactcagggtactgcttgcattgctgcatctctcaaaagctttgttttgntgttggttagatttggcactgtgtagtcatggccatgtggcttcaggttctcacaggacacagggacatgtgactgatgaggtttcaagagaggaggatcggatgagtgggggattgcagcttccctcctcccgacacctgggaccctccactcacagagagaatgagcttctccagcgtttggaggagagaggagaagatgggctcccctgcaagtccatagaagcctccgtggctttctggattaatgcagccacacactcactccttgcacagcctctgcccagtgtccagttttacatatgctttggaaataagaacaactgtcaataacaccatgacctaaagaaagaaacaagtaagcgctgaaaagcactggggaaagccccctggggctcaaaggagtggaagcccgtgccttatcctctgagccccagctatgacagtgacctcctgtaatgcacaaaaagccctggacttccttctcaggcctgggtctaaccgtaggacttagaaactagtgatcagagggttcacaggcaggcagaggtggaatcctacccacccagggggcatcccctgctcggtcctgcagagactcagctcccagcctgcggcatggcagggaggaaaggcagtgggtggaggtaagtttcacagaagaggcacagagatggcagaagggcctcttagctagagtaggagtaagcaagagggccaggggcgcaccaggaactgtgttcttccgttcagctctcattcccaaaggagcagaaaactctgcagcttagacagaagtctgacctcccaaaagggagcagagcccagccctgaggagccgcctccagctggcgggaagcctgtcgggcatcctgtgaagatgaaggcctgctgcacatcgcccggacctttcaggccatcccggagtgggcagggcttcccacacctgcaggaaccagagcgagactggagacgagctccccgccatgccccatggctcattctagaccaggattgattgacctctgccggtttaaaagggcattttttttttaagcctcaaagtcaaaactcaagtatgagcccgtaaaaaagtaataataataataagcactatctatggaaagcaatcctgtcctaaagattttagggcagaggtagctctgaaaatagatctctgcagtaaacagacaatacttttatagaaagtgtctgcttgttggtgtcacagagatggactgcatggccgtgacccaggagccaggaacccaaggtgaggcaggacctggaacgaaggcagacatccaagggttttctgaatgaaatagaagatggatacggagacaccaaagatgtaaaagtagagtttagttgtgtattgggagctgcaaataacataaatataactgcagaaaatcaaaacagtgataaggagactaatcttaaaaccaagagataattcacagaaaaaaaaaaaaaaaaagcaaggaaatggaacaaaacagataaagagaagttggtagatctggaggacagaggatgaatatctaactgaagagtcgtggatgctcctgagggggaacctcaatggctccagcagaaggaagaatcacattagagtgaaaaccatagtgttggaaagaaagtta

SEQ ID NO: 1022 - DNA, 1055 bp, Homo sapiens
ggggtgaggagggtggagaagaattttattgagcggtgaacagctttcaggagcggaggaggtagtggttccccacccctgaagtctggtggtttctctcccagtgtggctggktgggggcttttatgggctcagaacaggggcatgcatgctgaatggtttgtgggcatgcaaagaaaggctaaagcaaaggcaccactcaaagatgggcatggcagtgtagaaaatcaattcggaaagggtaggtagatgtaaaataggtgaagagtggggatcaatcagaggaaagcctaccaaatgggaagatgggttctcagtccggtccatggatttgacctgtagtgtggctttcaggctttgagttgtctttggcttagaggtggggtttcactggagacccgcccctgtgaggcatttgtctgcctcctgccgctatcagtgtgggcgaagtttctctagaaaccacagggataatgcagtgtccacagctggtaatcaggttaccaccatgaggcctacgacagggagaaggaagggggaggagttgcccaaacctggagaaggaaaggacttactttcaattgagagtccaagactgtccacagacactctcagggtgggagctgggagaatgaatgccctgacctgaccctcccttcgtctgaccttctgcaggcctccccattgattaatagcactgggagccagagagtgagggagcctgttgatgtggttcttacagagccaaaaagtcagagcaggctgggcacagtggctcatgcctgtaatcccagcactttgagaggccaaggtgacttgaggttaggagtttgagactagcctggccaacatgatgaaaccccgtctctactaagaaatacaaaaattagccaggtgtggtaatcccagctgcttgggaggctgaggcaggggaatcatttgaacccgggcggtggaggttgcagtgagccaggattgcaccactgcactcctgcctgtgcgaagagtgtgactctgtctcaaaaaaaaaaaaaaaaaaaaaaaaaaaactcgag

SEQ ID NO: 1023 - DNA, 1179 bp, Homo sapiens
aagctagaccacacgcgcctgcaggtcgacactagtggatccaaagaattcggcacgagcagagatcgggcttggtgttttggggggtcctgggtaggtgtgggaggcctcgtttcgggggccacggggctcctgtggcgtgaractccatcacagtracctcctgtgcccaatagctccgtaagggcagggtttgtggaaggaaggagtgagtgaccgggaatggggtcttgggctccagggacagccatggcgagggctcttctgtgtgggtgcaggtccggaagctggggctgtggttggtgggggagcctgggtggggctgcttcccctgcagaagggctcttccgggctcttggcgcggtttcacgaggcagtcccctctgtgtctctcgtgccccctaggcctggatcgggttctcaggaagcctcggggaagtgagggtcttagcgccttggtttggggctgggcactttgcgagctggtgtcatggaggccaaactgggggcctccgggccagktggtggcttcaggcttgctgttggracaggagsccaggctaggcagtgacgcctcactgagctccatgggtggcacgctgagctctgggtgggagaggcctctcccactgacctctctgtgactggcttctctgctggtctgagtgggaagggccctcagagaccctggaggcctttcctgccctggaggagtcaggcccagagagggtgaagaattgcccgagtcacacagctggtgacagggagagctgggactgtaccttacatcacctgacattcagcccagggctctattccctgcactgtggcaratggggaaactgaggcaggtgggccactcctctgcattccatgggagaggcaggaaattcgacaggagccctttgccgggttggcacttggagctgttttcctgcttgcttttccccagggcaaggtgcttcccagctgaaaactgcctagggagggtgctgttgagaccgtgagcacctgagagccctggtctttcactcaggcctctcctctcacctccacctgggaggctaagctcagggtaggtgtcctggcccacaggcaggtgcatgggctggtcccgccagcacctgcaaccttcttgtgcgcagctaaaaaaaaaaaaaaaaaaaaaaaaaactcgag

SEQ ID NO: 1024 - DNA, 883 bp, Homo sapiens
ggcacagatacacacacacacacatatatatatacacacacatatatatatattccatggcccactctccccaacatacaaacgtatgcctccaagtcccttggggtggtgttgcgggtccatatggtggctgtacagacagtgggttgcagcacagctgaagaactgacctggcatcttttcagcaagcagtgaacacacgagtccccctactccagggatgggcagttgcatggcagtcatgctcaggtgccctgatctacttagtggcctatgtgaatagttacaggacctgctcactgttacaggatgataagccttgaagtttggcacacttagcaaggactgacaggaacactcagcacccatggcagactacctttcctaacagagacatagagattctgcgaggtctaactcacatatacttgtattccaaggatacaagtggaggacagaaatgaggcagaagtgataagttgaagagcacggccaagaattttccaaaacaggtaaaaatcatcaaaccacagttaaacaagaagacttttggaggctggtgcagtggctcacacctgtaatcccagcactttgggaggctgaggagggcggaacacgaggtcaggagatcgagaccataccggctaacatggtgaaaccccgtctctactaaaaatacaaaaaaattagccgggcttggtggcgggcgcctgtagtcccagctactcgggaggctgaggcagaagaatggtgtgaaccaatgggagaagaatgggagaaccaatgacgggaagaatgggaggcggagcttgcagtgagccgaaatcgcgccactgcactcgagagtacttctagagcgcgcgggcccatcgattttccaccc

SEQ ID NO: 1025 - DNA, 383 bp, Homo sapiens
ggcacgagtggctgggagtcactgatgctgcctctgccttctgatgctggactggccttgcttctacaagtatgcttctcccacagctgtggctgcaggaacttaatttatagggaggagcctgtggcagctgctgccccagccacagctgcactgactgtgctcaccacacatctggggcagccttccctggcaggggccctcgtggcttctcattttccattcccttcactgtggctaaggggtggggtgaggggatggagagggagggctgcctaccatggtctggggcttgaggaagatgagtttgttgatttaaataaagaatttgtcattttaaaaaaaaaaaaaaaaaaaaaaaaaaaaaaaaaaaaaaaaaaaaa

SEQ ID NO: 1026 - DNA, 657 bp, Homo sapiens
ggcacgagcagctgcaagtctggcatgggaagtctacagaagatgaaccaaatagccacaaagtctctgagctaattttgaaaggtggggatttgggagtaagtggggactgggagagctggtcagggtgaggaatggctgccagggggctttgaatgcacttgtttgaagtttgtatctgtaccagcagctgtggaatctgcatgccatgaaccagttggcaggtatagacaatgaacctggcattatgaatagcaaggttgggagcaggtggggaaattgggatttgagaggccagcaagcaggagtttgcaatgttctgaagggttttggtgattagaaaagaacaggtcagctgggtgcagtggcgcatgcctataatccctgcactctggagggccaaggaggcaggttgcttgagtccaggagctcgagaccagcctgggcaacatggcgaaacctccatctctactaaaaatacattaaaatatatatattcaggagtggtggtgcacacctgtagccccagctactcaggaggctgaggtgaggatcatctgagcccagggagttgagactgcagtgagctttgatggccccactgcattccagcctgggcaacaagagtgagaccctgtctcaaaaaaaaaaaaaaaa

SEQ ID NO: 1027 - DNA, 1901 bp, Homo sapiens
tgttcggacgcgcaatagatctcggtgcggttgcacgtggagatgatcgcggcctcgacctggggatggcggccggtgccgaaagaactgcgcaggctctgcagcgtgggggcgatctggtcgagcgcgaacgcaaaacgaccgcgcagatcgagcggcgcggtcgtgtggttcaagccaagagcccagacagacatgcccgtgattataaaatcagcaaccgcaccgggcttgcgcagggacaaatggctttccctatgacagccataagccccgccgcatgacctcccgcacgcatgcggccccccatggacctgctcgaccttctcgatcacctgctcaatttcgttgcacccgccgccttcatggcgctggtgctggtgttcgcgggccgcttcctgggcggcaggcgtgccggcgtgccgcgctggtgggcgcaactggcgctcgtgtttgcggccggtgtcgctgtgctggtggccggcctggcggtgttcggccacgacgggatgatggcgacctacgccgcgctcgtggtggtctgcggcaccgtgcaatggctggcaatgcgcggctggcgccgctgaaagccgctcaagccgggtccagccggcggatcatgtagaccgaccggccggggtaggtggcgagccgggcctgttgctcggcaccctcgggttgcgttgccgcatagccctggcgctcccagaaaccgaccgaagactgcaccgacaccagcgtcgaaagccgccatccggccagcgccgcatgcgcccaggcatggcgcaccagccgtgggccgaggcccagccctgcagagtcggggtgcactgccaggtcatgcaggtacagcgaatcggcctgcggggccacttcgaactcgccgtgcagcggcgtcagcttgccgaccaccgacggatagcccgccagataggcccgcacgccgccgccatgctcggcgacccagcccgtatggggcgcggccgcgagccggcgggcgatcagctcgccgtcttccacgaagcccgcgccgtagcaggcgagctggatcgccagcacggcgtcgaggtcggcggcgcgcatgtcgcgcacgaagggggcgttcgacacgatcaggccagcagcagcttgtcgtcgtccagcttctcgccgcgggtctgctcgaacatgcgcagcaggtcgggcacgtcgagcccggcgcgctgggggccggccacgtcgaggatcacctggccctcgtgcagcattaccgtgcgcgaaccgtagtccagcgcctggcgcatgctgtgcgtcaccatcatcgcggtcagctggccggcctcgacgatcttggccgtcagctccagcacgaaggcggcggtcttggggtcgagcgcggcggtgtgctcgtcgagcagcaggatgcgcgagggcttgagcgaggccatcagcaggctcaccgcctgccgctggccgcccgacagcaggccgatgcggtcggccagccggttctccagccccagcttcaggatcgacagcttctcgcggaacagctcgcgcaggttgcggttcagcgcgaagccgaaggcccgccgctcgccgcgcttccatgccagcgccatgttttcctcgatggtcagcgcctcgcaggtgccggccatcgggtcctggaacacgcgggccaccatgcccgagcgctgccaggcgttcatgcgggtcacgtccttgccgtcgatctcgatgctgcccttgtcgacgatcaggtcgccgctcaccgcattgagaaaggtcgacttgcccgcgccgttcgagccgatcacggtgacgaactggccggtgggaatctccaggctgagcccgcgcagcacgcggttctcgatcggcgtgcccgggttgaaggtcatctcgagagtacttctaga

SEQ ID NO: 1028 - DNA, 375 bp, Homo sapiens
attcggcacgagttaagtagtaccatgtggctgtggaagtttaacttgtcactaatccaccaaactctgagaagacagcatattttccgtcattcccaaaagactatcacaggcaacattgaggaatgctttgttaaactccagggatatattccacatcacacttcccccgtccaccagattagcaactgtccaaggacaaaacaaaacacacactaaaaaggaaatggggttagtccgatatgtctccatctccttatgctggttcttttgtctgcagaagccacggtttctttttctttttgaaaaaaaaaaaaaaaaaaaacycgggggtctttywgrggggccsggggcccacggtttttcccacccggg

SEQ ID NO: 1029 - DNA, 375 bp, Homo sapiens; identical to SEQ ID NO: 1028

SEQ ID NO: 1030 - DNA, 303 bp, Homo sapiens
ggcacgagattggatggcctagcatatgatctatatggagttaaggaaccaaatgggtgattctaagatacaaagaatgaaagataaattaattatgtttttaatcttctatcagtgtaatacattgccttaattgtaaagcagcagaatgaatcaatgtaggtgcattcaatttttcttttggaaatggaaattacattttatcattgtcatcctaagagtaatacaagattttgagaaaagttttggtaaaaacagaaaaatgttagaaaaaatttaaaaagtaaaaaaaaaaaaaaaaaa

SEQ ID NO: 1031 - DNA, 810 bp, Homo sapiens
ggcacgaggtctcttgctggcctggaccatacatcatcatttctcatgtagatttttgcagcagcctcttaactggtctcctatcactcctacttaaagccctctggtaacttcttagcagagtaaaatccagagtccttagagtgttctctaagaccgcacttgatctggtctctgtccacctaacctctgacctcatctttcatcacttgccccttcttcactcattcccttccagcatcagtcctcacttcctgaaacatgtcatgtactctttgctttgggtcttatgttctgtagtgctcttcccgcagatcactgtggtggaaatgccttcccagaccaccctatatagactagcaagtcctgaccttggattccctctctccatccctcttaccctgcttcatttttcttcttagttctccccactgccccccgccgccccaaggcagggtctgagtctgtcatccagcctgcagtgcagcagtgcaatcacggctcactgcagactcaacctcccaggctcaagtgatccttccacctcagcctccagagtagtagctgagactacaggcacacgtcaccacgcctggccaacatggtgaaacccagtctctaccaaaaatacaaaaagtagctgggcgtcatcgtgcacacctgtaatcccagctacttgggaagctgaggcacaagaatcgcttgaacctgggaggcagaggttgcagtgagccgagatcatgccactgctctccagcctgggcaacagagcaagactccatcacaaaaaaaaaaaaaaaaaaactcgag

SEQ ID NO: 1032 - DNA, 1256 bp, Homo sapiens
  misc_feature (1238)..(1238): n equals a,t,g, or c
gaattcggcacgagccagggcayactttcccaggctctctttccagaatttgtctgcactggcaaagtctttctcacctaaatcaaagcaagagaatagcaggccttggctttggggatgagatgtgagggacaataggaaactgtgatacctgaggccaaagcctgcctgagcctctgtacctgtgtcatgaaatccctgctccctgggtttggatattgtcagtcttcaccagcctctttcctttatccctttctctccttcccatctctcccacgcagcagctaagaatataaaccatgggggattaaaaatagcaaggctggagagtgttatttctgaagcatttagcaaaagcctccccttctgtgtgcccacagtttagtaaaatccccaagggcaaaggaggagtgtatgttttctctctctctctttctctctttctttcttgttggatacagcctgggcaaaggagtgagacctgtctcttaaagaaagagagscgggcacagtggctcatgcctgtggtcccagcactttgggaggctgaggcgggcggatcacctgaggtcgggagttcgagaccaacctggctagcatggtgaggccccatctctactaaaagtgyagagattagctgsgcgtgatggcatgtgcctgtggtcccggctgcttgggargctgaggcaggaraatctcttgaacccgggargtggargttgcggtgagccgggatcgcgccactgcactccagcttaggcaatagagcaagactctatcmcaaaaaaaaaaaagagagagagagagataaagaggtatattgggmcaattagtcatctttcctacattttctctttttttcagagcccagaatccttgcatacattttctcattctaaaatcctacctatttagtttgtagaaatgatttatgtagtaatcatagactgctaaaagctagaactccggcctccttttacagacagttactaaggcttagaaacatccttcagcttttcagaggttgcaacatacaactggtctttttccccagcccagttctctttcactgatagggccgttcatcttttcctattccttaaaccccctttcaagtgttaagatttaacctcttgttctagtattctagtatttgaagaacaaatttatttcctgttacacacttcatatacatttaaaaaaaaaaaaaaaaaactcgagagtacttctagagcggncgcgggcccatcgatttt

SEQ ID NO: 1033 - DNA, 657 bp, Homo sapiens
  misc_feature (9)..(9): n equals a,t,g, or c
  misc_feature (19)..(19): n equals a,t,g, or c
  misc_feature (22)..(22): n equals a,t,g, or c
  misc_feature (98)..(98): n equals a,t,g, or c
  misc_feature (143)..(143): n equals a,t,g, or c
  misc_feature (176)..(176): n equals a,t,g, or c
catcaatgngcgtggatancgntttgactcacggggatttccaagtctccaccccattgacgtcaatgggagtttgttttggcaccaaaatcaacggnactttccaaaatgtcgtaacaactccgccccattgacgcaaatgngcggtaggcgtgtacggtgggaggtctatatangcagagctggtttagtgaaccgtcagatccgctagccgcaattactgtgagttagctcactcattaggcaccccaggctttacactttatacttccggctcgtatattgtgtggaattgtgagcggataacaatttcacacaggaaacagctatgaccttgattacgccaagctcgaaattaaccctcactaaagggaacaaaagctggagctcgcgcgcctgcaggtcgacactagtggatccaaagaattcggcacgagaaataacttgaagtaacttttaagtgtgtgaaaagaatatttttttccaccctgtccatttaagcatctgtgacaggcagtattaagtgatgggtgtctttacgtacacatgcctgttgctcacagtactggggaagagttgcaaaatagtcacccattctgcagtgatttctctcttcttatttgtgaaagactcaaaaaaaaaaaaaaaaaactcgag

SEQ ID NO: 1034 - DNA, 626 bp, Homo sapiens
gctcccttaccccccagaaaccctaatgttagtgttcggccacctcttcttccttctgaatctggagcctagcaggcctgcagttttagtcctgctcacagttttgtgtctctattccattgagattgttgtaacttatttaagcatgactatttcttctcagtttctcttttttatattttattttcatttgtatgtttttgaagggagagggaagatcaaagtgtgtgcccactatacaatcttggttttcccaaaatccgtcccatgatgttataaacatatgaactaggagatgaaactcaaggttttctttctaacctaggaagaagttcagtctctctctataaatagagaagggctgttgaataatttgtcacctgacttctcttttgactttgtaagaccagatagtctatagacagaaacagattcattaaaccagggccattcaggtttatttagtaaaatatttgtgttatgtttaaaagctttggccgggtacggtggctcatgcctgtaatcctagcactttgggaggccgaggcgggcggatcacgaggtcaggagattgagactatcctggctaacatggtgaaacctagtcactactaaaaaaaaaaaaa

SEQ ID NO: 1035 - DNA, 342 bp, Homo sapiens
actagtggatccaaagaattcggcacgagttaagtagtaccatgtggctgtggaagtttaacttgtcactaatccaccaaactctgagaagacagcatattttccgtcattcccaaaagactatcacaggcaacattgaggaatgctttgttaaactccagggatatattccacatcacacttcccccgtccaccagattagcaactgtccaaggacaaaacaaaacacacactaaaaaggaaatggggttagtccgatatgtctccatctccttatgctggttcttttgtctgcagaagccacggtttctttttctttttgaaaaaaaaaaaaaaaaaaaa

SEQ ID NO: 1036 - DNA, 808 bp, Homo sapiens
tcgacccacgcgtccgcccacgcgtccgaccatttcttctccaaggaacataaatagaagatgtgcagaccggcaggggctagtggcagggggctggctgtgcattggttttgatgcctctcagctttggcagccccaaggctggggcccaaaaaaaaacgagggctgatgaggtgacctggagtgagggcggtgcttcgccacccctcaggaaccatacttcagcggctctgcctctgcacattgctcaccaacacacagggtagaaaaccactagctcttcctggagagaacagaacatgcagcctccaccacgtccccagaaacagccgcagacttgagctcactacatcaagaacaccacaccgcgctccaaggaacagctacaagcacagagacagaggcatacagagacaaagagagaaagagacgcaacatggcagcagacactgctttttttattaaacattaaaaaaaaggtcaaaatccaagcaaacttgaacccgagaatgtacacagaagtaggaaacacagagaacagagctgtcccagccagccagcgagcgatgctcttttcggagaacgtttcatagacggaagtagattccatgggcctccaagacaataggatcctctctccattcctcgccatatgggttttgttttttaagtcatttggtttggggagggccttgttttttttctgttttgatatttttattttttctgcagtcaccggctgccaacataatctgcaccaactggagatcagaaaccaaaaaaaaaaaaaaaaaattttaaccacaac

SEQ ID NO: 1037 - DNA, 1300 bp, Homo sapiens
ttggaatgcaaagagaaagaagccagatgggaaggctgggtagggagctacgcacagcctatttgctcttcatccttagactttcttacacgtccgcaggcctgtcacttcgggggaccatcagctctgtctcccagccccagtgacctgctgtctggcaattaggaggtgtactttccaagaattctggatttccctgagtctatagcttcagtcctcctttacctgctgatacagtttatatgtttgtcccctccaaatctcatgttgaaatgtgatccctgatgttggaggcggggcctgatgggaggtgtttgggtcacgggggcagatgcctccctcccacggtaatgagtgagttctcgctctattagttcacataagagctggttgtttaagggaaactgacacctcctcttttatctctcttgctccctctcctgtcatgtgacatgcctgttcccccccttccccttctgccatgagtggtagaaggttcctgaggcctcaccagaagcaagtgctggtgccatgcttttttttttgaagtagggtctcactcactctatcacccaggctggagtgcaatgggcaccatctcagcctcctgggttcaagtaattctcctgcctaagcctcctgagtagctgggattacaagtgcctgccaccacgccaggctaatttttgtattttgagtagtgatagggcttcaccatgttggccaggctggtcttgagctcctgacctcaagtgatccacttgcctcagcctctcaaagtgctgggattacaggcgtgagccagtgcacccagccctggcaccatgcttcttatactctttgctgaaccatgagctaaataaaccttttttctgcctaaattacccagcctcaggtatgacttgacagccacgccaagcagactaacacacctgctcacagtttttgccagctctgctcctatctgggcatgattctggagctgaacacagccaggagctccaggtccacctgcattagcctccctcaaagcacaaacatctgtgaaagcagaggctcgagagtacttctagagcggccgcgggcccatcgattttccacccgggtggggtaccaggtaagtgtacccaattcgccctatagtgagtcgtattacaattcactggccgtcgttttacaacgtcgtgactgggaaaaccctggcgttacccaacttaatcgccttgcagcacatccccctttcgccagctggcgtaatagcgaagaggcccgcaccgatcgccttccaacagttgcgcag

SEQ ID NO: 1038 - DNA, 2092 bp, Homo sapiens
ggcacgagtctacacaaggcagaagaggcacgggttttcctgggagcgaatatcaagtgcctgagagcaactacaggactaactgtgtttgggttgggtgtagtataaataataataatggctaatatttcctgagcatctactaaatgcaaggaattgtgcttggtgtgtcatgtggattctctcttgcatcttcatgataaatgttattgtcgctgttttaccgatgagggttggattagaggggttaaacaacttgtcttaggctccacagctgggaacaagtggggctgggaagctgacttcgtgctcttcaccaccacaaaggatgtgtgtgcatcctggggcatgcctgcctcatgtgggggtgtcctgggctgaatttcctgggcacttctcagtggaactctctagcctcctggttcggaatgtcaactatgagatcccctcactgaagaagcagattgccaagtgccagcagctgcagcaagaatacagccgcaaggaggaggagtgccaggcaggggctgccgagatgcgggagcagttctaccactcctgcaagcagtatggcatcacgggcgaaaatgtccgaggagaactgctggccctggtgaaggacctgccgagtcagctggctgagattggggcagcggctcagcagtccctgggggaagccattgacgtgtaccaggcgtctgtggggtttgtgtgtgagaggtagagaggcctcagcttctcctggtgggggtgctttgcctgtgttccccagctcatgacccttctccagttgtcttgttcccatataacatttgaactctttacacacctgaacctgtgggggccttgcccatttgaccatgtggcccaggccaaagcccagtgttggccttacgcatggtcggcaggagagtcagttgtgtgctctgttgaagccccacagagcaggtgttgccaatgctgcggttcgtgcagaagcggggaaactcaacggtgtacgagtggaggacagggacagagccctctgtggtggaacgaccccacctcgaggagcttcctgagcaggtggcagaagatgcgattgactggggcgactttggggtagaggcagtgtctgaggggactgactctggcatctctgccgaggctgctggaatcgactggggcatcttcccggaatcagattcaaaggatcctggaggtgatgggatagactggggagacgatgctgttgctttgcagatcacagtgctggaagcaggaacccaggctccagaaggtgttgccaggggcccagatgccctgacactgcttgaatacactgagacccggaatcagttccttgatgagctcatggagcttgagatcttcttagcccagagagcagtggagttgagtgaggaggcagatgtcctgtctgtgagccagttccagctggctccagccatcctgcagggccagaccaaagagaagatggttaccatggtgtcagtgctggaggatctgattggcaagcttaccagtcttcagctgcaacacctgtttatgatcctggcctcaccaaggtatgtggaccgagtgactgaattcctccagcaaaagctgaagcagtcccagctgctggctttgaagaaagagctgatggtgcagaagcagcaggaggcacttgaggagcaggcggctctggagcctaagctggacctgctactggagaagaccaaggagctgcagaagctgattgaagctgacatctccaagaggtacagcgggcgccctgtgaacctgatgggaacctctctgtgacaccctccgtgttcttgcctgcccatcttctccgcttttgggatgaagatgatagccagggctgttgttttggggcccttcaaggcaaaagaccaggctgactggaagatggaaagccacaggaaggaagcggcacctgatggtgatcttggcactctccatgttctctacaagaagctgtggtgattggccctgtggtctaccaggcgaaaaccacagattctccttctagttagtatagcggacttaataaaagaggaaaaaactcttgaaaaaaaaaaaaaaaaaa

SEQ ID NO: 1039 - DNA, 643 bp, Homo sapiens
ccacgcgtccgcccacgcgtccggcaattctggttccggggctctgcctccatatgcccctaaactctcttcctcagctggccttccactgggaacttccacttcagttcttagtggtattagtttgtatgaccctagggatcacggttcatcatccacatcagagctagcaacagcttcttcaggagaaaactcaaagaaccagaaaaaaagtggtggcttaaaaagtagtgacaaaactgaaccttctcctggagaagccatccttccacaaaaacccagtccaaacgtgggagtcactcttgaggggccagctgacccacaggcggacgttcccaggagttctgttctgtgctaaaatggggttgtggttaagtgaacgagaactctgcctacctaagaagttcattgtgttctaagtggaaggagagttactgaagggaatgtgaatttttaccgtttgtacttaagatacatttgttgtctaaaatggctctggataacatttttgggttaaaaaatgtaatttaaagccaccatagaaagtattttctgatttactgtccaaatgaattttgttgttaattgagaagtcaataaaatggattaaactgacaaaaaaaaaaaaaaaaaaaaaaaaaaa

SEQ ID NO: 1040 - DNA, 1896 bp, Homo sapiens
tcgacccacgcgtccggccagagactgcaaattcacagcggctggtggggaagaagtagcccttgaccatggysaagggctacttcttccccaccagcgccagagactgcaaattcacaggcaatttcttttacaactacatgatgggcatcgagtttaaccctcggatcgggaagtggtttgacttcaagctgttcttcaatgggcgccccgggatcgtcgcctggaccctcatcaacctgtccttcgcagcgaagsagcgggagctccacagccatgtgaccaatgccatggtcctggtcaacgtcctgcaggccatctacgtgattgacttcttctggaacgaaacctggtacctgaagaccattgacatctgccatgaccacttcgggtggtacctgggctggggcgactgtgtctggctgccttatctttacacgctgcagggtctgtacttggtgtaccaccccgtgcagctgtccaccccgcacgccgtgggcgtcctgctgctgggcctggtgggctactacatcttccgggtggccaaccaccagaaggacctgttccgccgcacggatgggcgctgcctcatctggggcaggaagcccaaggtcatcgagtgctcctacacatccgccgacgggcagaggcaccacagcaagctgctggtgtcgggcttctggggcgtggcccgccacttcaactacgtcggcgacctgatgggcagcctggcctactgcctggcctgtggcggtggccacctgctgccctacttctacatcatctacatggccatcctgctgacccaccgctgcctccgggacgagcaccgctgcgccagcaagtacggccgggactgggagcgctacaccgccgcagtgccttaccgcctgctgcctggaatcttctaagggcacgccctagggagaagccctgtggggctgtcaagagcgtgttctgccaggtccatgggggctggcatcccagctccaactcgaggagcctcagtttcctcatctgtaaactggagagagcccagcacttggcaggtgtccagtacctaatcacgctctgttccttgcttttgccttcaagggaattccgagtgtccagcactgccgtattgccagcacagacggattttctctaatcagtgtccctggggcaggaggatgacccagtcacctttactagtcctttggagacaatttacctgtattaggagcccaggccacgctacactctgcccacactggtgagcaggaggtcttcccacgccctgtcattaggctgcatttactcttgctaaataaaagtgggagtggggcgtgcgcgttatccatgtattgcctttcagctctagatccccctcccctgcctgctctgcagtcgtgggtggggcccgtgcgccgtttctccttggtagcgtgcacggtgttgaactgggacactggggagaaaggggctttcatgtcgtttccttcctgctcctgctgcacagctgccaggagtgctctgcctggagtctgcagacctcagagaggtcccagcactggctgtggcctttcaggtgtaggcaggtgggctctgcttcccgattccctgtgagcgcccaccctctcgaaagaattttctgcttgccctgtgactgtgcagactctggctcgagcaacccggggaacttcaccctcaggggcctcccacaccttctccagcgaggaggtctcagtcccagcctcgggagggcacctccttttctgtgctttcttccctgaggcattcttcctcatccctagggtgttgtgtagaactctttttaaactctatgctccgagtagagttcatctttatattaaacttcccctgttcaaataaaaaaaaaaaaaaagggcggcc

SEQ ID NO: 1041 - DNA, 3362 bp, Homo sapiens
  misc_feature (1488)..(1488): n equals a,t,g, or c
cccacgcgtccgatttttaattgggataaaatacacaacatttacaattttaaccatttttaggtgtacttcagtagtggtaagtctattcacaatgttgtgcagttggtttttccttccacttttcttaaccattctcaatatcgcaactacatccactttgtgcaaacatcaggtttgtgcaccttatacgtagggaagggccattgcctccctcactgttatccaagaacacctttgaggattcatctgcactatgatttctgtgggaaaatacatttaaagtgccagtcttcattactctcagaacacggcctgtttgggaagtaagcactggcttgcatttttttgtccccttggcagtaatctggcgagcggctgggtccttccatggacccctttggaaacctttgtattaatcttctggctgtctcctttaagaaactacaagattaacctttttgcagccctttctgttctgggattcttgaatctggcagcaggtaacgacaggtcccatcagaaacaggtcaagatcttgacttcctgccctccctgggagcagggcccacgagcaccacttaacacctttttcccctgacccagcctcattccagccttctgcaagtcctgctttcctctccaggacctttgttcctgctttgcttcctatatttcagccttttaccttctgacccttggccctagctgcagcatgtgttttgtgacggagtgtagggactggattgtgcagagaccctctttgcatctgtctgggccctcgggcctattacaggagggacccctcacccttcctgcctgcaacaagggtcctccaaatggaaggctggctttttagcccctaagggctaagcgttgctctctttaaagcccaagaaagtttttaaggggcaagagatccctaatatgcatgaatgactctcacaagacaggcaggaagtctccaagagacttcctttacccctagggaaatgccatctgatctttgagataaggggctgggagcagtttgatttcatctccagagaaggaagccctcagttaaggggtcatcttgctcttttccccactccagggcctctctgccttatctctgtgccacctgtgacccaggccttatacatgattgagaggattacccaaacagacctaattgacttattggaaatccaatcctttgattttttaattccattcttctgttgctgctttattatggaagacaaaggagactcccctatactgcctagtgaaacaatacactctgcagccccgactgtgtacgactgtgaggcctcctgtgtcagcagatgtgcatgtactctctgtactgatcccctggaaaggtggcctgtttgaaagcagtcctgcccaggcctgcagtaatgaagattaagcctcagagtactacaggttacccattttgttttgtttagcccctttcatcaaatgcttataaaattctangaacttacctagggtttattgttgataacctcaaacatatgtgaatcatccactccaaactagggcaagttttcttctcaggccctccaagggagttcggtgacatccggcacattgtggggatgaataggctgaaatgccaggtacacagttagtggaaagactccaaaccaagcaaaggttgaacgtcaggtaactggagtagggggtgtattagttagctagggccgctgtaacaaagtaccccaaacggggtggcttaaacaacagatatttattatctcacttttctgggggctagaagtccaaggtcaacgtgtgccaaagttggttccttctgagagagctgtgaggtaggatctgttccatgactctcttatcgtttctggtggtttgctggcaagctttggcattccttgccttggaggtctctgccttcatcttcacctgcattctttcccctgtgtatgtctggaagtccagagtatactttttataaagacaccagtcatattggatgtttaaaatgacctcatcctaactaattacatctgcaaggaccgtctttccaaataagatcacatcctgagggtactagggtttaggacttcaacttatgaattttgggggagagatagtcaacccataatgggcataagagaccgggagtggtatatgaaatatagtttgaattccacctcaagaccttgagcttatgacttctgtctagctctgtgtatcattcatacttcccactaatttttaacaaaatgactgggagagggagaaagtgaaacccggtggactgaggcttgagtgagcattacctcctgggcctgttgatttgcgtctccctggtgaccttcttctctgaccagcatccgtgggcttagggaaagcacagtggtggaaatgtgatcctggtgtgtgagatgcaaacttgatcttagcctttgctctccctggaaacttatcggtcaaaattttcactaaaggcagttttttgtctgtttgtttaggtttactggttatttattatttatagcatggttaaattgggtcaaatttttatgaattgtaagtagagaaacttttctaataagaggaaaggataagaaatcagacctttttgtaaagaaaattaccccacttaaagtcctggtttattttaggccgtttggcagtgagaagaagggattatttgtgtctgacagaggtctacaaggaaaaaggtttgggatcagaaaacacttccaaccagaatgacggttccctgccagtccttggtctttcttcctcccttccttctgtgcccacatggactaattatgtctggctttccctccctcttccttgtatatttcccttccatatcaagaccttcagaatgagggcaatgtggataatttcccagttttccagctgggcagcttcaccaagaacaaacccagacatcaaggccagaccaaaaaaatcttcttgttttagacagaagactcctacatctgggggatttaatgcacccactgtccgctcagtgcatttcctgtgtccggagcttctctgcctgccggctctggtctcgtaagtttccatgccctgctgccaacttataataacagaggcggcaggcagcaggctgagaatgtcatagcctactccatacatgggcactgctttgcagactgaaacaaagcttgcagggtctcattgcaggcctctcagccttgacagtggttgtgcccagaccaccaggagcctggaattaaataccctcggatccagttctctactgttaatgttatcagcttcatcaagtacttcctctttgagtgatatctgtggagaaataaataaatcaagctccctagttc

SEQ ID NO: 1042 - DNA, 842 bp, Homo sapiens
ggggagggactgtctgggttcaggggcatggcctggagggctggtgggcagcactgtcaggctcaggtttccctgctgttggctttctgttttggtttattaagacttgtgtattttctttctttgcttcctgtcaccccaggggctcctgagtataggcttttcagtccctgggcagtgtccttgagttgttttttgacactcttacctgggcttctctgtgtgcatttgcgtctggcctggagtaagcaggtccgacccctccttctttacagcttagtgttattctggcatttggttaagctggcttaatctgtttaatgttatcagtacattttaaataggggcattgaaatttactcccaccaccagggcttttttgggggatgcctgggcctttaaaacactagccaaactctaattaattctcaaatcactgccaggagttcttgctcctggctgcaggcccaggccccaaggtctccttcttggggtcacaaacagcagtaaggaagaggaatatatagcaactcagggcctgggaattgtggggcaatccgttcttagggactggatacttctggctggctgagtatagtactagctgcctccccaccaggttccgagtagtgtctgagactctgctctgcagggcctagggtagcgctgggagtgtagaagtggcctgcccttaactgttttcactaaacagctttttctaaggggagagcaagggggagagatctagattgggtgagggggacggggatgtcagggaggcaagtgtgttgtgttactgtgtcaataaactgatttaaagttgaaaaaaaaaaaaaaaaaaa

SEQ ID NO: 1043 - DNA, 419 bp, Homo sapiens
  misc_feature (419)..(419): n equals a,t,g, or c
ccacgcgtccggaaagatatctcactggttggtggcccgagagaggcctcttatgcttctaagatccaatggatctgtcccacctcttggccctctggtgccatcctgggcttcactgctgctggacatgctgttcttccccttcacagactacttcctttcagtcaccttttcagtttcttctccatcccccacccatggcctccaactctgcagccctctgctctcctctctctgtcttgtctccagagttccatcttctcacccgacctggaccattactcccattcccacaggcactgcagctttttttcagaactgaaagtttaaattccccctttatccttctccttcttcacctacaaaaaaaaaaaaaaaaaaaaaaaaaaaaaaaaaaaaaaaaaaaaaaaaaaaaaaan

SEQ ID NO: 1044 - DNA, 1262 bp, Homo sapiens
acgcgtccgcccacgcgtccgggtccaagcacttacaagttttttgtagttgttaccgctcttttgggttggtttgttaatttatacaaagagattaccaccaccaccccctccttcagacggcggagttatattctgggttttgtaaaactttatgtatctgagcatttccatttttttttttgggttttgtattatttcttgtaaatgcattgtgaaaaattttattttcggcgttgcaatgcggggaggagaagtcagattatgtacatagttttctaaaaagcctttcttctaaaaacgaaaaaagaccccccacccaaaatgtttcgagtcaacaaatttaagagacagagcccattttctccataaatttgtaacatgctatttttatgtgcatgttttatgagttcaaaatgcaatgaggaaatctgacaggggaaattatctgtatgaactaaaagtaagggaaccccggggaatgggaggacaggatttttcaaggaacctttttcaatgaaagagaaggaagttaaaacctataggttattttgtagagctgagtgttaatacgggccgagaaataaaagtatcttctgctccggctgtttcactgcggacggctggggctgctgcgcgttaccttgctgcaagcggggcgccttccacctggctgggggtctgcgccacagtttggtccagaggagggaggaggaagggaagaccccattggtgggaccctggaccaggccatggatgaaggacaaagaccagggcaggtcacgggtttcccaattccccagcaattaagatttcgagcagaatttatctaaatgtgtttcaaggaaacacaatcgctgaaccaaaacgtactgcagccgagccccctccgtccatcttctgcccctccccctggcttctttctcttgggaaaacgggcaaaataattgtgctggattctcacacacacagaaatatcgaccatcaccctcccccgcgtgaactgggatgcaagttgctaaccgatgtgaacgcaaaatgccttgttcattattcctgacgagatcttgaggttgtttgatgctttaaattttttaattatattattttctaggtgtttattggtacattgcagttttttttttgaaatttaaaaatttctgtaaaactttgtcttcaagtaatctgacagcattaaatattgcatttaaaaattaaaaaaaaaaaaaaaaaaaaaaaaaaaaaaaaaaaaaaaaaaaaaa

SEQ ID NO: 1045 - DNA, 1624 bp, Homo sapiens
cccacgcgtccggccccagattccgaggggcctgccagggactctctcctcctgctccttggaaaggaagaccccgaaagacccccaagccaccggctcagacctgcttctgggctgccatgggacttgcggccaccgccccccggctgtcctccacgctgccgggcagataagggcagctgctgcccttggggcacctgctcactcccgcagcccagccactcctccagggccagcccttccctgactgagtgaccacctctgctgccccgaggccatgtaggccgtgcttaggcctctgtggacacactgctggggacggcgcctgagctctcagggggacgaggaacaccaccatgccccggggcttcacctggctgcgctatcttgggatcttccttggcgtggccttggggaatgagccttcggagaatgtggcccttgacgcagaatgaggagtgcactgtcacgggttttctgcgggacaagctgcagtacaggagccgacttcagtacatgaaacactacttccccatcaactacaagatcagtgtgccttacgagggggtgttcagaatcgccaacgtcaccaggctgcagagggcccaggtgagcgagcgggagctgcggtatctgtgggtcttggtgagcctcagtgccactgagtcggtgcaggacgtgctgctcgagggccacccatcctggaagtacctgcaggaggtggagacgctgctgctgaatgtccagcagggcctcacggatgtggaggtcagccccaaggtggaatccgtgttgtccctcttgaatgccccagggccaaacctgaagctggtgcggcccaaagccctgctggacaactgcttccgggtcatggagctgctgtactgctcctgctgtaaacaaagctccgtcctaaactggcaggactgtgaggtgccaagtcctcagtcttgcagcccagagccctcattgcagtatgcggcacccagctgtaccctccgccccgtggtcccccagctccccgctcactccacgggctcggtgaggccggtcagggcacagggcgagggcctcttgccctgagcaccctggatggtgactgcggataggggcagccagaccagctcccacaggagttcaactgggtctgagacttcaaggggtggtggtgggagccccccttgggagaggacccctgggaagggtgtttttcctttgagggggattctgtgccacagcagggctcagcttcctgccttccatagctgtcatggcctcacctggagcggaggggacctggggacctgaaggtggatggggacacagctcctggcttctcctggtgctgccctcactgtccccccgcctaaagggggtactgagcctcctgtggcccgcagcagtgagggcacagctgtgggttgcaggggagacagccagcacggcgtggccattctatgaccccccagcctggcagactggggagctgggggcagagggcggtgccaagtgccacatcttgccatagtggatgctcttccagtttcttttttctattaaacaccccacttcctttggaaaaaaaaaaaaaaaaaaaaaaagggcggccgctctagaggatccc

SEQ ID NO: 1046 - DNA, 224 bp, Homo sapiens
ccacgcgtccggaaacaagtttcaccaaacaatacttagccttattttgtatatgcagtgcattataatattttctattttgttctgtctctttttttgttcatgcttgacacaaaacattaaattggttttgcaacctacaatttgaaataaaaatcacagatgtatttattccaaaatagaaaaaaaaaaaaaaaaaaaaaaaaaaaaaaaaaaaaaaaaaa

SEQ ID NO: 1047 - DNA, 1567 bp, Homo sapiens
ccacgcgtccgctttggagaacagctcacaccccagagggaagtggcttggacaaagggggctgctcagcagacttcgatctcctctgggggatgtggataccgctcaggcccgcacccctccattggtcctggagactgatatgggaggcggtatgtgccttggctccggagggcacctggagcacccctcacctggagaaccctcatccagagcactcctttcctggagcacccctcacctgaagcaccctcagttggagcatcctctcacctagagaaccctcacctggagcaccctgttacccggggcaccctcacctggaaaaccctcatctggagcaccttctcacctggagaaccctcacctggagcaccctgttacctggagcaccctgttacccggagcaccctcatctggagcaccccctcacctggagcaccctcagctggagcacccctcaccggagagccctctcctgcagaacccctaccaggagcatacttcaccggggaccaccccttgccttgatgcctcagcactgaggagtctcccatctaggtggctggggaagggcactctggagccatggggatgaaggaccagaggctgctgggtacatcttgccctgagactttggaggactgcaaggggacccacattcacttcagctctgcacctgtggtgatatccccacactggagagcaaagtgattgctccgggggccagatggccacgccaccatccccccacacactgcccctgccccctgcctggagcacagcccgagagcacccaggatcatccatgtgaagcagcaggctgtgggtatgtttggccgtcccgacccctccacagccagaatgggcacccataggcatgagaacctcacagccattaggggtgccctgagtgccatgggcggtgggatttctctgatgccccccagctcttgctccctgcctggctcgccccctatcaaggctaaggatgactcagggcccagccatcaccatagcaacacgcgtcgcctagcaatggcggtctcccggcaacggttgtctcctaagcaatgggaatattttcctgggccctggctgggcccggcagttatttttagctccacagcaaatcagtcggcagctgcattttcggctccttgaagagaggcaaggtgtgggggggtgggtctctcggcaaagggaggaaagcatccccaagataggaatcttgctgccgtgggcccggaggtgcaggcctgtgggtgggcgaggccggatcctgcctgtgcaggggggcaggtggccggtggaggggagccaggggttgtgcaggctgcctggatgagtcggcagctaggactatgtccttgatgggcccccaagcaccctgagcctcataggtcggctgggtagaggggacgcaggccagtgctcacagctgcactatcagagcatctttctgggtggcccagggtctggcaggctcttggcacccagtgcccctcagctgtgggagccatcttcactgtcccagaccccagctccacccagggagggggcagca

SEQ ID NO: 1048 - DNA, 1681 bp, Homo sapiens
ccacgcgtccggacagcagaaccagcggcggcggctaagcagagactgtagtagcggcgacagcgacgacggcagcgatggctggggcggggccagccccgggactcccgggtgcaggaggacccgtggtcccgggtcctggcgctggcatcccgggcaaaagcggcgaggaacgcttgaaggaaatggaggcggagatggccctgtttgagcaggaagttctgggggctccagtacctggaatcccaactgctgtgcctgcggtgcccactgtccccacggtccccacagtagaagcgatgcaggtcccagcggctcctgtgatccgcccaattatcgcgaccaacacataccagcaggtccagcagactctggaggcccgagcagctgctgcagccacagtagttcctcccatggtgggtggccctccttttgtaggccctgttggctttggccctggtgatcggagtcacctggacagcccagaggctcgagagccatgttcctgcggcgggcagctgtggccccccagagggcccctatcctgcgtccagccttcgtcccccacgtgctacagagagcagcagccggcccccgccctatggccctacggccccctcaccaggccctcgtgggcccccctctgcctgggccccctggaccacccatgatgctgccaccaatggctcgggctccagggcccccgctgggctccatggctgcactgaggccccctctggaagagccagcagcaccccgagagctgggcctaggcctggggttgggcctgaaagagaaggaagaggcagtggtggcggcggcggctgggctggaggaggctagcgcggctgtggccgtgggggcaggaggtgccccagctggccctgcagtcattgggcccagcctgccgctggccctggccatgccattgcccgagcctgagcccctgcccctcccgttggaggtcgtccgcggcctcctgcccccgctgcgcattcctgaactcctgtccctgcgtcctcggccccggcccctcggccagagccacccccaggcctcatggctcttgaggtcccagagcccctgggtgaagacaagaagaaggggaagccagagaaattgaaacggtgcattcgcacagcggcagggagcagctgggaggaccccagcctgctggagtgggatgcagatgacttccggatcttctgtggggatctgggcaatgaggtgaacgatgacatcttggcacgcgccttcagccgcttcccatccttccttaaggccaaggtgatccgtgacaagcgcacaggcaagaccaagggctacggcttcgtcagcttcaaggaccccagcgactacgtgcgcgccatgcgtgagatgaatgggaagtatgtgggctcgcgccccatcaagcttcgcaagagcatgtggaaggaccggaatctggacgtggtccgcaagaagcagaaggaaaagaagaagctgggcctgagatagggtctgtggccaggcacccgctcccacctggccgggcgctggctcctccctcagttctctttggaaaacccccagctgtccacccatcccctgccccaaaaccagtttcaataaatttacgttcatttccaaaaaaaaaaaaaaaaaaaaaaaaaaaaaaaaaaaaaaaaaaaaaaaaaaaagg

SEQ ID NO: 1049 - DNA, 697 bp, Homo sapiens
gtaccaaccagtgaagtacaccagcctgctggcagacaaagtgggctgtaatgtgctggacaccgtggatatggtggactgtcttcggcaaaagagtgccaaggagctggtagagcaggacatccagccagcccgctaccacgtggcctttggccctgtgattgatggtgatgtcattcctgatgaccctgagatcctcatggagcagggcgagttcctcaactatgacatcatgctaggtgtcaaccagggcgagggtctcaagtttgtggaaggggtggtggaccctgaggatggtgtctctggcactgactttgactattccgtctccaattttgtggacaatctgtatggctatcctgagggtaaggacaccctgcgagagaccatcaagttcatgtatacagactgggcagaccgtgacaaccctgagacccgccgtaaaacactggtggcactcttcactgaccaccagtgggtggagccctcagtggtgacagccgatctgcatgcccgctacggctcgcctacctacttctacgccttctatcatcactgccagagcctcatgaagcctgcttggtcagatgcagctcatggggatgaagtaccctatgtttttggggttcctatggtaggccccactgaccttttcccctgcaacttctccaagaatgatgttatgctcaaaaaaaaa

SEQ ID NO: 1050 - DNA, 733 bp, Homo sapiens
gtcgacccacgcgtccgtaaaatatgcttcctggtttagtggcatcaaataaatgttgatatcttacatttttgttgttagtactaaatatttgtaactttcatgtgagcttttccttaaaccataaattattttagaaatctgccttttaatttctaaaggtatttttattttttcagttaaaaaactactattgtttgtaatgttattgcaattacagaacctggtttatgtgatataattttttttgaactgcattgagaattgctttcacaaaagactgtatgttgtatttattgggatgtatatcaagctattgattgtattgcttgaatcatttgcactcttatcatgcttaatggaacagtttctgatggagatgtgttgaaaaaaaccactatgattgtgtatttgtcaatttgtactttacattctggtaatttttggcgtatgtatttcaagggtattttgttaggtgaagcaaatttatgatttctacatcttattagttatgttttctttttattattagctccctttttatctttattagtattgttggccttaattctatttgactaaattaatactattaaattggccttattttcaaatttttatgcccagtttttgaataaaaagcctagatattctataaaaaaaaaaaaaaaaaaaaaaaaaaaaaaaaaaaaaaaaaaaaaaaaaaaaaaaaaaaaaaaaaaaaaaaaaaaaa

SEQ ID NO: 1051 - DNA, 680 bp, Homo sapiens
ccacgcgtccgaattaaatggctgttttaacagtaggctcttagcattataccacatagtcatttttcatgttcttgtttaacaggcactgaggttctggtttaaattaaatagctgcaaatgagacaatttataacccattaggttgggtggaaaattgtttctcaaaagcaaataagtaataaatctggtatctgcctataactcacagttgataagaaagtggccatttctcactagcattatatatgatttgggctctgggtaatttggaagtgttaggtttgtgtctttgtagcagtatttttattagaaaagaatctattggccttttacagggtattaatccctttgtcacctaccattgatgccttaagttttctgagtctcaattaaaaatcttccttttcttgatgcatgacaagtgtaatcagtacttgctcatttatttgtctgtatttagtttatgctgtactatttaattatccttccagcgtttttttttctccttacaaatatgatactctttagtgttaagctaaggcattgattcatgtatctgtccttataatgaattaataaactattttccagaaaaaaaaaaaaaaaaaaaaaaaaaaaaaaaaaaaaaaaaaaaaaaaaaaaaaaaaaaaaaaaaaaaaaaaaaaaaaaaaaaaaaa

SEQ ID NO: 1052 - DNA, 1661 bp, Homo sapiens
ccacgcgtccgtccaactttcatgtgctggtaaaccttttccacaatccctgtttacaacacaatataattataattcctcttaattgatatagatgaaaatagaattaacatgtgacttaaactgtttgctatttttatggaacatgaaagcacataaaagttctggttataatgggctactaggaattttactctatttgatatatttcttgctttttgatattttccaacaatttgttcttggcccttcttgggaagcatcagtcattctcaaactccagatatgtatttctaacttgaaaggttagcctggatgaatcccatcagcacctgctgactgtgtctttctgccattgattgaagacccactgggtctcttccaatgcaacactgataaaaataaaacctgatttccccatcagttaattgtgccgctattgacgcacgtgcctaaaagaaatcttgtgtcggccttcttcaaaataaatggtaatttattcagccattcattcaacaaattcatctctacatttattgatacctactgtgtgctgggtgttacagctactatgacgagcaagagagacaaacccagtcctcaagattattacagtatgacggggaagtcatactatgaacaaataattataaaagtcagtaattttttagtaatcatttagtaaatgctttgaaggagaagcacaggaagtgtaaaagtgcaggcaaacggaagttagacctacagggattccatttttgcccctttttattatatggagtcgagcagccaaagacagccctcttgccacctgctagaatgctcataccccttcccctggactaaaataacattcctctccttagggtgatatacaacgccattcatgcctagacccaagtataccttttcagctttggcttctaatgagcactgcatactagctacccagggccactcacaagtccctcagcagggaacacattttaatttctctgtccatttgcattgttctcactagcccatctacctgttgaactcttacttgctcttctatacccagatcaaatgtcatttcttccctttagctttcacactttcatagacacttggcctctacctcttcctgggtggcagtaaatgcttcctcagtcatgtgcacattcaagcacttagcaataggaccctgtaggatacagcaaggggtctggaccttggaatcagagaaacatgaggcttgagccttgtgtttgtgaactattgattgcaacaatttacttaagtctctggactttagtttcctcatttgtaaaatggaaagattataaagattgactttaaatgcaaaatgcttagtacagttcagggcatctagtagacaactaaaaaatgctcatttgcatactcttgtatcatattggattgtcatgtaactgtctgcttcccctgagaacaagagccatgtctttttattcctatgttgattctgccttgatttatattctaactaaatttcataagtattttcctcccaactatgtttctttcatgcaagaagcttttaaatctccacaacaaaaatggaaactcaattgattatacagattgaatgaaaaacaaaacaaatatttctagtaataaaaaaaaaaaaaaaaaaaaaa

SEQ ID NO: 1053 - DNA, 1336 bp, Homo sapiens
gaaaaaaaaaaagtcaagaaactgaaattcccatttaagttctcaaatcagtgatctgtcaaaataggccttgtaactgaaataccttacaaagcagttctaactaatgcaatgtgttttttaaaaatttttaatgaaccttacattgtgaacataattgcaacatgttttaagacaaacagtatttaatccttgaagacctgtcttgtatgtctctcaattttgtcagaatttttattattgtttttcacatatgtgaaataagcagttttttcagggtacatagggtatctttgttttacagatttttaaagatgaggttttgaaaagccctcagaggtttttgttaaaagactatcttgcttaataaatgacaacttgttacagattcacacattacaagtaggacagtataacaggagattggtgtgtgaatgctacaaaacagtcagcaaaaggaatcgtttgcttgtgaaacttcagaggtaccctgaaagtcatttcctaaagctagtgcatgtgaatyttttccttgaattgtgcagaataattggattgaggcacatattttgaggagtagcaagtggaatggtataatgactacagagaaaattatcttgaaatatagcaaggaagagaaacaagttttctttctccactttattgttggactaattgggtcaatttgctgtgacatatcaaagatctctttgtgccaggccaagactggctactgagttctcaaagcgttttaatatatagattacgtatgagtgcctattttttcctcctcctttcattttttatcttaatacccattttacttctgaaataattcatctgttttgctttatgaccagctttaatttcaattgaggaataataacaaccctagagattcataggaaagagcattgaaatacattttttgcataaagatacctaaaaccatctacccagcttagggttgaactgaatttctgtgaaataaatttgttttaaatactaattattttaaaactacttaattcttaaaaacaatgtcatcagtttcaaaagtttcactttgggaggatattccttaaaaggcatacatagatggtaaagtataaaatatttctgacagaattattcagtattattcaacatttactttcatgtttgttattgtaccacaaagatagtgtcattgttgggttaaaatgttggctgtttttgttaatatacttaaaactgtaaccagtgaataacacctgtagtattttttattatagattatattttatttcaataaactttgatatttagaccaaaaaaaaaaaaaaaggggggccgc

SEQ ID NO: 1054 - DNA, 3569 bp, Homo sapiens
  misc_feature (903)..(903): n equals a,t,g, or c
gcccacgcgtccgggggattcgtcgcggcgccttctgagtggtcgggtcgaggcttctcggcctagcagtgccctcgctgcgcgatctcaggcgggttctcctcggctccgcgcagcccgcgccgcggtgggggacccggcgcagcggcacctgctgccgagggaccccgcggcccgccccggtgctcgtgatggggctgatcttcgccaaactgtggagcctcttctgtaaccaagaacacaaagtaattatagtgggactggataatgcagggaaaaccaccattctttaccaattcttaatgaatgaagtggttcatacttctccaaccataggaagcaatgttgaagaaatagttgtgaagaacactcattttcttatgtgggatattggtggtcaggagtctctgcgatcatcctggaacacatattactcaaatacagagttcatcattcttgttgttgatagcattgacagggaacgactagctattacaaaagaagaattatacagaatgttggctcatgaggatttacggaaggctgcagtccttatctttgcaaataaacaggatatgaaagggtgtatgacagcagctgaaatctcgaaatacctcacccttagttcaattaaggatcatccatggcacattcaatcctgctgtgctctcacaggagaagggttatgccaaggtctagagtggatgacctcccggattggtgtgagataacttttttgcttgaaagagactgctctatttattctgtgacatgaacattttttcctagtacctttggctgctaaggcagcagcatgtttaatttataacaacacaaacctctgagagcaacacttgaatcaagtgcagctgaactggaacataaaagattttttcttaattnttttttttttaacacactaatcttcagttggatgaatgtaatgtataactatgttttcagcaacaattcttctgtttattctaattaatcagtgactgccttgtaagaaatgtttgtcatatgcgtgatgtcttctgaaatattcttataaccttaatgaccaattgctttcaattcttgaccagcactccctcccaaccagagaattactggtttgatagagtagtcttggaaaccatcaggtactgcctgcagacttctccagcactaaatatatttgttccctctataaaccattcatctttcggacagaacttactgtaaagaaagaaatctgcctagaggatatatgtaaggaagattccacatcatgagtacttgccttttaactttcccccacattactgttgagtcatggaataatgtttaagttgttatttgcatggaaattaagtaggctgtttatttatctaaaggaatcaagtccactcttctgcctgcaacatttgttcaaaaactaaccaaggtaaaatatttatttgaaagcccaactttgatgttaaatattcttgaataaatctgttattttaagaatatcacattattcaatgcatataaaactatcagaagttagtaaatcataccagcactaaaaataagacaattggaatatattttagcatcagtttacaaacaactttattatcaacagaaattttagctcttttctttgcaagatatatcacagctgctttgggcagtagctgaagccgaagtatgaacagtccattttgkttcttaaaatttgaagtcgtgtctgtcatagcatttttactaccagcagtatgttacttaaaaaactacatggctttccttgaatttatttgacggtwttatgtaatakacttgaaacaattgccatctttgtagttatgccttgggttctaaaatgktataggaaactgctgaattgaatcctagcttttagaatattaataggagactcaaagttaatattcttaacaacttaaaattaaaaaaagtcataatctatcaaaagtttatttattggatggcattaaaacatttttgaggcagttgtctaatatgaacaataatctaaacaatatattccttaaattaagaggaaagacaagtgtcgtatttcgatcctgkttattcaaatgtgtgattttgctgaaatgaaagggataaaatgaatacttagagaataatacttcatttttgcagtactttttaattttgataaaaaagatacaaagttcataatatcaaaatatgtgttcaaaattggtattttaattttaatatttttgtaagttgatttaaattttgctctttttttcaggtgtgcttggtttattatatttagtcaagttaatttagtcgaatgtggtaacattcttctgatttatctttagttggagcacacccttgaactgaacagtggccaaaggaaagctttctgggctttggaaagtagttgtttaactttgttttaagccgttttcttagtgattctgtatcaagtagaggataagtgwagtttaacttagtttttaatataacccataatcaagaacatgagcgaaaagcagacataaatcgatatggatggtttgtggtgtgtgtgggatgtgggggaattaagaaaatgccatttacctaagcacagtttgcctgaatttctgcttggttgtgttgtttaccgtaagtactgagggtagtttccctaagtctgtcctgagaaaaagcatacttagtactcctgtatttgttcttatgaaatgactatctgccttcttgtatctagtaagattggctggctcaattttcttctgtcaaattatatggttattttttatattaccacatcagcattatattaaaagtgtttttaatagttgattgtattttgccaactactagtatagactcaaatttgctatttaatttttaaaatacaatttattttgtaaatcctttaaaaaatatttggttagttttggattagaaatgatttatgttagccatgtgttgaagatgaaattggcatcagtgtagacggtgctgattgggaaaagttcatgattaggaaattcatgtaagactttttaagagtattttttaggttttcactcaatctttcctgtcacagtaacgtgaaaactgattattctttactccaagagaatgttttaacccaagcaagtatctaatactagagcattggttctgacattcattgtaaatcagtgaactgtaagatactgtctaaaaaatgtacatttgtaattagtgcctttattcatattttgaaataagttcttagttttatattatacctgttctttagaagtcatgttagcagctaattatttcagtgatgaaataatttgtgttttatatcccccttcacctccatgtattggttagcacagtttatagtaagtgaaaagcaagggacccacctacattaccttcaggagactgttctaccttttaatttgaaaacaaggaaattaaattttaacagaaatcttttaagtatgttataaccaaagtgttcaattatccttgcaagttcaaatacagcatttttcttaaaaaaaaaaaaaaaaaaaaaaaaaaaaaagggcggccac

SEQ ID NO: 1055 - DNA, 2074 bp, Homo sapiens
acgcgtccgcgggagcttcctgctcgtgttcgctgttgagaagctacccgcggggttgtagacttcggacctcatggcagagataattcaggaacgcatagaagatcggctcccggaattggaacagctggagcgcattggactgttcagtcatgcggagattaaggctatcattaagaaggcttccgatctagagtacaaaatccagagaagaacccttttcaaggaagactttatcaattatgttcaatatgaaattaatcttttggagctgatccagagaagaagaacacgcattggatattcattaagaaggatgagattgagaattctattgtacaccgggtacaaggtgttttccagcgtgcctcagcaaaatggaaagacgatgttcaactttggctctcctatgtggctttttgtaagaagtgggctactaaaactcgacttagcaaggtattctctgccatgttggcgattcattccaacaaaccagctttgtggattatggcagccaaatgggaaatggaagatcgattgtcttcagaaagcgcaaggcaactatttcttcgcgcactgcgctttcatccagagtgcccaaaactttataaagaatactttaggatggagctgatgcatgctgaaaaactgaggaaggagaaggaagaatttgaaaaagccagtatggatgtggagaatcctgattattctgaagaaatccttaagggcgagttggcatggatcatctacaaaaattctgtaagcataattaaaggtgcagaatttcacgtgtcactgctttcgattgcacagctatttgactttgccaaagatctacaaaaagagatttatgatgaccttcaggctctacacacagatgatcctctcacttgggattatgtggcaaggcgagaattagagattgagtcacagacagaagagcagcctacaacgaaacaagccaaagcagtggaggtcggccggaaggaggagaggtgctgtgctgtgtatgaagaggcagtgaagactctgccaacagaggccatgtggaagtgttacatcaccttttgcttggaaagatttactaagaagtcaaatagtgggttccttagagggaagaggttggaaagaaccatgactgtattcaggaaggcacatgaactgaagcttctgtcagaatgccaatacaagcagttgagtgtttcgttgctgtgttataacttcctgagggaagctctggaagtggcagtagctggaactgaattgtttagagactctgggacaatgtggcagctgaagctgcaggtgctgatcgagtcaaagagccctgacatagccatgctttttgaagaagcctttgtgcacctgaaaccccaggtttgtctgccattgtggatttcctgggcagagtggagtgaaggtgccaaaagccaagaagacactgaggcagtctttaagaaagctctcttagctgtcataggtgccgactcagtaaccctgaagaataagtacctggattgggcttatcgaagtggtggctacaaaaaggccagagctgtgtttaaaagtttacaggagagccgaccattttcagttgactttttcaggaaaatgattcagtttgaaaaggagcaagaatcctgcaatatggcgaacataagagaatattatgagagagctttgagagagtttggatccgcagattctgatctttggatggattatatgaaagaagaattgaaccacccccttggtagacctgagaactgtggacagatctactggcgagcgatgaaaatgttgcagggagagtcagcagaggcatttgtagctaaacatgctatgcatcagactggccatttatgaagatgaagaatacagtcagctttgtgaaatagtattgcaagcaagccccgtgggcaaatttgtattgagtccatctgtaatttgctcagtgatggcagacaagatggctgtctggttttgagacacactttaattttatgttaacttgttaaatctttttaaaaattaaaaaatttttatgattgaaaaaaaaaaaaaaaaaaaaaaa

SEQ ID NO: 1056 - DNA, 2010 bp, Homo sapiens
ccggaattcccgggtcgacccacgcgtccgtgaaaatctttagcaggatttataaacgtctttggaatgatgtagcacaacagtgttttactgtggggaatggggaatgactatctgaaagggaaaattgtttggcattttatattatttccaggcagtgcaaactgtctagcaagtagaatgttcatatatgaatctaatatagcaaatttatccctcataatactgtttttgaaacatcaagtttattctcaatgtgtggctctaatgacaatttcttgggaacgtaatagaactgcaataatgactaatggaaaagactctaaagctgtatctgatgggaaatgatttactttttaaactctttctatttaaggaattagcttaccgaaaggagatggtgagagctgacctaattaacaagaaagttggaatcagagaaactccagaaaatcttgccaaaccttctgaccaggaggtatttaaatcagaagtcataggtgatgggaacaggttggggattgaaatccctccaaccagaggctgaacttatccatgccatgtgaaattgtaggaagaggcagcatggctaagggtataacaacattcagtggccccccgaacctttaaccataggcgaaccaaatttcccctgaaaaagggccaccggaatttctccggaatgaatgggacccggtggggtactggaagggtttaccttggcctggggcccccagagggaatgccgggaaaaaaagggggggaaactggacaaaagggggccaaaggcaaaaagggattttggggggggggttgtttatgctatagttcattaatgaaaagatctaaagcgtatctgatgggaaatgatttactttttaaactctttctatttaaggaattagcttaccgaaaggagatggtgagagctgacctaattaacaaaaaagttggaatcagagaaactccagaaaatcttgccaaacttctgaccaggatgtatttaaaatcagaagtcataggtgatgggaatcagattgagattgaaatccctccaaccagagctgacattatccatgcatgtgatattgtagaagatgcagctattgcttatggatataacaacattcagatgactctcccgaaaacttacaccatagctaatcaatttcctcttaataagctcactgaacttctccgacatgacatggcagccgctggcttcactgaagcacttacctttgccctgtgctcccaagaagatattgctgataaactaggtgtggatatctctgcaacaaaggcagtccacataagtaatcctaaaacagctgaatttcaggtggcacgcactacccttcttcctggcctcctgaagaccatagcagcaaatcgtaagatgccccttccactgaaactgtttgaaatctctacattgtaataaaagattctaatacagatgtaggtgcaaaaaactacagacatctctgtgctgtttattacaacaagaatcctgggtttgagatcattcatgggctgctggacagaattatgcagttgctcgatgtgcctcctggtgaagacaaggggggatatgtgatcaaagcatcagaagggcctgctttcttccccgggcgatgtgccagagatctttgccaggggtcaaagcgtcgggaagcttggggtccttcatcctgacgttatcaccaaatttgagctgaccatgccctgctcctccctagaaaatcaatattggaccctttttgtgaagattggtctctgtggtgtgattctcttcccaggtgtccctttctcctcccctaagtgtccttaagtcctcctccacagggaacatctatttgggctttgatgtttaataaagtagaaagcactgtcaaaaaaaaaaaaaaaaaaaaaaaaaaaaaagggcggccgctctagaggatccctcgaggggcccaagttacgcgtgcatgcgacgtcatagctctctccctatagtgagtcgta

SEQ ID NO: 1057 - DNA, 1426 bp, Homo sapiens
tttttaattttagaccttctaataggtgtgtactgattcctcattatggttacaatttgcatttctctaatgacattgagcatcttttcatgagcttattgccatccatgtatcttctttgttcaaccgttgaaatttttttgcctatttttaaattgggttttttcttttgttactgatactattaatatcctttattctggatacaaatctttttcatatttatgtttgcaaagatttttcttgctcttgacttgtctttttataacagtgagtttgaagagaagtttttcattcaatgaagttcagtttatccattgttcttatgctttaaatatttttctgcatttcttcaggaagttcatagttcagggtttatatttatactgatgatttatgtaaatttttatatatgatatggaggtatacatctgagtttattattttcaagcaccagtagttgaaaaggctatctttcttcacactgcagtgcctttgggactttgtcaaaagtcagttgtccatatatgtgggggtttttttttcggagttatattctgtgcatgatctgtttgtctgctttatgccaatacctcttttgattacataaactttataataattcttgaaatcaggtagtgttaatccttcaactttattttcagagttgttttggctattctaggccctttttatttcaatatgagttttagcatcagtttgtcagtttctcccaaaaatcctgctggatttgtggttgggattgctgtgaatgtgtagattaacgggaaaatttacatcttaacaatgttgagtctttcaatctatgatagaagtgatctctctttaggccttctttaatttctctcagcaaaatttcatattttttgttgtataggtctttcacatgttttgtcagatttatctctaagaagttaatattgttgatgctactttaaagggtatttaacctttgaaaatagtatgtgatggttcatatattgattttgtatctgtaaacttggtaaacttattagttatagtaactttattatttattcattgggttttctataaagatgtattagtccattttcacactgctgtaaagatactaccagaggccaggcgtggtggctcatgcctgtattcccagcactttgggaggccaaggtaggtgggtcagttgaggtcaggagtttgagaccagactgaccaacatggtgaaaccctgtctcaaccaaaaaaagacaaaattatctgggaatggtggcacacacctatagtcccagctacttgggaggctgaggtggaagaatcacttgagccccggaagtagaggttgcagtgagccgagattgcgccactgcactccagcctgtgtaacagagtgagacactgtctccaaaaaaaaaaaaaaaaaaaa

SEQ ID NO: 1058 - DNA, 2382 bp, Homo sapiens
tccacggttacaagcagtggtaggattgcagccgtgggcctgctggacacacacatacaccaaagatgtatttggatctgggcaccccctcccaggatccctgtactcacgtgccagtctcctgactagagcactttactctgtttcctcagccctgyagcccctgggagcacacactgggtgcagccctgggccaggcacgggaggccctgccctgtgctgcccaggggctgtgtgcaccacatgagcacatttccctctggcctggcggcctccaggctggctgtggaaacagttcctgaggaaattagagattctatgaattgtaggagtattaaagaccaggctgttggcaccagaacttaaagcgatgactggatgtctctgtactgtatgtatctggttatcaagatgcctctgtgcagaaagtatgcctcccgtgggtatacgtttttaccttttttaaaaaacatttttgtagaaaaaataattaaatcccctttttggaaacttactgcaggttttgtgccttgacaacctctccctatgtgaggtttgtaaaaagtgtcctgtgacttaacacagaaacgcaataaacacacacaaaatagtttcatgagtgattcttcagatgcccttcccaactggttagttgatcaagaattttgggggtgggggttgcggagaaatcaagtttaaaattccttctgattaaaaaaatatagtggaatacaattgtctgccgtttccccttcttaatgtatatattgtgagtatttattagattcgtaggtcatattacttatcaactgagccaaatgtctgtgtgcaattgtgtttcctttaccttgtaaaattttgtacagcataaataagtaaaaaaatcactgtttttctcaactttttcaaaatcaaggattgtaaatattgtagattctttttctgtgtgatgtgtcctactgtttcataatgctgtaacttgtagaaatattgtatatttattttctgcttatttaatgtcttaatttctgaaaagtattaacatccctgtctcccactcccctgccgtcccatgaagttaactcctgagagttgtcgggggtgactggagagctcattgcagaccacgtggtcctccagggtggctctccaccttcgggtcctggtatttccagtcaagtgggtttcaattcttgggctttgccgcccttatgatgaagtgtgtgtttgatgccagtgagaaactcagtctggcaggctacaaaattctactccaagaaatacccagcaaccttctgtttgttccaaagcaactagcttatcatgcaagcaaattttgctgactccaggctttatctttaggaaaacaaaaaaaccaaagtattatcagcaggtgggaaagatttttctattgaaaatttatccctgacaactcagcgtttagaaaagaaataaaatgtgccacttccagaggtgctgcattgcagttgttcagggctagggccaggcaggacaagtgaatgggtgggacaggtggctcctgcctaaggaccacctcaggccactaaccccttgtggacaactgtgagtagctgggttttcccccacctgctgtgcaacttcctgtgctttgaggttggactaacttgtcttcaggagctaattaactgtacagccctccccacgccccacccatacggtcactgcatttggtcagcctgcttcttcaggtcgatgccctccttctgatactccatctccttcaggggaggttggggccccactggactgggtgtcaagatgtgaaagcttatgggagctttaaggagacttcatggtggttccatgcaggtggttctgccatccctgctgatttagcctggtgcctgtgtgtgtccactcacgtacacgtggggtgggggaaacgtgtctacagatgacgctaaatcagttggggtctactctaaacagcattgtgtgtaagaagcatcctcaagctcccagttaagtaacttgactacttttatttgggaatttcagactatagaagctctcttatgttttatgtccagattctgtgaccactagttactgtatcagaactcatcaggtacccacttataaatagcactgatctggctgtatactgatccatcactaacctgttttctaggacccagcgtatgtagcatttgtattgcagtttccctggcttacttgtgttttgcactgatgaattttgacagggtaattgccactttacttgtgcaatactgctgtaaataactgcagatttttaaacaatcttttatgttaattttataaaaataaaactttcaactagtaaaaaaaaaaaaaaaaaaaaaaaaaaaaagggggggg

SEQ ID NO: 1059 - DNA, 1735 bp, Homo sapiens
ccggaattcccgggtcgacccacgcgtccggtaaactcacagatgttatgtgaatgctagttttgtgtgtgtgtgtgtgtgtgtgtgtgtgtgtattagtgggcctggctcctctgccacttactatgagtctttggatgcatcgtctaacctctttaagcctacagattttatcatctgcagaagggataattatatcacacaggactgtcatgaaaactaagtgaagtcatatttgtactggacacttaagtgggagctgcataaaagtagctgctattactaaagcatgtaggaaactgtaaattgttgtataggtattatttcttgcctctttcttaagacttctatgaagagaaagtgagttagcatttgtgaaaacagcttgaaattctgtcagtattcacatgagaaggctgaaggtggtttgggctaatgaggtcatgtaaaaagtgctgtgaaatcatggtaatggaaaattctgttctatgagagtgatccttatgagcccttgggcaacagggttgagggtggggaggagattgactgtgttttcctctcattccttggctcagctgttggctcctgggaccctgtgccgcgagcaggccaggcagtgtgacctcccggagttctgtacgggcaagtctccccactgccctaccaacttctaccagatggatggtaccccctgtgagggcggccaggcctactgctacaacggcatgtgcctcacctaccaggagcagtgccagcagctgtggggacccggtaaggctctcctggggagcacggctctccccagcccaccacttcccagccagcctcccctggccctcagggtagtttggaatcttggcttcaaatggcacctctagatactacctctttcatccccttgactcagggtagatgttcagggagaaccagaggacagtgttccttcccagtcccttgatgcttttatttctcagagtggacaattgaataagagtaatccaaaagaaaaaatgagcagaggatggagacagagaagcaaatgcaaatggcccttaagctatgaaaagacgtttaatctcagtcatattaagggaaagcaaagtataattatgatgaggtgagatttttcatatatcagattgcaaagactgaaagttaagataataataatataacaacaataataatgatatagtgttgtggagggtgtgaagaaacaggtagatataaccactatggaaagcaatttggagatatacttagaaatgcagctaacacttgcacatgtatgtgaggatatatttactatgatgtttactgcaccattgttagccatagcaacaacaacctatgtgtccttcagtagggaccaattaaattaattctggtacattcatataatgcaatgctttatggctaaataaggaggcagccctatatttactgaataaaatcatcttccacaaaaaattaagtgaaaaatgcaaggtgtagaacagcaaataaaatatgctttcaagccagatttggtggcttgcacctgtaatcctagctactcaggtggctgatatggtggcttgcacctgtaatcctagctactcaggaggctgaggtggggggatggcttgagcccaggagtttgaggctgcagtgagccactccactctaggactccagcccaagcgacagagggatgtaccatctcaaaaaaaaaaaaaaaaaagggcggccgctc

SEQ ID NO: 1060 - DNA, 1581 bp, Homo sapiens
  misc_feature (363)..(363): n equals a,t,g, or c
  misc_feature (1451)..(1451): n equals a,t,g, or c
  misc_feature (1519)..(1519): n equals a,t,g, or c
  misc_feature (1523)..(1523): n equals a,t,g, or c
  misc_feature (1578)..(1578): n equals a,t,g, or c
gcctgctgataagtgattccttaacttcctcgggagcagcagaaacttgttttgaaaaaaatcagattctaaatctttacagctgtttacttctgcaagcacaatggccgtagtaaggaattcaagtcacagcgcaccgtggcagggaaggctctgcatggagtcacaggacaaagcctgtcctggaaacgtgctggaaggaagtcggcctcattctttacgacgggcagcagctccaaatgagaaaccaaggggcttggctctgggtcagtagcatctgcctggcatgcggtgccagctgtggagaccagtgaggtggcagcagctgcactggggctcctggggtgtgcgtggggacctcangggtttaggagctgatatacttttggttctcatcatcttgtgtgttccttgcagacacagaatgttcagcttaacaaagaaatgacacttgccagcaaccggagcctggcagaaggaaaccttttgtaccagccccagctggacacgttgaaagcacgcttgacccagaaataccaggaactccaggttctctttgaagcctatcagataaagaagaccaaattaggtaactttttaagggtgatcattcgagaataaagagttgagagaaggacacattttcaagctattgccctaccaggaaagaaatattacggaaaaatttcaggttaagatagcgactctactgcaatgaacaaatagcttatgtatattatttatttatttttagagacagggtcttgctcygkcagactggagtgcagtggcgcaaccatggctcagcacgacctcytgggctcargtgatcctyctgtctcagcctyctgagtagctgggaccacaggtgtgcactaccccaagcaggctagtttttcattttttttgcagagaggttgtcttgctatgttgcccaggctggtcttgaactcaagccatcctcctgcctttgcctcacaaagtgctgctattacagacatgagccactgtattggactagtttatgtatggaatatggagggcccccagacctgcggcctctctgcacttgcggttcgagagggcagggtgtatagcaggactgccccctcctcccagtggccctgactggtggcggtgactgctgaggtcagcccaggtccacacgcacctccagggtctgcagtgtgaagcaggttgcagaaacgtgggtacctcggggcagttaccagaaaaggggctggagattaggaggaagccagccagtttagcagtcaccagtttagaagaggagacttaaccactttttaaattcaagaccccaccttctctaaacagcatagaaaaagctttctgaattatgatattaaacagatgtcttatgacgtttgcccgtttgtcttatgctgkttgttaatggtaaaaaaaaaaaaaaaaagggcgggccgctntagaggatccctcgagggggccccaagcttaccccgtgcatgccaacgcatacttttttccctatagngagncggattataagctaggcactggccgtcgttttacaacgtcgggacttggaaaacnggt

SEQ ID NO: 1061 - DNA, 1226 bp, Homo sapiens
  misc_feature (234)..(234): n equals a,t,g, or c
  misc_feature (775)..(775): n equals a,t,g, or c
  misc_feature (863)..(863): n equals a,t,g, or c
tcgacccacgcgtccgctccctttgtcctgggaaacacctggacaaaagggagagtgacctcaccccaaccctgtcacaggtagccaggtagcaatgcctgctagaacttctggcaaacagtcccacatctgtgagaactcaggaagaaggtgcagcctactgttgcttgtaaagtgtctagagagaaggggtaggtcacctacaaagggaaccccatcaggctaacagtgaantttcagcaaaagccctacaagtcagaagagattggggggtctatattcagcattcttaaagaaaagaaattccaaccaagaatttcatatttggcaaaactaagcttcataagagaaggagaaataagatccttttaagacaagcaaatgctaagagtatttgttaccaccagacttgctttacaagatgtcttgaagggagtgctagatatagaaaggaaagactgtgttaccaaccatcacaaaaacacatttaagaacgtagactagtaatgctatwaagcagcaacacaatcaagtctgtgtgataaccagctaacaacatgatgatgaaatcagacctgcatataccaatattaaccttgaatgcaaacaggctgaaagccctaattaaaaggcacagaatgacagcttggattaagaagcaagatcgaactgtatcctctctacaggactcatctcacatgcaatgacactcataggctataagtaaagggatggagaaaaattgcccaagcaaatggaaaacagaaaaaaggangggttggcattctactttctgacaaaatagacgttaaaccaccatgatcagaaaacacaaagaaaggcattacgtaatggcaacaggnccaattcaacagagacttaattattctaaatatatatgtacccacccctggagcacccagactcataaacaagttcttacagacctatgaagagacttggatagccacacaatagtagtgagagagttcaacaacccactgacactattagaagatcatggggcagaaaactaacaaagatattcagaaccagagctcaacatttgaccaaacgggcctagtagacatctacagaactctctacccaaaacaacaagatatacattcttctcatctgcacatggcatgtactctaaaattgaccacacaattggccataagacgattctcagcaacttaaaaaaaaaaaaaaaaagggcggcc

SEQ ID NO: 1062 - DNA, 3840 bp, Homo sapiens
ccacgcgtccgcggacggtgggtcttgtgattcagttgagaaattttgaagactaagtatttattctgttatcaccctggaaaaaaaatgacagaatttagctgttttttatttccattaaactaaatttgaatgacagtttaaacaaactatttgtatgggctgatgcctagggttttagtcaagtaatccagaggctgttactatttatttctgactctacataaacaatattgtactcttaactatgaaggatgacaaaggatttgctttccactgagcaagtgtcattaggaaagcttctatgatgaattatctcttgaaactatttactgtacctctgcctgccatatgctttttattttttttcagtcctgctccctctgtatgccacatgttttgaaagcaaatactgtgaattgcattcctcaactctgtccccaccacacacattctctcacatgcctttcaagtagcagtttaaccctttcttagcatcatcagtgtcatgagtggttttccagtggatttgtcttttaaaagtattcttgctgataataatagagtaacaatttattagtaattgtttctgtctttacattttggcacagttttagtacctgatacttactcgtttaatgaataattctgagaccctagtgggaatcaggcaccatgctagttacagtgtgagcaatagtctctgctctcaagaaagggttcagcctaagctggggtttagcggcaagtagttgcaagatacatgtgtgattctaacctgaggccaggctggataggagtattaaattcgggtcagagcatgaactgtaggaaactgctttagggtatgccagaaagctgaaggcagaagttctgttcgggaaaatctgctgctttctctccttaatgagaatgatgctggtttgttcatcaaccgggtaaggctgatgtttattaaaatgctcttaaataaaagcatatagtcccaagtgtccatcgatagatgaataaattgtggtatatattaggttggtgccaaagtaattgtggtttttgccatttttaatggcaaggtgttccattgtaataaagattaaatggaacagctttcagttagaaaagacatactgactcatgctacaatatggacaaaccttaaacacattaagttgaaagaaggcagacacaaaggccacatagtgtataatttcacttatatgaaatgtcagagtaagcagattcatagagacaaagcatagacgtggttgccatgggctggagggacaggaagacatgtaactgcttaatgggaacaaggtttttggggggtggtaaaaatgctctaaaattagataatgatgatggtacacaagtctgaatatactaaaaaccactcagttgtacacttatttaaaataatttatggtgtgtgaattctgactccatgtgagttcttccagaatgtagtaaacctgaatataaaaaagggcagtaactgacttggatactttaacatggttaaaaaggtggattttatggattatattttaccactatttgaaaaattttttaaagacaataactagaaagaattggatttctctttctactctggcaggaccaaaaaaaaaaatttgtaacaaaccagtaggttaatgtggttttgtttgtttcggttttggtcagcttcatttagcctatgatgggtcatggctttgaaacttttgtctagcacttagtcaggctgatgaggcaggatgacttataaaggtgggtgtaagaagagcccttggattacagagaactgtagtaggtaggagagatgctagacaattcactacttaatcgtcagtcttcattaatccctggggggagtagcctctatgtttcaggcagctctggacagttagtgtttgtgcacatacccagtgatttgttgatgagactctgtgggcaacaaccacagtcattgtatatgcaaccttgtgcctactggcctaatttgcttgttacctgaaactgtgtcgaaactaaagtttccagaaattgagtcgaaatgtttacaaaatgtgacatgacagtgctctctggcctgaatgtgcatttacttgccttagtttattctttatcttagtaatttacttcgtatggtttggtctctgataactttcacagattctggttaacacgagttactaaaatttgtgaaataatagatcacattgtgtttcttggtcacatttgaagtcagtcaaaacaatgtttgagaatgtgtctggctctttaatgccctatgcagcagaggactttgtaaaggatttcatttcaatcctaaatgacctgtgagaatctggtctcaggtaaaaatctagttacattttgagccactacctaatttaattatctttggatatacttgtttgcataaacatttaatatctgattgcataggtaatatgacattaccctctctatcccaattcctaccctctctcttgacacccagaagtttctgcagttggatttcctgtttcattgcaaggcagtattggagcctgcattcctagcagctgagaatagaaataacaaataattattattaatttaataattgttaatagtgtaaatagttcattgttcctacagactgcattttgagaactggtattcctaatgtatttcatatattaaaaatgaagtcaagcgttttagatttaggcaggtagcacttagagaaaggatctcacaatctctgctcctctttgcacaagtctagcaaaagtgaaactatgtttatagcttcagctttgatacaaacacttttctcaaacagattctagacccatgggaaaaggcttctttccttgtgctccttgagaacactgtgtaaagaacgtactaatgaaagaatctaaggtcaagaagaatgaatgcacctttaaaatgacaagttttatcttgttactctcctgctaaaaacagtctgttgcattctatgagatggtatggatggtgtccagatgcctcactaggccacactcagggtccttgaatagctgcagtttgccaggcttttctgcattgtcgtggtggtccttcccttgttgctgctgcctgagagatactgcctggttcttacagacacagattatgtcatccttgcagccttcacccaaagttgctccctccttctagggcattttgttttcctacttaataccaagtgtcagcatgttagtaataaacaggtgtctctaccattagtcaaaggtgggagttaagcctttcatctttgtagctttctccagtacctaaccatgatttacttcatgggaagtccctcaaagtactattaattatcctgtgttctcctgccttgcctcttaacaaaaattctgctgttcctgattatttccattttaccagtgttttgttccttttctatccaggcagcataattcgttgtatgaggcgcctggaagaattgcttcgacaaatgtgtcaagcagcaaaagccattggaaacactgagctggaaaataaatttgcagaaggaatcaccaaaatcaagagagatattgtgtttgctgccagcctctacttgtagagtcagctaaaggaatgtgagattttaaattattgaccacctgtttgattacagttgactacaaatgcctgcaagtgtggatttggttctcccatacattttaatatgtattatatttaaatcaaacatcattcatagaaagcatattacatacatgtttatacataagcattacatttttttaataaaaatgtatacaggtgggaaaaaaaaaaaaaaaaaaaaaaaaaaaa

SEQ ID NO: 1063 - DNA, 2243 bp, Homo sapiens
cgcctgcaggtaccggtccggaattcccgggtcgacccacgcgtccggctttctgcccattcctagcattctggtgcaaaacgatctgggatggcacacgtttttaccctcacagttctccagcatctaaatatctgcagtaggttctcgctggacaaggacacgggactcatcatgctgattgccaggctggactatgagctcatccagcgcttcaccctgacgatcattgcccgggacgggggcggcgaggagaccacaggccgggtcaggatcaatgtgttggatgtcaacgacaacgtgcccaccttccagaaggatgcctacgtgggtgctctgcgggagaacgagccttctgtcacacagctggtgcggctccgggcaacagatgaagactcccctcccaacaaccagatcacctacagcattgtcagtgcatctgtctttggcagctacttcgacatcagcctgtacgagggctatggagtgatcagcgtcagtcgccccctggattatgaacagatatccaatgggctgatttatctgacggtcatggccatggatgctggcaacccccctctcaacagcaccgtccctgtcaccatcgaggtgtttgatgagaatgacaaccctcccaccttcagcaagcccgcctacttcgtctccgtggtggagaacatcatggcaggagccacggtgctgttcctgaatgccacagacctggaccgctcccgggagtacggccaggagtccatcatctactccttggaaggctccacccagtttcggatcaatgcccgctcaggggaaatcaccaccacgtctctgcttgaccgagagaccaagtctgaatacatcctcatcgttcgcgcagtggacgggggtgtgggccacaaccagaaaactggcatcgccaccgtaaacatcaccctcctggacatcaacgacaaccaccccacgtggaaggacgcaccctactacatcaacctggtggagatgacccctccagactctgacgtgaccacggtggtggctgttgacccagacctgggggagaatggcaccctggtgtacagcatccagccacccaacaagttctacagcctcaacagcaccacgggcaagatccgcaccacccacgccatgctggaccgggagaaccccgacccccatgaggccgagctgatgcgcaaaatcgtcgtctctgttactgactgtggcaggccccctctgaaagccaccagcagtgccacagtgtttgtgaacctcttggatctcaatgacaatgaccccacctttcagaacctgccttttgtggccgaggtgcttgaaggcatcccggcgggggtctccatctaccaagtggtggccatcgacctcgatgagggcctgaacggcctggtgtcctaccgcatgccggtgggcatgccccgcatggacttcctcatcaacagcagcagcggcgtggtggtcaccaccaccgagctggaccgcgagcgcatcgcggagtaccagctgcgggtggtggccagtgatgcaggcacgcccaccaagagctccaccagcacgctcaccatccatgtgctggatgtgaacgacgagacgcccaccttcttcccggccgtgtacaatgtgtctgtgtccgaggacgtgccacgcgagttccgggtggtctggctgaactgcacggacaacgacgtgggcctcaatgcagagctcagctacttcatcacaggtgctgccccggcctccgcccacctgtgcaggcctcctggggccctgcctccacccctcccagatggacagccagactaggtgggggcaggtgagggtggaaaagaggtcagggctctactgttgggctttagcctctggtggtgcctcccgaggatttgctcctggctcttcccaagggctttgcagctggatcactctggactggctccctggggacctcctgaacctgttggttgcagggacggggagcatctaccaaggttcattctagagggaggtaaggccccatgattcctagggaggagccctgagccccactccccgccccaagtctgggtgacagagcagtgacttggaggaatgtggcctcatccttccttggggacctgttgagaattcccacctgtttagaggcagatggttttgatctccctaaatgaaatggttttagctcaaaaaaaaaaaaaaaaaaaaaaaaaaaaaaaaaaaaaaaaaagggcggccgc

SEQ ID NO: 1064 - DNA, 1635 bp, Homo sapiens
  misc_feature (1018)..(1018): n equals a,t,g, or c
  misc_feature (1176)..(1176): n equals a,t,g, or c
ccacgcgtccgccaagatggaatgttgagtatttgggatgttagacaaggtactatgcctgtatctctgctgaaggctcatgaagctgaaatgtgggaagttcactttcacccatccaacccagaacatctttttacctgctctgaagatggatccctctggcactgggatgcttccacagatgtacctgaaaagtcgtcactctttcaccaaggaggaagaagcagtacttttttgtctcatagcattagtaaccaagctaatgttcaccagtctgtcattagctcctggctcagcactgatcctgcaaaagaccgaattgaaatcacaagcttacttcccagtaggtctctgtctgtgaacactttggatgttttaggtccttgtcttgtttgtggaaccgatgcagaagcaatttatgttactagacatcttttttcgtagaagtactataattataagatttcagatagaacatgcaattagccttttgaaatccaacttctgtgcaaaattttagtatcagaaaatacgagatttgcaggggaaacatcagtaaactaccattaatgtcaatgcccagttttgacttttgttagcctgacactcccaaacagttgtagaatccgatagatgactgatggcaaaagattgtgaacatgtggaagaaaatcagtgggattctggtgctgatgaataggttgccttcagagtattattgacagacagcttgtggaactaattctttatttttgatgttgtgggaattaacacatcaatggtggttatgggaactaccaatgggttcctacaatttttatcagtagtatgtggcatatacaccttcctagtggcagttgccaatgttaatgattattctttttattgcaagtatttcctatgatccttccacactttatttccttaataataataaactttttcagaaagaattgagtagagcaaaaatgacaaagatgtgtagctgtgttcaattttttttttttttttttttttngaggcagagtcttgctctgctggagtgcggtggtgcaatctcggctcactgcaacctccacctcccaggttcaagcaattctcctgcctcagtctcctgagtagctggaactacaggtgtgcgccaccacgcccagctaatttttgtaattttagtanagacagagtttcaccatgttggccaggatggtctcgatctcttgacctcatgatccacccgcctcgacctcccaaagtgctgtgattacaggtgtgagccacttcactccagcctgggcaaaagagcgaaacgccatctcaaaaaatatacatatataaggagataaagtttcccattttccaatacagtttcacatttgaacagccctaattgatacaactttatggcagggttttagtgtgtgagtgggatccaaaacactcaatcctgtaaaagggtacagtcctattgtatgttaacacactgatgatgtgagcctgtgagatgagccaatcaccagttgttatgttcgaatctgctttgtgttgggacgctttaatgtcagggtttcactaaataaatgaattttcatatactgaaaaaaaaaaaaaaaaaaaaaaaaaaaaaaaaaaaaaaaa

SEQ ID NO: 1065 - DNA, 1533 bp, Homo sapiens
  misc_feature (775)..(775): n equals a,t,g, or c
tcgacccacgcgtccgggctttctccaaggatgaacctgcttattagagcttggcctgtgatttcttacatttcttatagtttaatggttaagagtgtgggctgtgtaccaggttgcctgggttcaaatcccagctctgacacttaaaggttaagtggcctagacataacttccatgcacctaacctacctgaagagttgctaagcagattagatggattaatacatctgaagagcttagagtggtgcctggcacatgacgaacactccatcaactagtcatggattagtcgttcttttcctgccttcctctctagccttgctgctcaagagccatagactaagaatgagaagggctgttaaagacacctctagtgcagccttttaaatttaccgataagaaatcagaggcctgaagagaagtgagttgcytgaaagcccacagcaagtcagtgacaggccaagaccagatccaggctgcctgactccagtttcttcctcgggcccccatgacctttccaggcgccatgtatgtttctccctggtctcagggtgagggtagaagataacctttctgaaagaggccacgtccctggcctcccagtgaagcactaggtgaagccaggccaaaaagaaagcacttctctggagacagtttccaggaggagatttttactttcgagaagagctttattatttttgtgaaaataatacatgcgcatacttaaaagattcaagccattygggaaagtacaacgaaaacagcaaaagtcccntttgattctaccactgggattcagccactgttatatgttggtaaacatccatctggacatcttgtacatatatgtagacattttatttctttaattatctttcttattgtgtttgatttgtcragcaaagttcattttctggctctaggtaagcattccaaatagtgaaactcaaatagtgaagctgaaagtggggcagccttcatattggagaagtggccagccgtgcctaacgggctgtcagagatgatctcatagcatcagactgggctcaggcctcgggcacagagaggtcctcccctcccccagtctggccacagagcctttaaaatccagagaatcagggctgcagccctgccaggggtttggagaaccttccaacaccttcattttatagatgagcaaactaaggccctgagaagtgtccttcgctcttaacctagactttgtacatggtctcgttccccgctttaatagaggaattgctttatgtcgtaggactggaccttgctgcctttgggttggttcctggagaagcaggaataaccacctgccctcctgcccggaggcctttcttcccaggtgactcacaatgccaccctggggtggggctcacggtcaacctgataagggactgataatgaaatttctgtaccaactggctccacacaggggaaagatgttttctgggtaagtctggtcagaagaggttgatggggggaaaacaaaacagccaaaaaaaaaaaaaaagggcggcc

SEQ ID NO: 1066 - DNA, 2185 bp, Homo sapiens
  misc_feature (774)..(774): n equals a,t,g, or c
gaaaacaacaaagcagggtatctgtcaattgatctgtagacccatttcctcatcacaccccaaatctgttatgtggtggctatgcatttctggatctgaggcatttgtgtagttagttttaaggtatgtttatttattattttattactgtgaacagattgcagtgtgtgtatgtgtggtgtgtgtctgtgtcttctgcctagaacaataacctcctttcctttctcccacatcactgcacttttggctgccgctgtggtttgttgcaaatctgagctcattaatcccacagagtattaaacaatatctggtctcggtggctctgtcattccactgcaggcgtcccaccttcatttgccagctgggatctcttaatgagctagctgtgcacagttcaatagtaaaamccttttagctggtgaaatatgtttgaagaactcactgttggagtgttccatgtgaggcctgcttccactcytgctggcattcycttttcaggatggctgcagctcctccaagttactgttttgttgccttccctccacgtgctaaggatggtctggtggtatttgggaaaaattcagcccggcccagagatgaagtgcaagaggttgtgtatttctcggctgctgatcacgaaccggagagcaaggttgaggtaagccgwgcattgcagtctcgcgagtcacactctcttttctctggctttgccgctagcacaaccctaacttcttgcttggaagcttgctcacaagtcagagctatcatgtcagntctgctgattcctgtytccatgcaggtttgctcatagccttgaaaacaaggtcatgggagagctctatgctcactgctatggccattgttttataattaagtgaaatatgtacatagttctgaaatcaaatctaaaaaacaagatttattcatagaagtctaacttgtatccttgtcccctttactccatgatcttttcccctataggtaatcatgttttggaagatcttggtttatccttccatttgcaaaattacacatatatatgtaacaaatcacacacacatgtgcatattcatcctggtccctttcctcctttcttcgattaacagcagcatgccatatatacttttctctactttgcattttttttcatttttatttttttattttcttcaatcagctttctcaggttgaatctctactttgtatttttcaactcaaaacatattctggagatcactccctacggtacatgcaggtcataattcctcatttagagctgcatggtgtttcattctatggatgtatcatagttaaccagccccatattactgctggacatttggattgttttcagtctattgctattacaaacagcactgaagtggataacagccttatgcatctgtcatagtgtctggtctcagtttatatatttttatcataataaaacattatccattaattcttatttcaaatcttttaaaaatactatttttgtcagtatttctttgggatagatgcctagaaatgaaattgctgggtcacaaggtaaataaaaatgtaattttattaaatattatcaaatttccttccataggtggtgtaccgttttgcattcccatcagcactgtatgacaatgcccatttcttcatattcccagaatgtgttgtcaaactttcacgatggctattttatgttaattatactttctgccattttactaaattcttttattggttgtgtcagcttttatcattgcttttcttggggttttcaggtatatttttatatcacttgcacatagagattgtttagttgttgttctgtctttaattgttttcttgtttgattgctttggcttatagctcgggttttatgttaagtagtagtggagatagtggrtgtccttggctctgcacctgacctgagtggggctgtctctagtgcttccctattaagtaagctgctggttttgggattgagatttatatagttttatgtgccactgcacctggcttatgataaaaagtatacatcagtcaggtacagtgacacatgcctgtagtcccagctaccctggaggctgaggtgagaggatcacgtgagcccaggaagttgagaccagcctggacaacatggtgagaccccatctctttaaaaaaaaaaaaaaaaaagggcggccgc

SEQ ID NO: 1067 - DNA, 1119 bp, Homo sapiens
ccacgcgtccggcaaaatgtggcatctgttagtttttattgtctgtgtcttctttgtttactataccttgggtaattttgtgttaccaaaaaaaaaaaaaaaaggaagtgtaatgtcagacacacaagaaaagcaaatcagtgttgtaagcttaaagtacaatttcaaaggtcattaccaacagcagggttttttttatactttaaaaacattatgctacatatcattgccattttcatattttggggttttgctactcttatacaatggaatcaatggaaatgtcatccagccactgaattgccattattatatctaaaaagtttctaagatgacagttatcactattttgttttatctccatgctgacatttgaaagaaggtactagtatccctctagccagattgcttagtttttcgttggtaatcaaacaacagttgtactaaaggaaagtaaagctaggacctaaatcagaatcatagttgcctgcatatatggtaacaaggtcgtgtgcatttgctttcacagtgatgagtgagaggatgagaagaaattatttgacatttttctgtggttgaatagaagacacctttcttttgtctttaggtttaggaggagatactaagatactggatgtttatcctatcttagtttggttggagtaataagagagaagaagagggtggactttggcttttcagtgttttttcccctaaagagtgatattgctgacgtttctatcaattttacacataatatgtggctatgaaaccatatatctcacttaagtaacaaagtaatcactttgtctatcactaagtaatagacaaaaatcattgtctattatttaaagccaacaaaacagtgtaacagttttaagttcaataatgttaagtattgtatagaaatatattggaggcaaagttcagttgatgacaattgtgtatatgttactgatgctgtaaattatttttaataaagaaaattgtattatcaaaaaaaaaaaaaaaaaaaaaaaaaaaaaaaaaaaaaaaaaaaaaaaaaaaaaaaaaaaaaaaaaaaaaaaaaaaaaaaaaaaaaaaaaaaaaaaaaaaaaaaaaaaaaaaaaaaaaaaaaaa

SEQ ID NO: 1068 - DNA, 2608 bp, Homo sapiens
  misc_feature (2525)..(2525): n equals a,t,g, or c
tttttttttttttttttgaagatcagaatgatttttatcttatctggttccagagtggtgatggagacaaaaatcaattacagacagaattcctgaaatgtaaattgtttttaatatatttaagagcacacagaagtcttgatttataaaaaaataaatatataacatgacaaatttactgatgatcctggagctctgaggtcaaactctttaaatgatcagtgaaaacataaaacatccatgatctgttaacacacacaggagcatattccagttgtaaaaaacaaattccttgaaggctcagaacgaacaaaaatcagtctttatggcagaaagcacatccaaagctaggcaatgaagttcagcctgggccacgtgaacctttcaccagccagcctataacctatggagccaggacaggaaagcatgatccttcagctcatgacgccacccaggcttccagacaactgcagaatgaaagagtccctcagaggctccccagcccctgctgccatcataaagcacgggagggattgttttgtccttagcggctctgtcctaaatttgagagcaggagactgagaaggttatgctcattaaatattgtcattgtaacacggaatggaaatcatgatccttgcccatgggcactgagctgaaagaaagaggaacctcacatgaggctttcctagagaccaggatgttgggtgagtgggcgtgcacttctcaagtgggcaaggaagaactgcttttctccagctgacatgctctcaggggtgaagaagtttagcttaaaatacctgatggcgctgcataaactggggatttgggaactgagtttttagctctgtgacacacaacataaaaaacaaaaatccagtctcattagctaaattcggattaaaatctgaaatgtttttatggagttgccaacaggctggaatgtacctgatacartttaatctgcttttatttctttggctgtcttccaaaccactttcttcctgtaattcttaagttggctagttctccttcctcagaaaaattacccctaagaatcttcctaatagtgagggtgtacttccgaatagaagagtccttcggctgaaatggcatctccaaggcctacagttcgaatggggtctttacacaccaatactggtgtgaagtggaaggatattccctctctgtgccattctactactggcttgtttgggtttaatacaatcctggagcctgcctccgaatgggaagtcatgaactcttggggtgccctcagagacactcggctggtgtctatggtttctgtggcgcaggcctgtgtcccagccacacgagctcctgcagccacggctgccagctggttggcccagtgtccatccacagttgccaggatgtggtagaccagcgtgtggaaatggatcctggtgagatccgaggctctgcttttactcctcccatgttctttcaagatccagaagaggatgtcactgaccatgcccacatcaggaacaccgttccaggaagagagagaagagtgaggtccagaggctgactgggtgagaaataacagctcctgttcattcagcccaagggaagtcaccgcgggaaagacctgctgatggacaatgctgctcatgagctccctgttagtcatactggccagctctaggtgaactggaataccagtggggatgtcagaaatggaggttacaacctccaagagtctcttcctctggagctccttgctttgtccctccatcatgtgcaatccagagaggaccaccaggtctggctgaaactcctccaggctagacacaaacacctccagcatattcatggccccgttggagaggtcgtgagagaagatgaatcggttggcatggggagcttttaactggccccactcctcccctgcttgatactctaaaatgaggtggaactcatccacttcctgcaatgactctggtggaacaaagacattgtcatcaagaagctcatgtagctttggaccaactggaccgcaaagaagaacctttaaatctgagttggctgcaaatttctgtccaattaaagctgcatttcctcctacatagtgctgggctcctgggaactctgacgcaacctgggcaatgtcgtgaaaagtttccttatcactgaagaagcgctcagcagctgctcccttccccatgaagtgaatgaaggcttcttccagatcattccttgaatgcagaatgctgtgatctttcccattcccaggactaaggccaagtgcctgcaagagcttcacccctgagagcaccacatcaacacatgcattgactcccactgccacgcggcgccagcgccggactggccgcacgataagcgcgtcccagctgccgccaaccggccctcgggggagacgggtcccgggggcgcaggcgcgggccccagacacagcgagctccagagagagcgcagcgccgagcctggcagctctggctccagcaggaagacgcagcccacggccagcgccaggaagnccgcgtacgcggagccgcgccacagcgccatggggacccaggcgccgcacctgcgcgaaccaactcctttcctagcccgcgcc

SEQ ID NO: 1069 - DNA, 2322 bp, Homo sapiens
  misc_feature (135)..(135): n equals a,t,g, or c
  misc_feature (168)..(168): n equals a,t,g, or c
gcggacagcgggcggcatgaaccgccccactttgccggatacctggagctgcaggaacgacccacacccaggcctctttacccctaccgccccgttaccttggggacgggatcacccgacccggcgccgtgcgantgcgcgggctgaaggcgggggcggtgccatgangcgcctcgggggcrtacctcgggcgcgcaccgctctcttacactcgggcctcagaagtccgtgccagtgaccggaggcggcggcggcgagcggttccttgtgggctagaagaatcctgcaaaaatgtctctctatccatctctcgaagacttgaaggtagacaaagtaattcaggctcaaactgctttttctgcaaaccctgccaatccagcaattttgtcagaagcttctgctcctatccctcacgatggaaatctctatcccagactgtatccagagctctctcaatacatggggctgagtttaaatgaagaagaaatacgtgcaaatgtggccgtggtttctggtgcaccacttcaggggcagttggtagcaagaccttccagtataaactatatggtggctcctgtaactggtaatgatgttggaattcgtagagcagaaattaagcaagggattcgtgaagtcattttgtgtaaggatcaagatggaaaaattggactcaggcttaaatcaatagataatggtatatttgttcagctagtccaggctaattctccagcctcattggttggtctgagatttggggaccaagtacttcagatcaatggtgaaaactgtgcaggatggagctctgataaagcgcacaaggtgctcaaacaggcttttggagagaagattaccatgaccattcgtgacaggccctttgaacggacgattaccatgcataaggatagcactggacatgttggttttatctttaaaaatggaaaaataacatccatagtgaaagatagctctgcagccagaaatggtcttctcacggaacataacatctgtgaaatcaatggacagaatgtcattggattgaaggactctcaaattgcagacatactgtcaacatctgggactgtagttactattacaatcatgcctgcttttatctttgaacatattattaagcggatggcaccaagcattatgaaaagcctaatggaccacaccattcctgaggtttaaaattcacggcaccatggaaatgtagctgaacgtctccagtttccttctttggcaacttctgtattatgcacgtgaagccttcccggagccagcgagcatatgctgcatgaggacctttctatcttacattatggctgggaatcttactctttcatctgataccttgttcagatttcaaaatagttgtagccttatcctggttttacagatgtgaaactttcaagagatttactgactttcctagaatagtttctctactggaaacctgatgcttttataagccattgtgattaggatgactgttacaggcttagctttgtgtgaaaaccagtcacctttctcctaggtaatgagtagtgctgttcatattactttagttctatagcatacttgcatctttaacatgctatcatagtacatttagaatgattgcctttgattttttttttaaattctgtgtgtgtgtgtgtaaaatgccaattaagaacactggtttcattccatgtaagcattaaacagtgtatgtaggtttcaagagattgtgatgattcttaaattttaactaccttcacttaatatgcttgaactgtcgccttaactatgttaagcatctagactaaaagccaaaatataattattgctgcctttctaaaaacccaaaatgtagttctctattaacctgaaatgtacactagcccagaacagtttaatggtacttactgagctatagcatagctgcttagttgtttttgagattttttagtcaacacataatggaaacttctttcttctaaaagttgccagtgccacttttaagaagtgaatcactatatgtgatgtaaaagttattacactaaacaggataaacttttgactccccttttgttcatttgtggattaagtggtataatacttaattttggcatttgactcttaagattatgtaacctagctactttgggatggtcttagaatatttttctgataacttgttccttttcctgactcctccttgcaaacaaaatgatagttgacactttatcctgatttttttcttctttttggtttatgtctattctaattaaatatgtataaataaagttaaaaaaaaaaaaaaaaaaaaaagggcgkcct

SEQ ID NO: 1070 - DNA, 1371 bp, Homo sapiens
ccacgcgtccgctggtctcgaactcctgacctcaggtgatcctcccgccttggcctctgaaagtactgggattacaggcatgagccaccatgcctggcgttttttttttttttgtttttttttttaatagttattttggttgtgccttggtatcacagtgtagttttaatttgcatttttaatagatatttaaattgagcaccttttcttggtttattggctactcagacagcctcttttatgaagacatccaaatatattctacgtttgagtcttttgtccatttttctgttgggctgtcttttttttgtttaataggaattctttatgtaatctgtcaggtagtattttatctccccagattatatttttagtttttaaatgatgtcttctgatatacagaagttcatgatgttataattgaatatgtaacttttttctctttctgtatcctgttcaagaaatagttgtctactccaaggtcatgcagatgtttttttctaaatgctttattgtcttgtcttttattttttatatctatggtctatttggtatggcttcgtgtgtgtggtgtgaggtaagggattgagattcttttttttccattgggatatctgattgacccagcatcattttctaaaagatgcctttcctcattgcactgcggcgcctcctgtgtgcttttgacagggatgacagggatgaggatgataaagaataggcatagcgtgtctttctcttgtgagacacagggattccaactcctattctcaatcttaaaaagaagttatttttcctcctccaagtgggaattttactagtgcttctgcttccaggataccaagggttcgagttttggaggatgaagaggggtcgaaggacattgaattgtcagatgacccttatgactgcatacgactaagtgtggagaatgtcccctgcattgtcactctgtgcaagattggctatcggcatgtggtggatgctactcttcaggaaggaggcctgctcgctggccaagcttgctggtgtcggtgaccagcaagggagttgtgacgtgcatgaggaaagtggggaagggcagcctggacccagagagcatcttcgagatgatggagactggcaagcgtgtgggcaaggtactgcatgcctccttgcagagtgttctgcacaaggaagaaagcctggggcccaagagacagaaagttggattcctgggatgatttgcacatcaactgctcaactgtggattgttttttacttttccttttaaaccggttcgtatatatttttcttcgctgttacgaatttacagcagcatttgtacatgtaaaattaaaggctattttctggtaaaaaaaaaaaaaaaaa

SEQ ID NO: 1071 - DNA, 4115 bp, Homo sapiens
gcctgcaggaaccggtccggaattcccgggtcgacccacgcgtccggcgcagacgaggcctgaggcggcggcgcgaggcagtatggtttgaagtggtgaacatggatttttctcggcttcacatgtacagtcctccccagtgtgtgccggagaacacgggctacacgtatgcgctcagttccagctattcttcagatgctctggattttgagacggagcacaaattggaccctgtatttgattctccacggatgtcccgccgtagtttgcgcctggccacgacagcatgcaccctgggggatggtgaggctgtgggtgccgacagcggcaccagcagcgctgtctccctgaagaaccgagcggccagaacaacaaaacagcgcagaagcacaaacaaatcagcttttagtatcaaccacgtgtcaaggcaggtcacgtcctctggcgtcagctacggcggcactgtcagcctgcaggatgctgtgactcgacggcctcctgtattggacgagtcttggattcgtgaacagaccacagtggaccacttctggggtcttgatgatgatggtgatcttaaaggtggaaataaagctgccattcagggaaacggggatgtgggagccgccgccgccaccgcgcacaacggcttctcctgcagcaactgcagcatgctgtccgagcgcaaggacgtgctcacggcgcaccccgcggcccccgggcccgtgtcgagagtttattctagggacaggaatcaaaaatgttacttcttgctgcagattctgcgcaggatcggagctgtgggccaggctgtgtccaggacggcgtggtcggccctttggctggccgtggttgctccagggaaggcagcctctggagtgttctggtggctggggattggatggtaccagtttgttactttgatttcttggctgaatgtgtttcttcttaccaggtgccttcgaaacatctgcaagtttttagtcttgctcatcccactcttccttttactaggtctctccttacggggccagggcaatttcttttcgwtcttgcccgtgttgaactgggcaagcatgcatagaacacagcgggtggatgacccccaggacgtgtttaaacccacgacttctcgcctgaagcagcctctgcagggtgacagtgaggcttttccgtggcattggatgagtggcgtggagcagcaggtggcctctctgtctggacagtgccaccaccatggtgagaatctccgagagctgaccactttgctacagaagctgcaggctcgggtggaccagatggaaggcggcgctgccgggccgtcagcttcggtcagagacgctgtgggacagcccccgagggagactgactttatggcctttcaccaagaacatgaagtgcgtatgtcacacttggaagatattctgggaaaactgagagaaaaatctgaggccatccagaaggaactagaacagaccaagcaaaaaacaatcagtgcggttggtgagcagctcctgcccacagtcgagcacctccagctggagctggatcagctaaagtcagagctgtccagctggcgacacgtgaagaccggctgtgagacagtggatgccgtacaagaaagagtggacgtgcaagtcagagaaatggtgaaactcctgttttccgaagatcagcaaggcggttctctggaacagctgctgcagaggttctcatcacagtttgtgagcaaaggcgacttgcagacgatgctgcgagacctgcagctgcagatcctgcggaacgtcacccaccacgtttccgtgaccaagcagctcccaacctcagaagccgtggtgtctgctgtgagcgaggcgggggcgtctggaataacagaggcgcaagcacgtgccatcgtgaacagcgccttgaagctgtattcccaagataagaccgggatggtggactttgctctggaatctggtggtggcagcatcttgagtactcgctgttctgaaacttacgaaaccaaaacggcgctgatgagtctgtttgggatcccgctgtggtacttctcgcagtccccgcgcgtggtcatccagcctgacatttaccccggtaactgctgggcatttaaaggctcccaggggtacctggtggtgaggctctccatgatgatccacccagccgccttcactctggagcacatccctaagacgctgtcgccaacaggcaacatcagcagcgcccccaaggacttcgccgtctatggattagaaaatgagtatcaggaagaagggcagcttctgggacagttcacgtatgatcaggatggggagtcgctccagatgttccaggccctgaaaagacccgacgacacagctttccaaatagtggaacttcggattttttctaactggggccatcctgagtatacctgtctgtatcggttcagagttcatggcgaacctgtcaagtgaagacactactcattatttttgtacatttttgtatatactgggacagcgtgaaacactggaatccttcatggacgagggcatatacaatgatgggacagtgccacactccttcaataaacgtggctgctggccagaggacgtgagcgtgtgacgggcgccttggcgccacctgttgggtgctcactgcctctgcaggtgcagaggggtcagcagcaggagaagcgtgttgaacacgtggctctcagacactccttgtttttaacgggaagctctttgcatttgcatttcctcaacaaaggagcaaagcagaggaagctgagagtctggcgtgttcttgacgctttggtcttcagccttgcactggctcttctaaaggacttttggagggcagataatttcatctgttaaatccaacacacatttctttcagggaaaaacaatgtcaccaaattttcagagttctaaactcctttccttcaagccggaattttccttttttcagcaccagtaggtactaagtctccagatggggaaataactaaaatgtgtttttctgctttgttcgctcttacttctgaggaaggtttccagtcaggactcgctgtaccaatatccatggaggaatatgggagcgtttcgctctccttgtaggctgaagtcagtctgacttgaaggggcctggtttggatctaagcaaacacccagatggggttctctggtctcagcaaggcttttcctgttgggagtcacagtaaacagaaacccaaaaatctcatcttgggtgttttcagggcttgttttgagttttgctgaatagggagcgcaagacgccctgagcctccctctcactggtggtgataagaggagccgtctggtgtgtcagggtcacgaacccgttacatttcaggacgatcctttttccttcagcagcatttcttactggctgtggctggaatctgccttttatcacagctgtcaccattctcacgtgattcttgtgagactctttttggttataattactatttaatatttagactattttactgagcagactttataaatgagatatctacaaggcacttaaagtgttacagatgttttaccttaagaattatttaagttgtgttgggttaagacagttttcagtgtaccgtaaatgttgtgttttcagaaaaagacaaaacgatggtgctgactggttttctgtatattgcacaacagtcctcaaatacactgatgtatgaaactattcatacatcaagcagcatttttttcactctccttagaattggaactatgcagttaaggcagataaaatgtacagatgtttcatatattacaggttacatatataaatcaaaatttcctatataaaactgatttgggatttggggtggaaatattttgaatattaatttatttttaaagatgcaagataggactttgtgcaatgtatttttgtaaatgcttttcaaaatatctgtctttggtagtgcttctgctgctgccaccaaattgataagatgctattaagaggtttaaataaagagttttaatttttaaaagggaaaaaaaaaaaaaaaaaaaaaaaaaagggcggccgctctagaggatccctcgaggggcccaagcttacgggtgcattcaacgactaag

SEQ ID NO: 1072 - DNA, 2251 bp, Homo sapiens
acgcgtccgcggacctggtataactcagaggaattgggcaatgtctagcaaaattaaatatgcatatacctttaattaagcaatcacacttttgggaatatatcccaaaggcaaatttgcaaaaaatataaaagaacatatctgtaaagtcattctttgtgcctttatttgtaatagcaaaagattggaaagaacacaaatggccatctctatggaaaaaacactcaaagtgctttttctgttctctcacccagcaacaatcaacacagtagacttctgtgaaatgtgtggggttttttccccagacaccaagcaagtgttaacctgaaataatcgaaagaatcagagtctagctttattcaagtgaaaagctgagaatggccatctgggaaacacaaactccagagaaatggagtctgtgctcccaaattaaaagttaagttcttgcttatacaggcagaaaacaaatgtattagggttatagcattttctatgcaaggctggtttatgagttataacaatctaatgagttacagcttgctttcatttccttttcaatttaaaagagtgtttttaacatttcatcttagacatgatagtctgtgtatgaaaaaagtaaaagggcagttaatctacagtgaagagagaatggggctgcctaggtgccctttaatcatttacaacattttataaaactatgtgggtaagagagaaggcaaatctaatcagagaaacagtggttacagttccctgttacgtgactgaggtcctataatcacattcctttaaggctcaaaatgttttgaagttccaacagcttagattttgaattacttattttcacacaatcagttctccagcagacagtagctgagtatcctctaattcagttcaattctgacactgcctggagacagtgtgagatctcacaggttgagggatcccacttctgatgccatttgcaaaccccaggttagtttgcctgtgcttctgactgaccggctataaactggggatcccacaaccccctccttggattcgattaatttactaaagcagctcacagaactcagggaagcatgtttactagcgtattataaaggacataacaaaggatacagaggaagagatgcatggggtgaggtatgggggaaggatagagcttccatgtcatttctaggtgagccacactccaggaaacttcatgtcttcagctatctggaagcttcccaaaccctgtccttttgggtttttatggaggcttcattacataggcatgattgattaattggccattggtgatcaacttaaccttcagccgctctccctatctggatctttctaatcatgccttgatctttctgcatgaccagcccacatcctgaagctacctacaggctgccagccatcagtcaactcattagaaagacatcactttagagagtccaaggattttaagagctgtatatcaggaaatgggtcaaagaccaaatatgtattttgtaatattacatcatcagtaaagcagttctgtgcaaccttaaaaaggagaataaagatgatctttatgtggtaatgtggtatgattttcaagaatattattaagaaaacaagatagcacttaatatgtagcacatgatatataggtttatagcataaactatataaaagcactgctaccttttatataagaagaagagacatgcatataatctaaatgttttcatataattttgaaaagaaacactggaagaataaatcaaaagcaaatatagttaccttttcggcagaggaaagggattagaagtgagactttgaattttcattttattttatttatatattttttcgagacagggtctggctctgtcacccaggctagagtgagggcagtggcacagtctctgcagcatctgcctcctggcctcaagccatcctcctacttcagcctcccaagtagctaggactacaggtgcacaccaccacgcctggctaatttttgtagagatggggttttgccatgttgtccaggctggtctcaaactcctggactcaagaaatccaccctcctcagtctcccaaagtgctgggattataggtgtgagacaccatacccagacagaatatgtttttaaaatatttttgactttggaatcatccacatatttagcccttcaaagaaaagtaagtcaaaaacgtgaaaagcatattgagattttttaacttactagctgcaaaaaaaaaaaaaaaa

SEQ ID NO: 1073 - DNA, 1011 bp, Homo sapiens
  misc_feature (682)..(682): n equals a,t,g, or c
gcggccgcccttttttttttttttttgccatcatcaacacttatttaaaaagtactttaaaatcattcattttctgaaaatgcttttcattattttccagggtccataaaaagcatagcacggggacgaaaagcttttctaagccagcagtgtttggtgaacactaacaatcccactggcataaagttaaagttttatttccttttttcttttcttcttaaaataaaattaaggctcaaatgttctattaagctctcattgcttatgtatattatattaaggcttataaatgcacctggtaaattaaattcaccctggattgaattaacacctgctatatgagtwatttgctttatgtaatcagtaatcycaaggtttckcctctttctctggaaacacaatttaaatattaacctaatctttaaactgcggctgcttctttctgacatttggaaactggtcatccatacaaaaaaggcaaatatggatatattaatgaaaaggcagcttctcaaaaatcttaaagtatgtaactcaatgaattgggaaggaaaatgataaaagtagcaggaaagtcaagtctttgtgtcactttmtagggaaaacaatgctggtcatctgccaacaacacctccagtctgagagcctggctgaagttgactgccaattgccaaagagtctntgggttttcttcatttgaatctctggaagaaccttgggaagctgccatgcgtgcaagagaattttaattttaaaaaatgcagtaaggtataacttaagttccagggatgataaatcctgcagaaagacccatgagggtgtgtggtgcacttggcctgatccggtcccaacgtgcagccagggagagggactacgggcctcctcaagtcctgctcagctgacagcctctggagaatacgaagctttcaaagtgctggtcctcggctttttctctgatgcgttgttcctctaaggaatcgacgagtttgtccctttgctcctcgtgccgaa

SEQ ID NO: 1074 - DNA, 1646 bp, Homo sapiens
ccacgcgtccgcacactgatgccagaggtgggctgccatggccttggatagctccacccttgtggctttgctgggtacagccccactcctggctgctttcacagctggcgttgagtgtctgtggcttttccaggcacttagtgcaagctgtccgtggatcgaccattctggggtctggaggacggtggccctcttctcacagctccactaggtgctgcccctgtggggactctgtggtaagtgtgagtcgattgactctctttcctttataaattacccagtctcgggtgtgtctttgttagcagtgtgagaacagactcatacagtaaattggtactgagagtggccccggacaaccactgatcttctttcagtcactgcagattattttgaatttttaagagatagaaatggaataatacagtgtgtccttttttcgtctgacttttttctctcagtataaatattttgagatttatccaagttgtaggtattcatagtttatttctttttattgagagtagtatttggttgagatatatagtatagctcaactatgtatcttttggattcattcatctgttgatagacatttgggttgtttacaatttttggttgtgatacataaatgtgctataaaaattcatataaaagtctttgcaaagacttagtctttcattctcttagacacatctcttagataaatccagaggtggaatggctgaaacatatggtaggcacatgttttatatatgtatgcttgtatgtatgtatgtatgtttcagtcaccaggccggagtgcagtggcgcgatcatagctcactgcagcctcaagctcctgtgttcaagccatcctcctgcctcagtctcccaaagtgctgacattacattcatgagccaccgtgcccagctccatgtaattaattcctgctgtgaacttgcttagcacaagcccatcagttttgtgctattatagttttggaaattcagtccaatgctatgaactcaaaattattagaaactatatacttgtcagagtttttttcattctttccattctttccatgaactgccctgaagacataacacttgacgattgtaagtgcttgcaagtaactttcagaaaggcattggaataaagcaattgctatgaacaccaaggcttaaaatggctatggcaatgcagttgacaaggaaatttggttattcgtgaaccataattatgactgatagcatttatatgaagacataggtttctaggaactttatacaattttggaacatctattaataacacatccatataactgtcactcgaaggctaaacatcattccatgttttgacagtgcttcccatataatttaaaatattcgataagcccatgttggcttaatctctttgttttacagttccttttagaagttccagggctttctggaatgtcctaaagttaatttcggtcaaaagttttttgaaaagtttgtcaaatatccaaggtttaaattacatagctactcagggaggctgaggcaggagaattgcttgaacccaggagttggaggttgcagtgggccgagatcgcgccactgcactccagcctggcgacggagtgagacttcatctcaaagaaaaaaaaaaaaaaagg

SEQ ID NO: 1075 - DNA, 2729 bp, Homo sapiens
gttctagatcgcgagcggcctcccaaagtgctggaattatagatgtgagccgcccaccatgcccggctggtggggtgccttaggatcgggccttctaactctgtccctacctctctccagatgccacagggcccagtgggctccgggtcctgccccagggctacggctggaacctgctgtatggctccctgctgctgggccttgtgggtggggtctgcaccctgggagccggcctctatgcccgggcctcattcctcacattcctgctggtctctggctccctggcctctgtgctcatcaattttgtgggtgtggggccgaaggacatccgcttgactcctaagcctggccccaatggctcctccctgccgccccggtttggccacttcaccggcttcaacagcagtaccctgaaagacaacttgggcgctggctatgctgaagactacaccacgggaaccgtgatgaattttgccagcgtctttgctgtcctctttaacggctgtacaggcatcatggctggggccaacatgtcaggaccctgctgcaggaagactatgggttcttccgcgccatcagcctgtggcccccactggtgttgatcggaatctatgccacagcgctctcagcgtccatgagctcgctcattggtgcctcccgcatcctccatgccctggcccgggatgacctctttggcgtgatcttgtcaccggccaaggttgtgtcccgagggggaaacccctgggcagctgtactttattcttggggcctggtgcagctggtgctcctggctgggaactgaacacactggctgctgtggtcactgtcttctacctggtggcctatgctgccgtggactgtcctgcctgagcctggagtgggcctcggcccccaacttccgccccaccttcagcctgttctcctggcacacctgcctgctgggggtggcctcctgcctgctcatgatgtcctcatcagtcctggcgcggctggtggctccctgctcctcatgggtctgctggctgccctgctcaccgcgcgaggaggccccagtagctggggctatgtcagccaggccttgcttttccaccaggtgcgtaagtatctgcttcggctggacgtccggaaggatcacgtgaagttctggcggccccagctgctgctcctggtggggaacccccggggcgccctgcctctgctgcggttggccaaccagcttaagaagggggggctgtatgtgctgggccacgtcaccctgggagacctcgactccctgccctcggaccctgtacagcccaagtatggggcatggctcagcctggtggaccgtgcccaggtgaaggcttttgtggatctaaccctctcaccctccgtgcgccagggggctcagcatctgctgcgaatctccggcctcggcggcatgaagcccaacacgttggtcctaggtttctacgatgacgctccaccgcaggaccatttcctgacggacccggctttctctgagcctgcagacagcaccagggagggcagttccccagctctgagcaccctgttccctcctccccgggctcctgggagcccccgggccctcaatccccaggactatgtggccacggtggccgacgccctcaagatgaacaagaatgtggtgctggcccgggccagcggggccttgccccctgagcggctgagccgggggtctgggggcacctctcagctgcaccatgtggacgtgtggcccctcaacctgctgcggccccggggtgggcccggctatgtggatgtctgcggcctcttcctgctgcagatggcaaccatcttgggcatggtgcccgcttggcatagcgcccggctccggatcttcctgtgcctggggcttcgggaggcgcctggggcggccgaggggcggctgcgggcactgctgagccaactgaggatccgggctgaggtgcaggaggtggtgtggggcgagggggccggggctggggaacccgaggcggaggaggaaggggactttgtgaacagtgggcggggagacgcagaggcagaggccctggcacgcagcgccaacgccttggttcgggcccagcaggggcgcggcacaggaggagggccgggtgggccggagggtggggatgctgagggccccatcacagccctcaccttcctgtacttgcctcggccgccagccgatcccgcccgatacccccgctacctggcgctactggagactctaacccgagacctgggccccacgctgctggttcaatggggtcactccagtcacttgcactgatctgtgatgcccctgcttccagggctaggtagagagggcccaggcaggcggcctatcctgatccttggaggaggaggaagaggaggccactgtggcccgtggccctgcccttgggacgtggagcccaggggaggtttgaaggggatcctgggcttgggcatcacgcccacctcctttggcagagggaccccagcacactaactctgggtggctgtccccaccgtgcaggggagggagtccgcagcctcccttcactggtgccttgatgctaggggccaggcctcctctgtgactctgggctacctcagtttccccattttggccagactcaccggcccactggggtggtgatgttttcgttctgttttatttttctaactctgctgaccatgaataaaagaccaaaacactaaaaaaaaaaaaaaaaaaaaaa

SEQ ID NO: 1076 - DNA, 1978 bp, Homo sapiens
ccacgcgtccggagccggctgccagcactaggtcctgggcagctttgtttgtcccacttttctttgtttcttctcactaaaatgatcacgaagacctttgacaagaggagagatatgcactgtgatattaaattagaaataatttatcaaaatcagacctctcctaaaagaataagaaattcattgtttggcccatcctgaaaggtgaggtggcgagacagtggggtgcctccgtgccgcttcgtgcagcagcaagttcagcctgagatgctggctgtactcagcctttgcaatttttgtagatgtagcttaggacgtgagttatttttccgcagactggccaagagccaggttctaagcttggacctaaggtagaaagctgcccatcgggggccctagctcagccccaccaggccctctgttgggcctgcacacagctctgtggctagaacactccaaggcccttcggtacccatcagagtgggccccttgccaggtggcttttcagttacagagtccagtggaccattttgtagaaccatgcagctccctgcggaaggtggggtagggtgggaaagaggagcaggtctggaggtttgtggaacccagtcccctgcagaatctgtaaaacctaataaatcatggttgtggccattctcacggtggtgattgtgattagacgacccccgggaagcccagacactcggggcctggagttcctccccctgcctgacctagaagcagaaccgttttcagcgctctgccctgttggctttaaggctttgtcttaatttaaggaaaaagatcctcccgggttttatttctctctttcttgagtggactgtttccctataattaaaagaggtggtgagtcctggggcagcttccgcgcctccctgtccacgtgctaacagatcaggacgcccccagcacccctgcctgcttttgctggtggcagtgacgggaccccgactcctcactctcgggccgcagacaatgctgtgagcaagtgtggccatgggcacagaatgtccctttggacgccgctgctgggggctgccaggggccctctggggtcgtgctttgaggcccgtccggttcacgagggggtccgggcagcactgactgcttccgacctgcaggaggcgtaggagcggccctgcgggccctttcacggcagctgctgctgtatagatttgtctccactcagtgacgtgggatttttttgtcttccttttggctttatttttaaactgctttagatattactgctcagtgtttgtgaactttcctagttctctatgttgttagtgcagccagcacccagtggggacctactagaaaaaggaactggcatgcacacgtgcccagcaggaaaagcttcgtcttcacgtcggctgctgccatccagaagaggccctggagcctcacgccgtcgaggctgctctcaggcgttctgttccgggcgaggcttgtgctgcaaggaagggcaccagcatgcaggctgcactggagggtccgggtgctgcgggcagagttcagcgcttgtccaccctcccttagctctgactcagtgcatcctactgtggggacatctcgtgaggggacacgaaatgactgatctcaccctttcccagtattcagagctgtgaacccctgtggcgcaggactggcctgtgtctgttattttggttgtaaatcattctcctgtggaattggcaaaagctacatttttactgtccttaccagcaacagtttgcgtcgtcacatgctgtgagtgtgggctgtggtgtgtccgtgtgtgtacatatgtgtatatgtatatatcacgcagcaggagtgtcattcatgctgctgtcccctggtgaagtgacaagtacaattaaaggtggctctgaaaaaaaaaaaaaaaaaaaaaaaaaaaaaaaaaaaaaaaaaaaaaaaaaaaaaaaaaaaaaaaaaaaaaaaaaaaaaaaaa

SEQ ID NO: 1077 - DNA, 1990 bp, Homo sapiens
  misc_feature (1747)..(1747): n equals a,t,g, or c
  misc_feature (1752)..(1752): n equals a,t,g, or c
aggcgggcagaggcggcgagaggcgggctgaggcggcccagcggcggcaggtgaggcggaaccaaccctcctggccatgggaggggccgtggtggacgagggccccacaggcgtcaaggcccctgacggcggctggggctgggccgtgctcttcggctgtttcgtcatcactggcttctcctacgccttccccaaggccgtcagtgtcttcttcaaggagctcatacaggagtttgggatcggctacagcgacacagcctggatctcctccatcctgctggccatgctctacggggacaagtccgctctgcagtgtgtgcgtgaaccgctttggctgccggcccgtcatgcttgtggggggtctctttgcgtcgctgggcatggtggctgccgtccttttgccggagcatcatccaggtctacctcaccactggggtcatcacggggttgggtttggcactcaacttccagccctcgctcatcatgctgaaccgctacttcagcaagcggcgccccatggccaacgggctggcggcagcaggtagccctgtcttcctgtgtgccctgagcccgctggggcagctgctgcaggaccgctacggctggcggggcggcttcctcatcctgggcggcctgctgctcaactgctgcgtgtgtgccgcactcatgaggcccctggtggtcacggcccagccgggctcggggccgccgcgaccctcccggcgcctgctagacctgagcgtcttccgggaccgcggctttgtgctttacgccgtggccgcctcggtcatggtgctggggctcttcgtcccgcccgtgttcgtggtgagctacgccaaggacctgggcgtgcccagacaccaaggccgccttcctgctcaccatcctgggcttcattgacatcttcgcgcggccggccgcgggcttcgtggcggggcttgggaaggtgcggccctactccgtctacctcttcagcttctccatgttcttcaacggcctcgcggacctggcgggctctacggcgggcgactacggcggcctcgtggtcttctgcatcttctttggcatctcctacggcatggtgggggccctgcagttcgaggtgctcatggccatcgtgggcacccacaagttctccagtgccattggcctggtgctgctgatggaggcggtggccgtgctcgtcgggccccttcgggaggcaaactcctggatgcgacccacgtctacatgtacgtgttcatcctggcgggggccgaggtgctcacctcctccctgattttgctgctgggcaacttcttctgcattaggaagaagcccaaagagccacagcctgaggtggcggccgcggaggaggagaagctccacaagcctcctgcagactcgggggtggacttgcgggaggtggagcatttcctgaaggctgagcctgagaaaaacggggaggtggttcacaccccggaaacaagtgtctgagtggctgggcggggccggcagcacagggaggaggtacagaagccggcaacgcttgctatttattttacaaactggactggctcaggcagggccacggctgggctccagctgccggcccagcggatcgtcgcccgatcagtgttttgagggggaaggtggcggggtgggaaccgtgtcattccagagtggatctgcggtgaagccaagccgcaagkttacaaggcatcctcaccaggggccccgcctgctgctcccaggtggcctgcggcantgctnatgctcaaggacctggaaacccatgcttcgagacaacgtgactttaatgggagggtgggtgggccgcagacaggctggcagggcaggtgctgcgtggggccctctccagcccgtcctaccctgggctcacatggggcctgtgcccacccctcttgagtgtcttggggacagctctttccacccctggaagatggaaataaacctgcgtgtgggtggagtgttaggaaaaaaaaaaaaa

SEQ ID NO: 1078 - DNA, 2816 bp, Homo sapiens
ccacgcgtccgcttttaacatgcctgatatgttctgactgtttttatatgcttaaatatagcagcatgactttggaggcttaggagtgcatgtatttttgaggaaggcctctaaattcatatacttggattgagaaatatgtaaatgacccttctcctcctgtccctcaccccccaccccaatgcacattgttgctgtccaaaacgaacataccagtgtgtagatgttagcaggaaagtgccatttttatttgggttggtagttctggactgtttccttacaagcttcaatttttcacactttttaacggactattaaactttgtgtgtacacgatttaatttttctagagattgaaaaggtcctgttacagccatagagttttaaaatgattttaaatgtatgttgtctgcaaatacttaatattttttttgcatataacaagagtgtcttcattcctgtccattacaacccaaagggatgatgatatcaagtagcaagtcagatttatctggtccaattggccatgaaattaaatagtaatttcactggttttgacattacatggttttaattgaaagtcaaagccagtacaggaaatggtattgccttttcttaggaatgcaatgctagttatcagtggtcagctacaggttaatattaataataaacagtgatggccacttacttggtttatcttgactagttgcttccttttcccaggctagtcttaaaacttcatgcagcattttacgctttaattacattgtcaggttaaccttattttgggagtctttagagttggtttgtttttctttatagttgattcaactaaagttattaattgaactcttctccaactcaaaggtgtctattattgtagagggaacgtttttttagttttctataccgttacttggagagagaagttagtgggtgagttattattgacctcagattctgcctcactggggcgtttcaaatggacagtaccataatctcttggctccacatggccagcttactactttgaaattattcctgggtagaaaatgtctcaaaatggggataatcttacgtcttacctttagggcagaataagtcatgttaaagattaaattttagttcacactttgtaaatgccatctctctttgtccttttaaggggcccctgacaaaatgacctatttagaatgaataggtaagaaacaaagtggggcaatggaatgagcacttggcagctggagccctgtgttctctactcctcagtggttaaggcgcagagatttggaaggcagccagacctgggaagttgcttgactctcatggcctcaattcactcttacttgatgggtaaaataataatatctattgtacaagttattgcaagatttaaatgagacaagtaaataaaactcagaatttattgccttgcctttaaatgctagctcttattgagagacctcaggccagtctcatgtcttgttttagcttgctcgttgagtaaaatgaaatgagtggagtagatgatactattgactatgaactagaagcagaatttataaatgattatgtctgaatatgatataattatttgacagcctttgactacctgccattggtatatatggggaatggtatatggaatatatggagtatataggatgatggacagtgagtctaaaaaacccttctacctctgttttcttatcggtataatggggatgataatagtccatacctcatagggttaatgtgaggattagatgagataaaaatgtaaagctctttaaaaaaagcctggtatatggtaaacactgtacgtttttattatttatcttaatgacacaatgaatgagtagtattcaagactagaatgcaataactagtaaggtgttacatacctgctaattgtcctcaggggcatcccttggcttgatgtaaagggaacgaaagtagtaggccacattggggttagctgatgtaactattaaacatacttgaaagcaagtatttacttttggagtttgatatcttagaaagaaacttcattagaaattaagtagtgattagtaatgagtagggattgtcactcattacatgtcattatgtatattagaatcacaatttcatatatagtgatagcatattgaatacaaaggtttttaaaatcttaactacaaagtttcttagagtaacacagctttaaaaatactaattttgctatactttgtttactaagtaactttttctcttctgtattgttattgccaaagtaatgatacaaaaatagtacaacatgttgatttaaaagttggaaagtgaaaaaaatttttaaaaggaaaaagaatagaagtaagcaaaaatattgttaaaccctttatgcagtgataaaaacagtgacttccagggatatagtggttattttcagaaatattttgcttgtcattttgagggaaaaatatcacagaactgtatttccctaaggattaaaaaatagcaggggttaataacagcatgaaaaattcaattccctatctggattcattttattaacaccaaaagccaagggctggtgggggattggggggggcagacgactgtgtgtgtatattatgcagatatagataaatgaagtatatatagatgaaagatatatatctctatatgaaatatttaggtgacatttgttcactattttatccaaatgccatctaatctgaactttttttttttttgagacagagttttgctctagcctagcaacagattgagactccgtctcaaaaaagaaaaaaaggaaaaaaaaaaaaaaaa

SEQ ID NO: 1079 - DNA, 1250 bp, Homo sapiens
ccacgcgtccggtttatctaggttgcagtggcatctgctgtgcacagagcttccatggtcactgctaagcagtagccagccatcgggcattaattgatttcctactatattcccagcagacacatttagaaactaagctatgttaacctcagtgctcaactatttgaactgttgagtgataaaggaaacaaatataactgtaaatgaatcttggtatcctgtgaaacagaataattcgtaatttaagaaagcccttatcccggtaacatgaatgttgatgaacaaatgtaaaattatatcctatatttaagtacccataataaatcattccctctataagtgttattgattattttaaattgaaaaaagtttcacttggatgaaaaaagtagaaaagtaggtcattcttggatctactttttttttagccttattaatatttttccctattagaaaccacaattactccctctattaacccttcacttactagaccagaaaagaacttattccagataagctttgaatatcaattcttacataaactttaggcaaacagggaatagtctagtcaccaaaggaccattctcttgccaatgcttgcattccttttgcacttttggattccatatttatcccaaatgctgttgggcacccctagaaataccttgatgttttttctatttatatgcctgcctttggtacttaattttacaaatgctgtaatataaagcatatcaagtttatgtgatatgtatcattgcaagagaattttgtttcaagatttttttttaatgttccagaagatggccaatagagaacattcaagggaaatggggaaacattaatttagagaacaagaacaaaccatgtctcaaatttttttaaaaaaaattaatggttttaaatatatgctatagggacgttccatgcccaggttaacaaagaactgtgatatatagagtgtctaattacaaaatcatatacgatttatttaattctcttctgtattgtaacttagatgattcccaaggactctaataaaaaatcacttcattgtatttggaaacaaaaacatcattcattaattacttattttctttccataggttttaatattttgagagtgtcttttttatttcattcatgaacttttgtatttttcatttttcatttgatttgtaaatttacttatgttaaaaataaaccatttattttcagctttgaaaaaaaaaaaaaaaaaaaaaaaa

SEQ ID NO: 1080 - DNA, 1795 bp, Homo sapiens
aattcccgggtcgacccacgcgtccggtttgaaccggacagaagcgctggtcggcgtctggcggtttttttagaggtaatacacctagtttgtggctcagcatgtcaattgtaacagtgcaacttggtcagtgtggcaatcagattggttttgaagtttttgatgctttgcttagtgactcacacagttcccagggactctgctctatgagagagaatgaggcatatcaagcatcttgcaaagaaagattcttcagtgaggaggagaatggagttccaattgcccgggctgttcttgttgacatggaacccaaagttatcaatcaaacgctgtcaaaggctgcccagtctggccaatggaaatatggtcaacatgcatgcttctgtcaaaaacaaggttctggaaacaactgggcatatggttactctgttcatggacccaggcatgaagaatctataatgaacataatccggaaggaagtggagaaatgtgactctttcagtggttttttcatcataatgagtatggctgggggcacaggatcaggattaggagctttcgttacacagaatttagaagatcagtactcaaactcattgaaaatgaatcagattatttggccttatggaactggtgaggttattgttcaaaactacaactccattttgacactttctcacttgtaccgatcttcagacgccctccttcttcatgagaatgatgccatccataagatctgtgcaaaactgatgaatatcaagcagatctcctttagtgatatcaatcaagtcctcgcacatcagctgggaagtgtgttccagcctacttattctgcagaaagctcatttcactacagacgaaatccactaggagacttaatggagcatttagttccccatcctgaattcaagatgctgagtgttcgtaacattcctcacatgtctgagaattcattggcatacaccacatttacttgggctggcctcctcaagcatttgagacagatgctcatttctaatgcaaagatggaagaaggtattgataggcatgtatggcctcctttatcaggacttcctcctcttagtaaaatgtctctcaacaaggacctgcattttaacacttccattgctaacttggtcattcttcgtgggaaagatgtgcaaagtgcagatgtggagggatttaaagatccagctctgtatacttcctggttgaagcctgttaatgctttcaacgtgtggaaaacccagcgggcctttagcaaatatgagaagtctgcagtgttggtcagcaacagccagttcttagtaaaaccacttgatatgattgttgggaaggcatggaatatgtttgcttcaaaagcctacattcatcagtacacaaaatttggaatcgaagaagaggactttttagacagtttcacgtcattagagcaggttgttgccagttactgtaatctctgatcttgaacaatgggaaaagtataccttaaggcatttctggactaaaatattttcaatactattttctctgtaaagttttcaaagttctccatcctggctaacacggtgaaacaccgtctctaccagaaaatacaaaaaattagccaggcgcagtggcgggtgcctgtagtcccagctactcgggaggctgaggcaggagaatgacgtgaacccaggaggcggagcttgcagtgagccgagatcgcgccactgcactccagcctgggcgacagagcgagactccgtctcaaaaaaaaaaaaaaaaaaaaaaaagggcggccgctctagaggat

SEQ ID NO: 1081 - DNA, 2486 bp, Homo sapiens
ccacgcgtccggttttggttgggcatcttttcctaggcctcccaaggtgctgggattacagacctgagccaccacgcctggcccattgtctcgcccattttagaatagggcaagctgaggctcagagccaggcaagagcctgcacccttcattctttgttttgagaagtactgatcgagcgcccacagcagtgatgaaacacgcagaacctcctgctttgctgaactggcagcctatgagaagacggctatgggtacacaacgccactgactgatgcgggcaaggccttctccatcgcctttgcgctcctgggcgtgccgaccaccatgctgctgctgaccgcctcagcccagcgcctgtcactgctgctgactcacgtgcccctgtcttggctgagcatgcgttggggctgggacccccggcgggcggcctgctggcacttggtggccctgttgggggtcgtagtgaccgtctgctttctggtgccggctgtgatctttgcccacctcgaggaggcctggagcttcttggatgccttctacttctgctttatctctctgtccaccatcggcctgggcgactacgtgcccggggaggcccctggccagccctaccgggccctctacaaggtgctggtcacagtctacctcttcctgggcctggtggccatggtgctggtgctgcagaccttccgccacgtgtccgacctccacggcctcacggagctcatcctgctgccccctccgtgccctgccagtttcaatgcggatgaggacgatcgggtggacatcctgggcccccagccggagtcgcaccagcaactctctgccagctcccacaccgactacgcttccatccccaggtagctggggcagcctctgccaggcttgggtgtgcctggcctgggactgaggggtccaggcgaccagagctggctgtacaggaatgtccacgagcacagcaggtgatcttgaggccttgccgtccaccgtctctcctttgtttcccagcatctggctgggatgtgaagggcagcactccctgtccccatgtcccgggctccactgggcaccaacataaccttgttctctgtcctttctctcatcctctttacactgtgtctctctggctctctggcattctcgctgcctctgtctttccctcttgctgtctctgtttctcattctctttcatgttccgtctgtgtctctcaattaaccactcgtcaactgctgattctactgggctgtgggctcagacctcatttcaggcaccagattggtcgctacaccctggacaagtgactgcccgtctctgagccttgatttcctcagctgccaaatgggaagaatagaagaatttgcccctaaacccctcctgtgtgctggccctgtgctagacagtgctggagacatagttgggggtggagaactgcccttatggagcttgcagtccagtgaggtggacagacctgtccccagacagtgatggcccaaaatggtcaggactttaatggaggaggtgaggtgttgaaagcacaggcagagtggtcagggctgaagtcggagaagcatagggactaggcccaatccagcctggaaagtcagggaggacttcctagaggaagggacatcgaactaagacctgaactatgagaaataggcaggaagaagttgtacctgactcatttttctcaggtgtctccagggagcaggacccatggagggacccctggtgtaggcctgggcgatagactcttcctcagcagcctggcaggcaggaaacagacataggaccccagcccagatctgaatggcatgggaggtgctgcccttaaccatgacaccattgtaagagctgtccacatttgtatgttgtgccctggaatcagcctggttgagctcaaatcccaacttagccacgtctggcctgtgtccttgggcagtcacactacctctctgattttgtttccttatctgtaaaatggtgatcatcataatacaacttcaaaaggatttcaggctgagtgtggtggctcacgcctatacacccagcactttggaaggctgaggaaggaggatcgcttgaggccaggagtttgagactagcctaggcaacacagtgaggccttatctcaacaacaaccacaaaatctaaaaattagctgggtgtggtggtgcatgcctgtgatcctggctacttcagaggctgaggtggaaggatcacttgaggccaggagtttgaggctgcagtgagttatgatggcactgctgcactccagcctgcgggacagagtgagaccctgtctgaaagaaagagagaaagaaagaaagaaagagagagaaagaaagaaagaaagaaagggaaagatggaaggaaggaaggaaaaagaaagagaaagagagagagagagaaagaaaaagaaagaaaagtaagaaagaaaaaagaaaaagaaagaaaagtaagaaagaaaaaaaaaaaaaaaa

SEQ ID NO: 1082 - DNA, 554 bp, Homo sapiens
acgcgtccgggagaaggcaactccagtcagaacagcagaaataagcgtgccgttcagggtccagaagaaacaggatcttacacatttgttccatggcttctcagctttaaaaggggaagtgccctagaagaaaaagagaataaaatattggtcaaagaaactggttacttttttatatatggtcaggttttatatactgataagacctacgccatgggacatctaattcagaggaagaaggtccatgtctttggggatgaattgagtctggtgactttgtttcgatgtattcaaaatatgcctgaaacactacccaataattcctgctattcagctggcattgcaaaactggaagaaggagatgaactccaacttgcaataccaagagaaaatgcacaaatatcactggatggagatgtcacattttttggtgcattgaaactgctgtgacctacttacaccatgtctgtagctattttcctccctttctctgtacctctaagaagaaagaatctaactgaaaataccaaaaaaaaaaaaaaaaaaaaaaaaaa

SEQ ID NO: 1083 - DNA, 1422 bp, Homo sapiens
acgcgtccggaaaatgttctttgatgtctcataggcaactcaaatttgatgtgaagaaagctgaacttgccttctctttcacttttccccttagtcaatgacccaggtaactatctcgaaacttggaaggctgctgcttctggccttacccctatgcccaatcagttgtcagtatagtcagttctcccgtgaatagctgtacactctatatactgcctgtcactgtgcactgccaccaactaagaccaagccactgctgccatctctttcctaggttacttaaagggcagttgcaccccctacactttctccagtctaacatcctatgctgctattggcctcataaaatgtccatctgattgcatcatcctttgcttaaaatgcctcattagagttttgataaaatctaaactttttaacagggcttataagatccttaataacctgttcccaagctggctgcatttcttggagtttctcggaaatatctgcctccctcaagcacattcccaccccaccctgcatacatacacatctctggccacttgtttgtcatttaccctagagtctaacatagggcacagtaaggcctcaataaatatttgttaaataaaggtaggaaggcagtggtcctggattttaattgtatgtcctcacattttaatttaatttaccttaaaaatgtaaatgattccagagtcaaaagttgctgttttgttttatagtgctctgtatgtttccctccactctgtagtttccagagggttattaaaaatggactaaaagaagcatgtgggcttctgttagcaaatcagttgtaatctgtgttctttggctgagtgctgagcttaggaggctgccagatggggacacaggaaccaaatcatctttgcttcccagtggggaacaggggcataaattggctgaatgggcttctgcagtaaaaactccttcaatttgagcttgtgtaagccaggatcaaaatacctgggacttggtgagacttgtctagactggttggtaaactttcaacctgtttgggaagaaggcttggaacaacagtgggtttgggtcttgtgaagtaaatcttatttaaaggaaatagacaaaagcttaatcatgtttaatttgtaacattataggtaagactgttggttgctgttgtaatgactctaaaaaagaatagagaatatttttttccttagaagttccaggttcaatgatgaagccccatctctaccaaaaattcaaaaattagccaggtgtgttggccagtgtctataatcccagctactcgagaggctgaggcaggaaaatcacctgaacccaggaggtggaggctgcagtgagccgagatcgcgccactgcactccagcctgagccacaaagcaagacgccatctcaaaaaaaaaaaaaaaaaaa

SEQ ID NO: 1084 - DNA, 1181 bp, Homo sapiens
gggaattatgtatttaaaaacatgtcacgtggaccaatgccatgcttttaaatacataattccaaacctattgtatttgaaagcatggcattggtccacgtgacatgttgggtgtcttgttttcattttaccagactctgtttttatttatgktttcagtttatgatcctgtcctttgttcataaggtacttagatggtttaagatgtagacttcttatatgaagatgttgctgttgtttttccaaagtaatggtggtcatcagcccatttttctatttagtctcatgaatagaatcatgagtagaatctttcttaaattattacttgtaaatggatcactttcttgttttctttttcttaattggagctttaaataaatatggaacttggacaaaaagattttcaggaattttatggaaactaacttttttgacctaaatcgaaagggatgaaagtttctgaaaacctaacaaaatgtgtgcacagccaattcttttaggggaggaaataggcagggaatgtgtaattggctattttaaaaacatatgccttcttttgtaacttattgttgtttcaagttacaagatctttgaaggcaagtgtttatctcaaaatatttgaaagcttttatagtgcttaacatattaagacgtcctattagggtttacttagaacaagcttatccaacttgtgggccacatgtggcccaggatggctttgaaagcggcctaacacaaattcataagctttcttaaaacattatgtgatttttttttttagcttatcagctatcattagtgttaatgcattttatgtgtggcccaagacaattctttttcttccagtgtggcccagggaaaccaaaagattagacacccctgacttagaactttccataggttaggaaaaagttgtactttcttgatgtctataacctagaatttctggtaaaggaattgattggaaatgttattaaaagttgaaaataatttggaaattwaacattttagtgatcagttcttccattgagactgtgttggttcctttactagatatgtgccatctttttaaaaacttactgtgttgcttcctttactagaaattgccatctttttgagccttgtctattgaggaaccaagaacacagaaaaggcagtaaaaaaaaaaaaaaagggcggcc

SEQ ID NO: 1085 - DNA, 1430 bp, Homo sapiens
ttttttttttttttttttttttttttttttttttttttttttttttttttttttttttttaagcttcatggcacagagtttaatgtgaatcatgagatgagacaaaagcctcctccagggcgatgggaagacccagccccaaaccagactcttgagcacgcagccctaaaccagactccgggaaggggctgcgtggtcatgcaccgcctaagactcagaggtgaagatgggaagacccagccctaaaccagactcctggaaggggctgcgtggtcacgcatcgcctaagactcagaggtgaagatgggaagaccccagccctaaaccagactcttggaataggctctgtggccacccatcgccgtaaggtccgggatggagacagcatggacagggacctcgcacaaaggcatgtcgggagggctcttttccaaggcacagccccacttgttctttctcagcccacgacgggagcagagccatgtcgaagccgtgccccacacagggtggacaaggacatggcctgacagctcctcagaaatccttagagatttttccaaacgcaggttaccagggcttctgcagagagaggggcagcaggacgtgctgctgacagtccctggggacttacactgacttgcagtgagagcccacatctgccaccaggatggctcccagcaccaccgcgtcacaagcaccacacttccaccgtgggacgcccagatggctcggcaggcaggccgggctggggagctgacagcagacgcctgggactctgcccagcgtcctcacccacaaccttttaactgtaactggcagaggagacagcagggagggcagaaggtacagtgatggctaggatgcagttctaggttttgccagacatactttcaggggccactcctggctacctaattaatctacctgtgtataagaattttttagcttattaaatattccaagaggccaggcatggtggctcacgcctgtaatcccaacactttgggaggacgaggagggtggatcacctgaagtcaggagtttaagaccagcctggccaacatggtgaaaccctgtgactactaaaaatacaaaaattagccaggtgtggtggcgcgtgcctgtaatcccagctacccaggaggctgaagcaggagaatcactggaacccgggaggtggatgttgcagtgagtctgcagtgagccaagatctcgccactgcactccagccggggtgacacagtgagactctgctgggaaagggcggggatggcaagagtgccaatacatagacaatgctgggcaaggccagagatgctggtcaagggcggggatgtcgggagcggacgcgtgggtcgacccgggaattccggaccggtacctgcaggcgtaccttctatagtgtcacctaaatagctttttgcaaaagc

SEQ ID NO: 1086 - DNA, 1719 bp, Homo sapiens
gagcgggagtggagggcccagtccctacccmtggcagtagggggcgttttgaagctgcggctctgtgagctgtggctactgctactgggttctagtttgaacgccagatttttgccagacgaggaggacgtagactttatcaacgagtacgtgaacctccacaatgagctgcggggcgacgttattccccgagggtctaacttgcgcttcatgacttgggatgtagctttatcacggactgctagagcatggggaaaaamatgtttgtttacgcataatatttatttacaagatgtacaaatggtccatcctaaattttatggtattggtgaaaatatgtgggtcggccctgaaaatgaatttactgcaagtattgctatcagaagttggcatgcagagaagaaaatgtacaattttgaaaatggcagttgctctggagactgttctaattatattcagcttgtttgggaccactcttacaaagttggttgtgctgttactccatgttcaaaaattggacatattatacatgcagcaattttcatatgcaactatgcgccaggaggaacactgacgagaagaccttatgaaccaggaatattttgtactcgatgtggcagacgtgacaaatgcacagattttctatgcagtaagataaagaaaatwaacatgraaaaaatgcataatggattggacaacaagaaaaataagcgattgaacactagttttttatggtcatgttaatattattcctttgatcagaatgctactattatgttatcaaaggatggttgacacagtatcatctttagatttttcyaaactgcagagctttttctgttctatcttaaccctattccttcccctgaggacataccagagtgtcagaaagaaagaatgagaactaacagttatacccttaaaaagcttcacagtttatgcccaaacagcagcctgtttgataaatactgctttaaaggatagtatattccaaaatatttatgaagtagcatatatttaatacccttttcttttagtttttcctccaaaaagctgaaatctccaaatatttcaaaagtaaaaagtagaaaatatgtttgattacatttttcttttagtttttccaaacatgagagaatatactccaaaagtataactgtagctaaaatatacaatgcttagaggaatatggtaggagataaatttggataataagtaaatagcatattatgttgttttttaattattatactttaagttctggggtacctgtgcagaacgtgcaggtttgttacataggtatatacatgccatggtggtttgctgcacccatgaacccatcatctacattagatatttctcctaagctattcctcccctagccctgaccccctgacaggccccagtgtgtgatgttcttctccctgtgtccatgtgttctcattgttcatctcccacttatgagtgagaacatgcagtgtttggttttctgttcttgtgatagtttgctgagaatgatggtttgcagcttcatccatgtccctgaaaaggaaatgaactcatcctttttttatggctgcatagtattccatggtgtatatgtgccacactttctttatccagtctatcattgatgggcatttgggttggttccaagtctttgctattgtgaacagtgctgcaataaacatatgtttgcaggtgtctttaaaaaaaaaa

SEQ ID NO: 1087 - DNA, 797 bp, Homo sapiens
  misc_feature (779)..(779): n equals a,t,g, or c
  misc_feature (793)..(793): n equals a,t,g, or c
ggcatggtggtgtgcacctgtattctcagcctcccaagtagctgggattacagtcaggcaccaccacacccggctaattttgtatttttttagtagagacagggtttctccatgtcggtcagggtagtcccgaactcctgacctcaagtgatctgcctgcctcggcctcccaagtgctgggattacaggcgtgagccactgcacccagcctagaatcttgtataatatgtaattgtagggaaactgctctcataggaaagttttctgctttttaaatacaaaaatacataaaaatacataaaatctgatgatgaatataaaaaagtaaccaacctcattggaacaagtattaacattttggaatatgttttattagttttgtgatgtactgttttacaatttttaccatttttttcagtaattactgtaaaatggtattattggaatgaaactatatttcctcatgtgctgatttgtcttatttttttcatactttcccactggtgctatttttatttccaatggatatttctgtattactagggaggcatttacagtcctctaatgttgattaatatgtgaaaagaaattgtaccaattttactaaattatgcagtttaaaatggatgattttatgttatgtggatttcatttcaataaaaaaaaactcttatcaaaaaaaaaaaaaaaaaaaaaaaaaaaaaaaaaaaaaaaaaaaaaaaaaaaaaaaaaaaaaaaaaaaaaaaaaaaaaaaaaaaaaaaaaaaaaaaaaaaaaaangggggggcgttttnaggg

SEQ ID NO: 1088 - DNA, 1868 bp, Homo sapiens
caccgcctcccgccacccctgcccgcccgacagcgccgccgcctgccccgccatgggtcgacagaaggagctggtgtcccgctgcggggagatgctccacatccgctaccggctgctccgacaggcgctggccgagtgcctggggaccctcatcctsgtgatgtttggctgtggctccgtggcccaggttgtgctcagccggggcacccacggtggtttcctcaccatcaacctggcctttggctttgctgtcactctgggcatcctcatcgctggccaggtctctggggcccacctgaaccctgccgtgacctttgccatgtgcttcctggctcgtgagccctggatcaagctgcccatctacaccctggcacagacgctgggagccttcttgggtgctggaatagtttttgggctgtattatgatgcaatctggcactttgccgacaaccagctttttgtttcgggccccaatggcacagccggcatctttgctacctacccctctggacacttggatatgatcaatggcttctttgaccagttcataggcacagcctcccttatcgtgtgtgtgctggccattgttgacccctacaacaaccccgtcccccgaggcctggaggccttcaccgtgggcctggtggtcctggtcattggcacctccatgggcttcaactccggctatgccgtcaaccctgcccgggactttggcccccgcctttttacagcccttgcgggctggggctctgcagtcttcacgaccggccagcattggtggtgggtgcccatcgtgtccccactcctgggctccattgcgggtgtcttcgtgtaccagctgatgatcggctgccacctggagcagcccccaccctccaacgaggaagagaatgtgaagctggcccatgtgaagcacaaggagcagatctgagtgggcaggggccatctccccactccgctgccctggccttgagcatccactgactgtccaagggccactcccaagaagcccccttcacgatccaccctttcaggctaaggagctccctatctaccctcaccccacgagacagccccttcaggatttccactggaccttgcccaaatagcaccttaggccactgcccctaagctggggtggaaccggaatttgggtcaatacatccttttgtctcccaagggaagagaatgggcagcaggtatgtgtgtgtgtgcatgtgtgtgcatgtgtgtgcatgtgtgtgcaggggtgtgtgtgtgtggggggggttcccagatattcagggcaagggaccagtcggaagggattctggctattgggggagcccagagacaggggaaggcagcctgtccatctgtgcataaggagaggaaagttccagggtgtgtatgtttcaggggcttcacatggaggagctgcagatagatatgtgtttctgtgtatgtgtatgtctgcctttttttctaagtgggggcttctacaggcttttgggaagtagggtggatgtgggtagggctgggaggagggggccacagcttaggtttggagctctggatgtacatacataagtaggagcagtgggacgtgtttctgtcataatgcaggcatgaagggtggagtgaagtcaggtcataagtttcatgtttgcttttgttttgttttgtttttaatgtatgtagcagatgttacagtcttagggatccgggatgggagaccccactttagaaagggtcgtcactcctttaatcctctactcaacaatgtactcttttacttttatattaaaaaaaataaaataaatatgtgcctaaaaaaaaaaaaaaaaaaaaaaaaaaaaaaaaaaaaaaaaaaaaaaaaaagggggggg

SEQ ID NO: 1089 - DNA, 2444 bp, Homo sapiens
  misc_feature (1655)..(1655): n equals a,t,g, or c
ggcggaggcggaggcggccccgggctcgggcggctgggatggagcagaagagcgcggacaccggagggcacgcagctgacggagctgcgctgcgttcgcctcgtttgcctcgcgccctccactggagctgttcgcgcctcccggctcccaccgcagcccacccggcagaggagtcgctaccagcgcccagtgcgctctgtcagtccgcaaactccttgccgcccgccccgggctgggcaccaaataccaggctaccatggtctacaagactctcttcgctctttgcatcttaactgcaggatggagggtacagagtctgcctacatcagctcctttgtctgtttctcttccgacaaacattgtaccaccgaccaccatctggactagctctccacaaaacactgatgcagacactgcctccccatccaacggcactcacaacaactcggtgctcccagttacagcatcagccccaacatctctgcttcctaagaacatttccatagagtccagagaagaggagatcaccagcccaggttcgaattgggaaggcacaaacacagacccctcaccttctgggttctcgtcaacaagcggtggagtccacttaacaaccacgttggaggaacacagctygggcactcctgaagcaggcgtggcagctacactgtcgcagtccgctgctgagcctcccacactcatctcccctcaagctccagcctcatcaccctcatccctatcaacctcaccacctgaggtcttttctgcctccgttactaccaaccatagctccactgtgaccagcacccaacccactggagctccaactgcaccagagtccccgacagaggagtccagctctgaccacacacccacttcacatgccacagctgagccagtaccccaggagaaaacacccccaacaactgtgtcaggcaaagtgatgtgtgagctcatagacatggagaccaccaccacctttcccagggtgatcatgcaggaagtagaacatgcattaagttcaggcagcatcgccgccattaccgtgacagtcattgccgtggtgctgctggtgtttggagttgcagcctacctaaaaatcaggcattcctcctatggaagacttttggacgaccatgactacgggtcctggggaaactacaacaaccctctgtacgatgactcctaacaatggaatatggcctgggatgaggattaactgttctttatttataagtgcttatccagtagaattaataagtacctgatgcgcattgaacgacaatcttaagccctgttttgttggtatggttgtttttgttttcctccctctcctctggctgctacaacttcccctttctggtacaagaagaaccattctttaaaggtgagtggaggctgatttgcagctgaagtgggccagccttgcaccagccaggccagaccaccatggtgaaggcttctttccccactgcaggacccactttgagaaggaccgaggargargatttgggttgttttgttaggggttactttcaggggaacatttcatttgtgttatttcttaaacttctatttaggaaattacattaagtattaatgaggggaaaggaaatgagctctacgaggatttcaccctgcatgggagagagcanggttttctcagattcctttttaatctctatttatctggttgtttctgacaggatgctgcctgcttggctctacaagctggaaagcagcttcttagctgcctaattaatgaaagatgaaaataggaagtgccctggagggggccagcaggtcacggggcagaatctctcaggttgctgtgggatctcagtgtgcccctacctgttctcccctccaggccacctgtctctgtaaaggatgtctgctctgttcaaaaggcagctgggatcccagcccacaagtgatcagcagagttgcatttccaaagaaaaaggctatgagatgagctgagttatagagagaaagggagaggcatgtacggtgtggggaagtggaagagaagctggcgggggagaaggaggctaacctgcactgagtacttcattaggacaagtgagaatcagctattgataatggccagagatatccacagcttggaggagcccagagaccgtttgctttatacccacacagcaactggtccactgctttactgtctgttggataatggctgtaaaatgtttaaaaacaaaacaaaacaaaaaagaggcactagtctatctgcaattactcaacgaggcattttcataggaaacagactatgattaatccatttattcttcccacacacttaccttactaagtctttgctttaataaatgagcaaccctgggtatagtcttaaaattctgcacaataaattttgagaaagaaaaaaaaaaaaaaaaaaaaaaaaaaaaaaaagggggggg

SEQ ID NO: 1090 - DNA, 686 bp, Homo sapiens
ccacgcgtccgcccacgcgtccgggacagtgcagctgtgatgaagccacagtcggatggaaaactgacctgagatctaagcgcttctccctgcatgagcctcacactcacttctacaagtgtgttcagagaaaattcaccaaacgccacaagtctgtgaggcatcttcacagcaagcccagcttcagggaaacagcagccaggccgcgtaatgaaggccaactgaggcagcccccggggtcagcctagcccagggcttgggccctccatcatggagagtggtcaagtcagtctgtttggtttggttttcagtctgatgccatgttgtcagcacattcagaagggagcagcttgtcctaagacagtgaatctcaggaggccacagctgtcaggacttttgatttcctggcgattcctcaagtgtattctgctggattttaatgggtgggtgtggaaaagtccctaattagatccatttggaaatccctgagtgaaacaaagtctatttttattgcgcacctacgagccagcaggagaaagctgtgtgcttgtctctttgcagcaatgcagctgacctcggaaatgatgtccaagaatgcctgaagctgagatggaaagtggcagcacctactatgtgccaggtgctctggataaagctgtaaaaaaaaaaaaaaaaaaaaaaaaaaa

SEQ ID NO: 1091 - DNA, 1112 bp, Homo sapiens
tcgacccacgcgtccgcccacgcgtccggggatttgttcttcaggtacgaggaacagcaaattcaggaaaaagtggcgacctttcgactcatgttgctggagaaggatgtgaaccctgggggcaaggaggagaccccagggcagaggccagcgtgagtgttgcgctctccctcgatgactctggactctactctggctgctggctgctgctgctgtccttttccttacgtgggacttcctccctgctttcgtctgcctttcccatgccttatttggctcctgcttatacttgtgttctgaatatggctctgtcctttatatttccttcagacttttgcccttcttttctctagggtcacggagactcaccagttggcagaattaaatgagaagaagaatgaaagactccgtgctgcctttggcatcagtgattcttacgtagatggcagctcttttgatcctcagcgtcgtgcccgagaagctaaacaaccagctcctgagcctcccaaaccttacaggtatacaaggccaagaaaccactgtcagcttcttttcttgattgtaagctccatgctctatttttgtctttttgcgggctggtttcttcccaaactcttcagattttgttcttctgaagttgaggtgtccaaaaaaatttgtccaagggttagtcacagtgggtcacgcgcgtaatcccagcattttgggaagctcaggcaggagatcacttgaggccaggagtttgagaccagcctgggcgatgtagtgagaccccatctctacaaaaagaaaaaaagctggttggtggcacatgcctgtagtccaggctgcttggagaggtggaggcaggagggtcttttgagcccacaagttggaggttacggtgtgagctgtgttgctgccactgcaccccacctgaggcaacagagcgagattcttatttttttatttttattactatttttttagactctgtcttttaaagaaaagaaaggaatgtttgttctaccacccatctctgctgcttttcatttttccctagccttgttcgggagtctagcagttctcgctcaccaaccccaaagcagaagaagaagaaaaaaaaaaaaaaa

SEQ ID NO: 1092 - DNA, 1254 bp, Homo sapiens
ccacgcgtccgcgagaaacataaaaatgggggcttgattaaaggccggtttggacaggcacggatggtgacaactacacacagcagggccccatcactgtctgcttcctataccaggttgttcctgattctgaacattgctattttctttgtcatgttggcaatgcaactgacttatttccagagggcccagagcctacatggccaaagatgtctttatgcagttcttctcatagatagctgtattttattatggttgtactcttcttgttcccaatcacagtgttagcactgaagctataaattacctggtcattttgtgatcacaagagtctatgcaaaaaaaaaaatttctttaccccagattatcagatttttttccctcagattcattttaacaaattaagggaagatattttgacacaagaaagcaggaacgtggagaaattggagcaggaaaagaaattatcaaagcaatagaaatagcttggtggtcctatggtgtttttggaagtatttggcattgctaattgagcagtccatatagtactacttttagaagaaacaaaaagtctgttttttaaagtaatgttttttcttatgagaaaaaggtttagatagaattgggttttattaatattaatttaatgctattagcaatttccatatactatattgtggaaaagactgaagaatacaattctgagaaatacaaaaaaattttaatggtatactcatgttgaaagataaatgttgctaagtcctggtatgatggtgtgagcttccttggggaagtacttcttgagttatgtaactaacaggatgttttactacagatctggatggctattcagataacatggcaaaaaatgatagcagaagatcattaaaaacttaaaatatattttattagaaaacatttatctatgaatgaatatttccttgatgctggtctctgcacacatatgcttggttacttgcatgcattcattggttgttcaataagtgagatgattacagataacttaatactgtattttccttatatggaaaaccgttatagacccaataacaactaaacctttcaaaagaaaatattttctattatgaatgttgattttcataccaaagaagatggagagtctaaaatttggatatgattcttatgtttttttaatagaaaaccttcttcaagtttattttcctaaataaacatcataattgtgaaaaaaaaaaaaaaaaaaaaaaaaaaaaa

SEQ ID NO: 1093 - DNA, 1240 bp, Homo sapiens
acgcgtccgggcatttgtaggcttggaggtaaagaactgaagataactggtgctggatagaggagccttattttttattatggcagcttgctatttttataacatggtgattgagttgaacacaatcaaagtacagtagtaactgatgtccccttcttcctggatgaatgagcagataaatattgatgtcagcatccttgaaccatatcaaagtgagcagtgtttggctactgcttctatttgaaatggtgctgtgttttggttgtggtctgaagctttgaagcgctacttagcatctcctttcttccatggagctctcacgattcaaacatgacagatttggtaaaatgctggttaggttgagtcttccttgcccccactcagtcatctttgtatgaatcccatgatttgggggtttttttcttttttttttataccagtttttagctggtgtttatgaagaacagtgagtacctagaactgtgccactaattaaaggaaatcctaagaaggtgcatttctttacagagctgtgtcatgccatcctttgggccctctgctggaaaagtagaatcaagtctcaaataatgcctttttaattgtatcctctagtattatagatataggacagtactgtatcatacctctgtgaatgtaaaatatcttgtacctgctttatgatacgtagtagtgaccgtgctttatcagagctgtttttaatgatgttattctagaatgttttctttccagatgatgattcagaagctaattttaaaaaacggtgccaggtaccacaacagtaacagaactttgcaattttctggggttttgttttttacctttttccccccttttttttaaatggagtgtgctggatgtctctataattttattcagatgactgcagaacctggaaaagctgttgctgctattgatgcataacatactgctattggtctttttatataaatatatatatatatatacatatatatatataatttgaatttttggaaactttagctgtgctgtcaactttggaaaaagtatcccggtttactgtgttgagttggcattgtacagaaattaacagccatattggtctagaaacgttaaacttaattttttttccatttgtacaggggtaacgcactgtattaaatatgtaaggtcttatctacatgggtttgattacagaaactaataaagtattctctaaataaaaaaaaaaaaaaaaaaa

SEQ ID NO: 1094 - DNA, 1337 bp, Homo sapiens
ccacgcgtccggaaacccacagaaaatactgggctttatggagcaatccatttgaagagattgctgaattctgaactactgagaaagcacagagaattacaagcatcaacattattttaaagtagaaaagccaatgtaggaaatataaaagctatgttaccgtgctccttaaaatcaggacaaagttagttccaaacatcatcctgtgtgttattcaaaaaatctgatgctctctgcagatctatgaaggagcaactggctcaatttctcaaggtcacttctagcttccggctcctgcttcttctaacttggatgggtttggggattgcccccctgaccctgtgctatactgcaataacctaaacaaggactcagcagtttcccttagttttcactgcagaccacttatcaaaggcatgtgtgtgcaggacaggcttcaccgaaggtttgaggagccagaggggtttacattgcaccttgagctggaaaagtaaaatattggcagtctccgtccttcaaaaacagcaggtattttgtaactcaggctcctgccttctccctgtagctcacccttttttcttttcctcatttctttracccatccttcccaaaggcaaaaaaataaaagccagaaccactctttccattttattactcagaatagttcagctatctccaagctgaacccttcaacacagctgtggtcttcctctgaatattagcagaagtttcttattcaaaggcctcctcccagaagaagtcagtgggaagagatggccaggggaggaagtgggtttattttctgttgctattgatagtcattgtattactagaaatgaactgttgatgaatagaatatattcaggacaatttggtcaattccaatgcaagtacggaaactgagttgtcccaaattgatgtgacagtcaggctgtttcatcttttttgtttattttcaatgcctaataaacagagatcctaaaaaaaaaaaaaaaaaactcgagagtacttctagagcggccgcgggcccatcgattttccacccgggtggggtaccaggtaagtgtacccaattcgccctatagtgagtcgtattacaattcactggccgtcgttttacaacgtcgtgactgggaaaaccctggcgttacccaacttaatcgccttgcagcacatccccctttcgccagctggcgtaatagcgaagaggcccgcaccgatcgcccttcccaacagttgcgcagctgaatggcgaatggagatccaatttttaagtgtataatgtgttaaactactgattcyaattgtttgtgtattttagattcacagtcccaagg

SEQ ID NO: 1095 - DNA, 1337 bp, Homo sapiens; identical to SEQ ID NO: 1094

SEQ ID NO: 1096 - DNA, 1337 bp, Homo sapiens; identical to SEQ ID NO: 1094

SEQ ID NO: 1097 - DNA, 1724 bp, Homo sapiens
ccacgcgtccgatcctcctgtcttggcttcctaaagtgttgggattacaggtgttagccactgtgcccagcccctttgacatttttaatagctcaacatttattaaacctgtaagtggcttaaagtttcaaaattctccattgtaagtcaaaaaatgtcttaagatttttatcccagacttatgctaagggttatgaatctgttccaccttttgtttgaaatagccacctgtctgatttgcttgtctatttcttcaaagaactctggggaaaacagtatgatagagtagcaaggagttggtttttcaaatcagataaatatgtaataaaattccatttctacctctcctaagacatgtaatttaacttcacaaagcctcagtttcctcatctaaaagatgaaaaaaataaaatctgtgcagtcatgatgttgaaataaattaatgcatatatatatatatatatatatagagagagagagagagagagagagagatacacacatacctatgttcctctttccctctgaatccacccagacataggtagtgataagggacaatttaaataaggcagcaaattaaaagtaggaaggttacattagcatgcttcttagctttacttcttatgaccatgatgtcattatttgagaaatgttagtttcagtcagatattctaagttcttatgcattaatagttaatttttttctctttgaagaatgaaagaggaccacaaggttttctctgacttagataggagatagtaaattaaaagaatatataaggcatcttgaattagccactattgagagcaattacctgttctagagaattctttagctatgtcctgaaatggtctgggttgttctcacctgtatctaatgtttgtggttgttcttcctagttgacctgttaggcttgttaaattggcgttccaactcccagaacattaaacacaacctaaagaagttaatggaagtggatggaggagagattgttaagtttttgcaagatacactagatgcactctttaacataatgatggaaatgtcagacagtgaaacctatgacttccttgtgtttgacgcactggtatttattatttcactgataggagacatcaagttccagcattttaatcctgtacttgaaacctacatttacaagcacttcagcgccactttggcatatgtgtaagtatgatctgaaggaactacatgttgttggatctttggatttgtactcttaggactggattgttgagaaacgagacggacctattactattcagtaaatacgcctgttaaggcagaactcttattctaagcttccgggtggaaaaagggaaccatctaagtattctaactctggaaagggggctaagatcagggccttcattctggatcaggcgaaatttccttaaggatccagaataggccaggcgtggttgctcatacctgcaattccagcactttgtggggaggattgcttgaggccaggaattcaagaccagcctaggcaacataacaagaacctatctttacaaaaaattaaaaagttagccaggtgtggtgacacacacctgtagtcctagctactcgagaggcttaggtgagaggattgcttaagcccagggaagtcaaggctgcagtgagctgtgatcatgccattgcactccagcctaagtgacagagcaagacttagtatctaaaaaaaaaaaaaaaa

SEQ ID NO: 1098 - DNA, 1519 bp, Homo sapiens
gggtcgacccacgcgtccgaacaattctactgacaatgttattgtacctgctgccttgtattgttagcatggagatacccgatttttaaataagctgtgtattaaaactgagttagacattatatgtgcggattatcgtaaattagcacattgggccagtcagatctagtgaagagaggaaatcagagaagggctagaacttcagcagaccgtaatcacaaattctactacagtgatgctggacttcttgaggtcccagttgaaacttctcagctatctgcttttaggttttttattgttgagacagcgaggaataggtagaactagtgaaatttttgtaaactcataataataacttttctcaagcagggttgatgtaatttcaagtctgtcctgaggctacaataagtctgttgtaatgaagggaaagcaacaattttactgtgcagaaagtattcatccatttaaatgatcgtagctcctgtattgtggaactcacttggatgcagctgtaaagatatgttttcctgacacccagaacgtatgtgatgcgagaggaagacatcgagtgctaatttcttgatgtcaccatctccttgggaggaaactagtataggatttaaaaagaacccttttatgaactcatttggtgaattagctcccctaaaaatgccaatgagaactagggggtcatgggaagagtcgactaatctttcagggatatggagtttctgcctagaagtgggcaaagactccatgagatgaagatcttagttactgaatggtcattttttaaattcaaaatcaatacctgttgagataacagggaaactacatggtctgtcttgctgggcttatttcagcctttgagactggaataataatgaggcagtgtactctttcaacattgcagaaatctatttttacctctaaggtggactggacctagataacccctcccccctttagtgaaaatgtaagtaatgaattctgtgattgttgctaagctgacaagtcaggatcattcacattttaaaacttcatctttgtaaaactcagaaatggtgcttgttaacttgatgcacatatctctctactttagaagaaagagcatccataattagactcctacttttttttcatgccctagatagttaaagcctatcatctttttaagaatacaggccgtctgctttctatacagtaactggcttttattaatgatgtgtgaattaggttttcttttagttggttttcattttaagtgttctaaaatgccctctccagccacttgagtatagtggtggacagctggggctctggacctacgtgggttgtattctggctcttcgagcttcttaactgggtgaccactggggcaaggtcctaaatagcctttctgagcctccagtttcccatctgtaaaagaggtatactccactcttctgggagtgattgtgtgtcttaaataagaaagtatttgtttttaaaaaaaaaaaaaaaaaagggcggccgctcc

SEQ ID NO: 1099 - DNA, 1108 bp, Homo sapiens
tgtctgtggtggagctggaggagacgcccttcaggaggttcctgggggagcgcgtgggtcgtgccctcatgaagatgtttgagaacaaccgggtgaagttctacatgcagacggaggtgtctgagctgcggggccaggagggaaagctgaaggaggttgtgctgaagagcagcaaggtcgtgcgggctgacgtctgcktggtgggcattggtgcagtgcccgccacaggcttcctgaggcaaagcggcatcggtttggattcccgaggcttcatccctgtcaacaagatgatgcagaccaatgtcccaggcgtgtttgcagctggcgatgctgtcaccttcccccttgcctggaggaacaaccgcaaagtgaacattccacattggcagatggctcatgctcargggcgcktggcagcccagaacatgttggcgcaggaggcggagatgagcactgtgccctacctctggaccgccatgtttggcaagagcctgcgctacgcgggctacggagaaggcttcgacgacgtcatcatccagggggatctggaggagctgaagtttgtggctttttacactaaaggcgacgaggtgatcgccgtggccagcatgaactwcgatcccattgtgtccaaggtcctgaggtgctggcctcaggccgttgccatccsgaarcgggagktggagactggcgacatgtcctggcttacggggaaargatcctgagctcacatgcagtagacttgggcaggcaaagggggcaccaagggcacaggccaagccttgggggcaggtgccaatytccagtcccaggatcccccagggcagaacctgagccctcccagtgcttgccttcagccacctggctcccctcctgggaggcctctgctggatccagaagatgctcaaccctcaaggcctctgctgccactgacagctggcactggaggcaggacaagccctgcctcttctccctctattgggactggtcccctgaagaaccctgcaacatgttagacattaccgtaaaattaaaacgcacaaatttgcagaaaaaaaaaaaaaaaaaaaaaaaaaaaaaaaaaaaaaaaaaaaaaaagggcggccgc

SEQ ID NO: 1100 - DNA, 1579 bp, Homo sapiens
  misc_feature (1388)..(1388): n equals a,t,g, or c
ggccgggcggtcgcagggactccggggcgaccgccgcgagtccgcagtagttcgggccatggaggcggagccgccgctctacccgatggcgggggctgcggggccgcagggcgacgaggacctgctcggggtcccggacgggcccgaggccccgctggacgagctggtgggcgcgtaccccaactacaacgaggaggaggaggagcgccgctactaccgccgcaagcgcctgggcgtgctcaagaacgtgctggctgccagcgccgggggcatgctcacctacggcgtctacctgggcctcctgcagatgcagctgatcctgcactacgacgagacctaccgcgaggtgaagtatggcaacatggggctgcccgacatcgacagcaaaatgctgatgggcatcaacgtgactcccatcgccgccctgctctacacacctgtgctcatcaggttttttggaacgaatggatgatgttcctcgctgtgggcatctacgccctctttgtctccaccaactactgggagcgctactacacgcttgtgccctcggctgtggccctgggcatggccatcgtgcctctttgggcttccatgggcaactacatcaccaggatggcgcagaagtaccatgagtactcccactacaaggagcaggatgggcaggggatgaagcagcggcctccgcggggctcccacgcgccctatctcctggtcttccaagccatcttctacagcttcttccatctgagcttcgcctgcgcccagctgcccatgatttatttcctgaaccactacctgtatgacctgaaccacacgctgtacaatgtgcagagctgcggcaccaacagccacgggatcctcagcggcttcaacaagacggttctgcggacgctcccgcggagcggaaacctcattgtggtggagagcgtgctcatggcagtggccttcctggccatgctgctggtgctgggtttgtgcggaccgcttaccggcccacggaggagatcgatctgcgcagcgtgggctggggcaacatcttccagctgcccttcaagcacgtgcgtgactaccgcctgcgccacctcgtgcctttctttatctacagcggcttcgaggtgctctttgcctgcactggtatcgccttgggctatggcgtgtgctcggtggggctggagcggctggcttacctcctcgtggcttacagcctgggcgcctcagccgcctcactcctgggcctgctgggcctgtggctgccacgcccggtgcccctggtggccggagcaggggtgcacctgctgctcaccttcatcctctttttctgggcccctgtgcctcgggtcctgcaacacagctggatcctctatgtggcagctgccctttggggtgtnggcagtgccctgaacaagactggactcagcacactcctgggaatcttgtacgaagacaaggagagacaggacttcatcttcaccatctaccactggtggcaggctgtggccatcttcaccgtgtacctgggctcgagcctgcacatgaaggctaagctggcggtgctgctggtgacgctggtggcggmcgc

SEQ ID NO: 1101 - DNA, 1561 bp, Homo sapiens
ggccgggcggtcgcagggactccggggcgaccgccgcgagtccgcagtagttcgggccatggaggcggagccgccgctctacccgatggcgggggctgcggggccgcagggcgacgaggacctgctcggggtcccggacgggcccgaggccccgctggacgagctggtgggcgcgtaccccaactacaacgaggaggaggaggagcgccgctactaccgccgcaagcgcctgggcgtgctcaagaacgtgctggctgccagcgccgggggcatgctcacctacggcgtctacctgggcctcctgcagatgcagctgatcctgcactacgacgagacctaccgcgaggtgaagtatggcaacatggggctgcccgacatcgacagcaaaatgctgatgggcatcaacgtgactcccatcgccgccctgctctacacacctgtgctcatcaggttttttggaacgaatggatgatgttcctcgctgtgggcatctacgccctctttgtctccaccaactactgggagcgctactacacgcttgtgccctcggctgtggccctgggcatggccatcgtgcctctttgggcttccatgggcaactacatcaccaggatggcgcagaagtaccatgagtactcccactacaaggagcaggatgggcaggggatgaagcagcggcctccgcggggctcccacgcgccctatctcctggtcttccaagccatcttctacagcttcttccatctgagcttcgcctgcgcccagctgcccatgatttatttcctgaaccactacctgtatgacctgaaccacacgctgtacaatgtgcagagctgcggcaccaacagccacgggatcctcagcggcttcaacaagacggttctgcggacgctcccgcggagcggaaacctcattgtggtggagagcgtgctcatggcagtggccttcctggccatgctgctggtgctgggtttgtgcggaccgcttaccggcccacggaggagatcgatctgcgcagcgtgggctggggcaacatcttccagctgcccttcaagcacgtgcgtgactaccgcctgcgccacctcgtgcctttctttatctacagcggcttcgaggtgctctttgcctgcactggtatcgccttgggctatggcgtgtgctcggtggggctggagcggctggcttacctcctcgtggcttacagcctgggcgcctcagccgcctcactcctgggcctgctgggcctgtggctgccacgcccggtgcccctggtggccggagcaggggtgcacctgctgctcaccttcatcctctttttctgggcccctgtgcctcgggtcctgcaacacagctggatcctctatgtggcagctgccctttggggtgtgggcagtgccctgaacaagactggactcagcacactcctgggaatcttgtacgaagacaaggagagacaggacttcatcttcaccatctaccactggtggcaggctgtggccatcttcaccgtgtacctgggctcgagcctgcacatgaaggctaagctggcggtgctkctggt

SEQ ID NO: 1102 - DNA, 1581 bp, Homo sapiens
  misc_feature (466)..(466): n equals a,t,g, or c
ggccgggcggtcgcagggactccggggcgaccgccgcgagtccgcagtagttcgggccatggaggcggagccgccgctctacccgatggcgggggctgcggggccgcagggcgacgaggacctgctcggggtcccggacgggcccgaggccccgctggacgagctggtgggcgcgtaccccaactacaacgaggaggaggaggagcgccgctactaccgccgcaagcgcctgggcgtgctcaagaacgtgctggctgccagcgccgggggcatgctcacctacggcgtctacctgggcctcctgcagatgcagctgatcctgcactacgacgagacctaccgcgaggtgaagtatggcaacatggggctgcccgacatcgacagcaaaatgctgatgggcatcaacgtgactcccatcgccgccctgctctacacacctgtgctcatcaggttttttggaacgaantggatgatgttcctcgctgtgggcatctacgccctctttgtctccaccaactactgggagcgctactacacgcttgtgccctcggctgtggccctgggcatggccatcgtgcctctttgggcttccatgggcaactacatcaccaggatggcgcagaagtaccatgagtactcccactacaaggagcaggatgggcaggggatgaagcagcggcctccgcggggctcccacgcgccctatctcctggtcttccaagccatcttctacagcttcttccatctgagcttcgcctgcgcccagctgcccatgatttatttcctgaaccactacctgtatgacctgaaccacacgctgtacaatgtgcagagctgcggcaccaacagccacgggatcctcagcggcttcaacaagacggttctgcggacgctcccgcggagcggaaacctcattgtggtggagagcgtgctcatggcagtggccttcctggccatgctgctggtgctgggtttgtgcggagccgcttaccggcccacggaggagatcgatctgcgcagcgtgggctggggcaacatcttccagctgcccttcaagcacgtgcgtgactaccgcctgcgccacctcgtgcctttctttatctacagcggcttcgaggtgctctttgcctgcactggtatcgccttgggctatggcgtgtgctcggtggggctggagcggctggcttacctcctcgtggcttacagcctgggcgcctcagccgcctcactcctgggcctgctgggcctgtggctgccacgcccggtgcccctggtggccggagcaggggtgcacctgctgctcaccttcatcctctttttctgggcccctgtgcctcgggtcctgcaacacagctggatcctctatgtggcagctgccctttggggtgtgggcagtgccctgaacaagactggactcagcacactcctgggaatcttgtacgaagacaaggagagacaggacttcatcttcaccatctaccactggtggcaggctgtggccatcttcaccgtgtacctgggctcgagcctgcacatgaaggctaagctggcggtgctgctggtgacgctggtggcggmcgc

SEQ ID NO: 1103 - DNA, 1960 bp, Homo sapiens
  misc_feature (256)..(256): n equals a,t,g, or c
gggtcgacccacgcgtccgaaaaaaactttttggggagatatgctttcatttctcttgggtaaatacctatcagtgaacttgctgggtggtatgtatggtaagtgtatgtttttattttataagagactatttttggtggcttttaacatatactttttttgctttaatgctacagttcctagtaatgttgactaagtgtggattttcttttttaaaatcctgtttgggatttattgtatttggattctgtgagtngttttctcataagatttggaaaaactctgcgttctcttcttcagttactgcgttttgtttttgccctccctcttttgcaattctaattgaacgtagacctttttactccctttcatgtcttttaacctcttttttctgttttccttttctttgcctctctgtgctgccttcagattatttcattagaactatctgtcagtttcctaattctctttttggctttgtctcatctgtcattagaaatatctactaggggccaggtgcggtggctcaagcctgtaatcccagcactttgggaggccaagaggggggatcacaaagtcaggagatcgagaccatggccaatatgatgaaaccccgtctctactaaaaatacaaaaagtagctgggtgtggtggtgcgtgcctgtaatcctagctactcgggaagctaaggcagagagaattgcttgaaccagggagttggagcttgcagtgagctgagattgcgccactgcactccagcctggagacagagcgagactccctctcaaaaaaaaaaaaaaaaataaagaaaccttacaaaatgcatttaatcagtctttcttgttttctatattttatttctttgaacatattaaatatggtcatttcttagtctgagattctggtaggtctttttcaatatctaatgtttcttttggttctttttccttctaccttgttgaattgtatgtttaggtttcttttcttctttataagtttgtatgtggaaattatgtggaaactccaggagctgttgcttttgagagtcaccattatagattgaatcctcaagggcttttggaccaccaaaatgacatgaattcaggctgcgaatccatgtgatttgatggctggtttttaataccagtttgtgagtggtgctacttttcaccatcttagagctaaggtttaaaatttaagacagttggcttttctttttacgtgttttttttttttcttttgtggtgggagtgtttctaggacctatatactgaagatgtagtactggagtttcatctttttgagagggaaatcaccttaatgccagttcaaggtttttctcctgtccttcatcgcctttgagatgggaaaatctgtacccaaggtcacctggtttagcaaatgttttcaaagtgaaaggtagcttcagtctttagcttatcacatagggatcccttcttcatttgatactttgccttaaccttgctttcttaacccttaatgaccaacttaaaatatttaaatatatgtaacaattgtaaatatttaatatatgtaaaagttgtaaatagttctgtggggtggatacttagcctaccatgtttcctacaaaatgtgttttttaatgcaaacttactacccctttaacccttttaaggtagatctacctatttcctccttattgcttccactgtcttcttggcttagctgtagtacaggggatcctgtgaatcatctttgaatccttgctttgtatacagtggacattcaaggaataaatcacaatggaagattcttaatttggactccataatgtatataaggaaattaacccagattaaaagatcaattgcaaatccagaaaaatattttcaaaaaatgggttaactggtggattcatgtatgtatgtgtatacaaattttttaacatgaaaatttataccgtaaaaaaaaaaaaaaa

SEQ ID NO: 1104 - DNA, 1077 bp, Homo sapiens
cagctgtgggcccgggccgtcgtgggctccggcttgcgtgcggagatgagcgggtccctcggccgagctgcggcgrctctgctccgctgggggcgcggcgcggrcggcggtggcctttggggtccgggcgtgcgggcggcgggctcgggcgcgggcggcggcggctcggcggacagttggacgcgctggtgaagaaggacaaggtggtggtcttcctcaaggggacgccggagcagccccagtgcggcttcagcaacgccgtggtgcagatcctgcggctgcacggcgtccgcgattacgcggcytacaacgtgctggacgacccggagctccgacaaggcattaaagactattccaactggcccaccatcccgcaagtgtacctcaatggcgagtttgtagggggctgtgacattcttctgcagatgcaccagaatggggacttggtggaagaactgaaaaagctggggatccactccgcccttttagatgaaaagaaagaccaagactccaagtgagggcggccaagtcctcgctgagcagagagggagccgttcatgtcagagactcactgccagaaaagccttacccattttggttttcactattgagaccgcaactgcttgcactgatcattttggttcgtgagcagttggtgattttagttggtctggtgttcgggctaagaatattttattgtggacttaattacaaccactgcactgtaatgattcaatgctgtattatgatattgctgtaaacaaaattcattcttatattgtcacttattctttgcctgattcagaagttaaataggagctttggaatcattattcatgacccctctgcaaatgtgtcagtctccaaagagagtatctccccccaaattttgtgtagcttcttttgttatggaaaatggtggacaaaaaaagaaactgtgataactggggcgttgttttttaaaataaactccagcacagggatgctgtgcatgcctgagttgattccgaagtgaaaaaaaaaaaraaaaaaaaaaaaaaaaaaaaaaaaaaaaaaaaaaaaaaaaaaaaaaaaaaa

SEQ ID NO: 1105 - DNA, 2054 bp, Homo sapiens
gtacgcctgcaggtaccggtccggaattcccgggtcgacccacgcgtccgcccacgcgtccgcccacgcgtccggctccgaacaggaagaggacgaaaaaaataaccgtccgcgacgccgagacaaaccggacccgcaaccaccatgaacagcaaaggtcaatatccaacacagccaacctaccctgtgcagcctcctgggaatccagtataccctcagaccttgcatcttcctcaggctccaccctataccgatgctccacctgcctactcagagctctatcgtccgagctttgtgcacccaggggctgccacagtccccaccatgtcagccgcatttcctggagcctctctgtatcttcccatggcccagtctgtggctgttgggcctttaggttccacaatccccatggcttattatccagtcggtcccatctatccacctggctccacagtgctggtggaaggagggtatgatgcaggtgccagatttggagctggggctactgctggcaacattcctcctccacctcctggatgccctcccaatgctgctcagcttgcagtcatgcagggagccaacgtcctcgtaactcagcggaaggggaacttcttcatgggtggttcagatggtggctacaccatctggtgaggaaccaaggccacctttgtgccgggaaagacatcacataccttcagcacttctcacaatgtaactgctttagtcatattaacctgaagttgcagtttagacacatgttgttggggtgtctttctggtgcccaaactttcaggcacttttcaaatttaataaggaaccatgtaatggtagcagtacctccctaaagcattttgaggtaggggaggtatccattcataaaatgaatgtgggtgaagccgccctaaggattttcctttaatttctctggagtaatactgtaccatactggtctttgcttttagtaataaaacatcaaattaggtttggagggaactttgatcttcctaagaattaaagttgccaaattattctgattggtctttaatctcctttaagtctttgatatatattacttgttataaatggaacgcattagttgtctgccttttcctttccatcccttgccccacccatcccatctccaaccctagtcttccatttcctcccgccagtctccattgaatcaatggtgcaggacagaaagccagtcagactaatttccttctttcctcgcacttctccccactcgtcatcttttaactagtgtttcacaaggatcctctgaaaccctctctgtgccccaagtacagatcccattacttctgctttcgtatctcctcaggcaaaagtggagggtgccttatgggccctcctcataggttgtctctgcatacacgaacctaacccaaatttgctttggtgccagaaaaactgagctatgtttgaacaaagatgtcgtgcaaactgtactgtgaacaacagttggtttaaaatatgaggggcaaggaggaggatgcatttcaaaagcttgattgatgtgttcagagctaaattaagaggagttttcagatcaaaaactggttaccattttttgtcagagtgtctgatgcggccactcattcggctccccagaattcctagactgggttaatagggtcatattgtgaatgtctcactacaaaatgacttgagtccagtgaaatctcattagggtttaagaatatttcagggatccttaatgttttgatttttgttttctgaaattggattttattttattttatcttataatttcagttcatctaaattgtgtgttctgtacatgtgatgtttgactgtaccattgactgttatggaagttcagcgttgtatgtctctctctacactgtggtgcacttaacttgtggaatttttatactaaaaatgtagaataaagactattttgaagatttgaataaagtgatgaagttgcattacaaaaaaaaaaaaaaaaaaaaaaaaaaaaaaaaaaaaaaaaaaaaaaaaaaaaaaaaaaaaaaaaaaaaaaaaaaaaa

SEQ ID NO: 1106 - DNA, 788 bp, Homo sapiens
ttttttttttttttttttttttttttttttgcttcctacttttcaggtttaaatttatcttttttcttctaaaagtatgtttttatcttctaatttccctatcttctctattcttttcttcgccttcccgtacttctgtcttccagttttccacttcaaacttctatcttctccaaattgtttcatcctaccactcccaattaatctttccattttcgtctgcgtttagtaaatgcgttaactaggctttaaatgacgcaattctccctgcgtcatggatttcaaggtcttttaatcaccttcggtttaatctctttttaaaagatcgccttcaaattattttaatcacctacaacttttaaactaaactttaagcagttaaagtcaccttcattttatctaaagcatgcccttctattggtattaattcgggctctgtagtctttctctcaattttcttttaaatacattttttactccatgaagaagcttcatctcaacctccgtcatgttttagaaaccttttatcttttccttcctcatgctactcttctaagtcttcatattttctcttaaaatcttaagctattaaaattacgttaaaaacttaacgctaagcaatatcttagtaacctattgactatattttttaagtagttgtattaatctctatctttcaaagagaaaaaaacttatctgcggtttcctcaagtccgcctgccccctcagcagaagcccctgcgctggctgcctcaatgcctccccttctgtcgtttctcgcagccgta

SEQ ID NO: 1107 - DNA, 782 bp, Homo sapiens
tttttttttttttttttttttttttttttttctggtttaaatttatcttttttcttctaaaagtatgtttttaccttctaatttccctatcttctctattcttttcttcgccttcccgtacttctgtcttccagttttccacttcaaacttctatcttctccaaattgtttcatcctaccactcccaattaatctttccattttcgtctgcgtttagtaaatgcgttaactaggctttaaatgacgcaattctccctgcgtcatggatttcaaggtcttttaatcacttcggtttaatctctttttaaaagatcgccttcaaattattttaatcacctacaacttttaaactaaactttaagctgtttaagtcaccttcattttaatctaaaagcattgcccttctattggtattaattcggggctctgtagtcctttctctcaattttcttttaaatacattttttactccatgaagaagcttcatctcaacctccgtcatgttttagaaaccttttatcttttccttcctcatgctactcttctaagtcttcatattttctcttaaaatcttaagctattaaaattacgttaaaaacttaacgctaagcaatatcttagtaacctattgactatattttttaagtagttgtattaatctctatctttcaaagagaaaaaaacttatctgcggtttcctcaagtccgcctgccccctcagcagaagcccctgcgctggctgcctcaatgcctccccttctgtcgtcttctcgcagccgtag

SEQ ID NO: 1108 - DNA, 1387 bp, Homo sapiens
ggcacgaggaatggccaagatacatgtgatgtcaataaatctttatttcctatcccctgctctgctctctatggcaatgggcctgacccctgaaggctgtaagtcctagactctcacatcacctggcttctgcttttgagcaacgagaagtgcttatgagaggtggcatgtggggctgcaggaggaagggagcacacaggatagctttctgctttgtgtgacttctccagcagaggctgcatctcccctgtggctcggcttccggtggatgggcatgccgccctgccggctactgtcgggtgacctggctctgggctctggcaacaccactactttcttttttctctctctgctgttgttaatctctgggttgcctccctatctcctgttccgcttccaactcttccatcacctatgtaactaattccctgcattgattcctgtctccgcctccccacattttaaaaaatagactgttttctttgttattccctgactgttaatgagtagacagatgggagaaaaatcaagcacatttaaatacttttcaaataataaaagcagtgaacatttgttgctagattaccttggaaataagtcagctcatttaatgtaaacatttggaggcatttataattagaccttttctgtttgaacaattcacaatagttttaaaaattgaaaggcaagaaaaatgtagtagatgtatgatgtgggaataaaaggccttccagcattcctcttgacgctgtttgacagaattcctgccagctcagctccttcctcctcttgctaaccatggagaacaggagcaggaacatgggttcacataggcaaagggttctggaactgctagagttcttttgttcctataccccaaggcctgcatgagtgaaacaggttcatctgcgccaggaaaatgatatgttgtagtaaccagttccctcttcttatttcttgattccatcaagccctcagtatgttggagtctgaggttttggtaaaaatgcagaaaacatactttctaatattatctgtaatttttcagaggacattcccaaaaccaaaggacaactgaggagactgcccagcacataatgaataaataagaaaatgagtgaggagttattaacatcatttggaaaaaagatttcccattcacttgatattgtttgttcactcatttagtcattaaaagtgagattaataaaatctgaaaatgttatataataactttaaaaagccaggtaattaataatctgcactgatattacatccacagtaccacagtatttatgtgtatgaattaaggattaaaagataatgtggataaataaactattgatctatgtctgtgtagaaaaaaaaaaaaaaaaaaaaaaaaaaa

SEQ ID NO: 1109 - DNA, 545 bp, Homo sapiens
ggcacgagccgggagatgccagccttggatttggcatgagggtgagtgtctctcaaggggcggactgggtggctgggagaccaggacctgggaatggcctggccacagcctggggtcctgcagctcctcccagaggccacttataagcagccctgccatgtggccacacagcactggtcatgccatacccatgcacagtcatacatgtccacacacacatgcacacgtgtgcccaaacatgcatgcacatatatggccgtacttatacatgtgtgcacacatacacatgcatctatgcacatacatgcccatacacacgcacacacatacacacgcacacacacatcaaccccagagtcattcgttctgtggagggacaagtggactcagggcagcgccaggctgaccacagcacagccaacacgcacctgcctcaggactgcgacgaaaccggtggggctggttctgtaattgtgtgtgatgtgaagccaattcagacaggcaaataaaagtgaccttttacactgaaaaaaaaaaaaaaaaaa

SEQ ID NO: 1110 - DNA, 924 bp, Homo sapiens
agggaaatattaaacagagattgtgtctctttttcttttggttccataagaaacgaaaagaactgagagattgtatctttaatacgaatacagtactagttcatgatgttttaragatttggttgattcttgcttaattaaaaaatatttacagttgcagttttatttaacagctctgcattctcttctgggtgtgcaagtgctgatacaaacagatcaattagaatggccccaataatgaggcttttggaagccatctttatgacagctattgttcccagtgttttgcaactatgaacttatataaccctcatcacaaccctatgaggtagatactctaaatattttacccacttcagatggagaaactgaagcagaaagaggttaataggtactacatggcagaactgagggattcacatccccgcaaatgactccagtgcccacttaactaccaagctatactggctttctcattagtttgataggttttttaaatggttactttatatacaagcttcattaaatagaaatttcattaaatagaaacctgtaattccagtgtacctagaatgtaccctgcagggtttatcaaggaagttggttaaaaaaataatcatttaggccgggtgcagtggcttacacctgtaatcccagcactttgggaggctgaggtgggcggatcacaaagtcaggagatcgagaccatcctggctaacatggtgaaaccctgtctctactaaaaatacaaaaattagctgggcgttgtggtgggcgcctgcagtcccagctactcaggaggctgaggcaggagaatggcatgagcccaggaggcaaagcttgcagtgagccaagatcacgccactgcactccagcctgggcaacagagcgagactccttctaaaaaaaaaaaaaaaaactcga

SEQ ID NO: 1111 - DNA, 1433 bp, Homo sapiens
ggcacgaggttcaatgactttactaatggttaccaaatgtataccaagcaggacaggtgataactaaatattaaagtcaaaagggaatttattgcccagggccctagaattcattcttcctcaagacttaaaatcaaatgaactgcttgtttcctccaggcaagagtattaagaaataaccaggctagtattttgataaaccacaatcacttaccttgtaaacttgtgttttttctctcagacaagttttggtattgtcggctttcgccaaatcacaaagtcctgcattacggagacttagaagagagtcctcagggagaagtgccccacgattccttgcaggacaaacgtaagtagctctccttggcagaggcctgagtggtggtcggttggttgtttcctagtcacaatatatcacgcaacagaactatcagcctaagtaagccctttgaacacatctcatctagttgtaagtcgtcgcctgagccatctcatcaagtacaagacctggatggacttggggtttggaactgaataggggagaatgtaaaatggatgcaaaggtatcttaattgaaagacgtaaactgggggttcaaatgtccactttttacattatttatccaggtgctgtgtcaaggagcaaaaacaatacaaacctgattctgtcagctgtctttttctgaaaacccaaaataatttcttattttcgtaacttatatgcctgacccctacaacatttattccttacaatttagtgtatcccatagttatgacacagagttaatggcagagccaaatatagctagtttacctcaaagacactttgaaaatgatgatccgttacctctactgtttgctaaatatttctcttgtatattttttggctttttctatatgttgtctgttttaacatacatgcttttgaagagacagtaatgtgcaggattcttttagccccacagggaaccaggtgccaggttgacagtgttaacaatacaaattaaacaaatttgcccacagaaccctctaaatccccttgtaaatttaactgttagtccaaagaggaacagctctttggacactaggaaaaaaccttgtagagagagtaaaaaatttaacacccatagtaggcctaaaagcagccaccaattaagaaagcgttcaagctcaacacccactacctaaaaaatcccaaacatataactgaactcctcacacccaattggaccaatctatcaccctatagaagaactaatgttagtataagtaacatgaaaacattctcctccgcataagcctgcgtcagattaaaacactgaactgacaattaacagcccaatatctacaatcaaccaacaagtcattattaccctcactgtcaacccaacacaggcatgctcataaggaaaggttaaaaaaaaaaaaaaaaaa

SEQ ID NO: 1112 - DNA, 477 bp, Homo sapiens
ggcacgaggttttacttaataccttcattgtcctttaagtattcggaatgagaattacagtgcttcattcagcataagacttttgttcatgctgtttctttggcctgaaatatctatcccttcccaattgcctaattaattcctatttgtctttcagatcttagctagttcatcacttcctcagggaaacattccctaatttctgtcacagagtaagacccgttgttatacgtctcacctgaccatgtacctctacttagcatttaacacgtgtaattttgtatgtattggtttgattaatgtcagaaccactagattgtaaactccatgaggaccggaattttgtttctgtcattgtcattgttcaactttgtattttttatgcctcatacagtgcctggcacatagtaggtgctcaattaactttattgaaagaataaaatgaatggatgaggtataaaaaaaaaaaaaaaaaaa

SEQ ID NO: 1113 - DNA, 1857 bp, Homo sapiens
  misc_feature (1808)..(1808): n equals a,t,g, or c
  misc_feature (1822)..(1822): n equals a,t,g, or c
  misc_feature (1855)..(1855): n equals a,t,g, or c
aatgttcaaaataagttatataatgggtaataatttttagatttcttagataagttacacatycccaggatgaggtgaactttcaaatatcaattttaaggctattgattatattgggaaaaatgaacaatgacttggatgttaatgtgtgtgttttccttttttaagggtatgcctttttctgtgtatgggaatgcaatgattcctccagtagcacctatccctgatggtgctggaggacccatatttaatggccctcatgctgcagacccttcttggaactcactgataaagatggtttccagctccacggaaaataatggccctcaaacggtgtggactggaccctgggcacctcacatgaacagtgtgcatatgaaccagcttggctgatgaggatcagcttgttagcctgcagattccttttcatttggaggaaatcacaagtggccgaaaaaaaaaattatgctcccaaatcattctactgatgtgcttgactgaagtgtgtaggctttttgcagaagatcttactaactgacctattttctgtgaacatttgtgactgcccattccccatcatcatccgttttaccttagttagcatttttcttatcatttttctttttttctttccctcttcccctttggacataactttctgttgaagctgttctttggctggttggttttagtactgtaaactgcttctgagcaaacacggaaatttagcaaaattatgtaaacttgatcctgaagttttagaatggcaaataaatgtacaattgtttacataacagaaaaggctaagcagaaagtaaatttcaatatgtcagtatagaggctctactttatgtagacttaaattaatgtgagatatgtaccttcatattcagaaatctggatgtttccttcatacattaaactattaataagcataacttttctactggtgtaatttaagtataaagtaaaataatgggcattatcattggatgtttccccacattggcttttaaaatacccatcttgctttctttttggtttatttgtagcaaggcacatatagaagaagaaatttctggcttttccatgttgttttattaccttttctcacttttaaaactaatacagacttatctcctcactcctttttctctccttacctttaccactaataccagtaaaattatctttctgatagtgaaaaggttctgtcaagattttcactgtaatggctgctacagagatggaccatcttcatcatcaccagtggtttcttctaattataaaatgtttaaactttctgagaatttaaaaagccaccactgttcccagtcagcatatacaagctcttaatattctgtttattaaataattcaatgtactattttatattggatgatattgattcttaacattggcttttcagtcatcaacagtcaacataaaaatttcaattttcagtaatttagtggaaaatatcttatttcttttttcaattttaaaggcttcctgcttttttacccttgtatattatcagtgaaaaggatcaacagttaatttgagccaagtaataaaagaaattctgcatttgtcacgaagacaatttatggtagacagataaatacacagattacagtgtaaagtctccatttaacctgtttataaaagatacaaggccacactaaactactcagtgggatttatatattccatccacttgaaacaataaacagtaatgtatccaagaagattatgtgtcctaccctgtctcatggaaaaattaattatatggttgaaatgtaaangaaagtgaagcatnaaaaatcgggtgatgtattatgatccatttgtntt

SEQ ID NO: 1114 - DNA, 1267 bp, Homo sapiens
ccacgcgtccgctgtttactgatatctcatgcaatagaagccctgattttggatccagaatcagcaagtttccaggaatatggatctactggaacagcccatgctgatagtgaatatgaaagaagaatgatgtctgtatataatcatgtcttggaggaggtagaatcactcaatcggaaatatacccctgtttcttatatgcacacagcatgcctctgtaatgccatcattgctttgctgaaagttcccctttctttccagagatatttttttccagaaactacagtctaccagcatcaagcttgctctgtcaccatcgccccggaatcctgcagagcccattgctgtccagaataaccagcagctggcgctaaaggtagagggagtggttcagcacggatctaaaccaggactcttccgcaaaattcagtctgtctgtctgaatgtttcttccacactgcagagtaaatctggacaagactacaagatacccattgacaacatgaccaatgagatggagcaaagggttgaacctcataatgattacttcagtactcaatttctgttgaactttgctatccttggaacacacaacattacagtggaatcttctgtgaaagatgccaatggtatagtatggaagactggtcccagaactaccatatttgtaaaatccctggaagacccttattcccagcaaattcgcttacaacagcagcaagcccagcagccattacagcagcagcagcaacgcaatgcctacacacggttttaaccatggaatgaatgcactgcagactctcaagagatcaatcaaattgccagaaacagtttggtttttcatatggaataagtattaaagttacagtgtagttcatttattcattgatttttgtaatgtaatattctggaaaaaattttgttttcttaaaaattttgtctgacagctgggcgtggttgctcacgcctgtaatcccagcactttgggaggctgaggtgggcggctcacgaggagatcaagaccatcctggctaacacagtgaaaccccgtctccactaaaaaatacaaaaaaattagccgagcatggtggcaggcgcctgtagtcccagctacttgggaggctgaggcaggagaatggtgtgaacctgggaggcggagcttgcagtgagccgagactgtgctccagcctgggcgacagagcgagactccgtctcaaaaaaataaataaatacattttgtctgaaaaaaaaaaaaaaaaaaaaaaaa

SEQ ID NO: 1115 - DNA, 915 bp, Homo sapiens
gaaagatcagagagaagtccagagccttgcctgcttgtgatcctggtggagaaggtggagtatggtgagctgcttgctaaggacagccaggcaacactgtgtttgtgaagatgtgctccaccttctcctctgtgcatcccagctcctcctgctgaaacagctgagcttgctttttggatttcttagactcctggcctctgagagacacctctaaggacaaactgaccttgcattgggaactttattatccagatcctcataggctttgtctactctggattgcttgttgcaacagttcttaggaagcaagattgtctcctgcaccagcatctgcctgtgtttgcttttacctactttgagcaagacccagtgaggccctagctctgttggtcctgaaaagcctgaaccctgaggctgtttctcctgcctccaaaatgcaattataggaaataagaagcacagaaacagtggaaacaaccaggaggagaaacaagaaaacctaaaattttcaatattcaaaaatacctgtcgtggtggttgatgcagaaaacactgagttcatcaaagagctttgtaattgttggaccagagaacccctttgctacaggaactgatatgttttgtctttctggcctagtcaagggaggataagtaagtatctggggcatggaaggaatgcactcttgggctgttttgcttgtatctgactcacccctgactctccagtgaagcagaaaggaagaaacctcacaccacccaggtgtggccagactttggccattattgtgaatccccaagagttaccacaggcccttcccaaatatatatttaatcttgtggttaaaaaaaaaaaaaaaaaaaaaaaaaaaaaaaaaaaaaaaaaaaaaaaaaaaaaaaaaaaaaaaaaaaaaaaaa

SEQ ID NO: 1116 - DNA, 1358 bp, Homo sapiens
gcccacgcgtccggagggggtgtccggtcctgcccatccgatactctggtggaaatgtggctctttgcagcatgtacgtttctccctgattttkgttgatgcatatttccccgtttaagtagccgttagggcgcagtatcggcagcttgacacccaccaagcaaaagtttcagcctggaaaaaaaatgggggggaagggtggatgaaaaggagggagagaaggtggaaatggtttttttttttttttttctattttctttctttttttttttttttttttttggtcaacagccgtttttctagttccaagttttaaatacatggaaggaagtccgggagaaccatatgaaggagcaggaggagaggaagaaactttttttccttcttttccaggagtagctggaaattaagatcgggttccttttctgccagcttggaagggcaaccccatgactgattgcgattctgaggatgtctatgcaaagttggattcttgttacagtgtatccaatctgaagtattgcacatctgaactgggactgttaacactgatgccaatacagtgtggggtgccagaaagtgtctgctgatatttgtggaaaaaaaatctattttgtttacctactgtatcaaaggggagtctgggggagaatggtagtattttttttttttatcagctgtgaaaaaaatgttacagatctgcacattttcgtgtgtactatggtgtgtgtgtgtatgtgtgtggtgtgtgtgtgttttaagtttagccttttgtttttgttttttggttggcagtaaccgattttaatgactagcttttaaaaatacagtacaaagactttgtaaatgtgattcagggcccccagcacccctgtgtctgcagagtgccttcaaaactcagctgttccagccggtgccaacctgtgaacttcccaccatatcccagaatctgctattccccaaaccacttcccagtttcctttcagtaatctttctgaaggagccaggacaatagggcctgttgtttagtgaatttctttattattttcagcctttaaaatgtaatttccatctcttgcaatgaatttgtttcccttttttttgcttcattttgtttaaattttcaggtatttagctcccctttcatattatttttaaattttttaattacctgttgtagggtgttcctccagaagcaaagagcaaaattttactgttgtgatgtaccaattctaactaattgtaatttttaatttcatgcgtttaatcattgtctcttcattttaagacttttaatacaaatgtcatttttaaagaaacaaaaaaaaaaaaaaaaaaaaaaaaaaaagggcggccgc

SEQ ID NO: 1117 - DNA, 1335 bp, Homo sapiens
ccacgcgtccgcgacccacgcgtccggtcaaggacaagtgccttctaaggcatggataagggctttcttcttatgaaaaagtctagactgtcttactgtgaagatggccagggaggatagcaagcaatggcattcttgaacagtctaaggcaggtttctcagtgtggtcctgagaacagaagcatctgcatcacctgggaatgtattagaaatgcaagttcccagccccatcccagacctactgaatcagaaactctgggggcgagggctgaaacctgctttcataagcccttcaggcgatactgatgtaaactaaagcttaaaaaccaccgttttactgtgacttcatgaagaatataattgcaatatcacctaaatttttatcctggctgggatggggcagattcttactatggacaatttctggaacttacagtatgaagagcagatgaggagtttgagacaaagaaaaaattgtacagggagtttagtgaattttccatcaggttggccattactttctttctctaaagtctcaggatgtctggaagcaaggaaagacaaaagacttgaagcaccgggtgcatgctgtgtgtcacaagtgaggtggagagttggctgtggaaagtacagcaattcctctggaattaaatgaccgaccaacacagtaccaagaggatgaagagaagatgttttgcgttgctacatgaatcatggatgactcatatttcacttgcatatgaaatataaggcagttaacatcttgtttgtggcttaagcaaggacattaatcctactagatgaaggggaagttggttctgttgtcttaagggatgcccccttgtgattttggtcaactgaatgaaaaagaaaagatagccttggacctttttttcatgggaggtttggaggtcaagcatgtagaaggaaaaggctgtagtcatgaatatagaactgtctgctctccaccttttcctcactctacatttagtcatcacactgaacaggatgtggcctgctgacagtgagtagctgaagtgcctgtttggtaagtaggttagcattcatcatgaactctgaaagccatttcagagtttggctgctgctctgaccctgctgtggtacaaaaaacatggattttttgtttttttaactggagtaataccaaattccctttagaagcttgaagtttgatactattgctttccccattataaggattatacagtattaattaattataaggcccaaagtttgttttggcaaataaagtattattctctatcatcaaaaaaaaaaaaaaaaaaaaaaaaaaaaaaaaaaaaaaaaaaaaaa

SEQ ID NO: 1118 - DNA, 932 bp, Homo sapiens
  misc_feature (20)..(20): n equals a,t,g, or c
  misc_feature (28)..(28): n equals a,t,g, or c
tcgacccacgcgtccgcggnacggtggncttggttgtcaatgaagacaacctggtacctgcaggatgctggcagtgccttgtccctgggggtgagttgtgacaaatgctgtgttctctattgttactttttctccttctgtttgtcattccgaagtcgccctggcagcatacaagtggctggtttgctacctgctccgagagacttatcaaaaattaaaccaagagaaaagatcaggaagcagtgactttgaagcaaggaacaaatgccaggtgtcccacggccgtccgttggcgctggccttcgtggagctcacggtggtccagaggttccacgagcacgtgcaccagccttccgtgccgccctcgctgcgggccgtgctggggcggctcagtgctctgtacgccctgtggtccctgagccgccacgcggccctgctctaccgaggaggatacttctccggtgagcaggcgggagaagtgttggagagcgccgtcctggctttgtgttcccagctgaaagacgatgcagttgccctggtagacgtgatcgctcctcctgactttgttctggactcaccgattggcagagccgacggcgagaacacaccggagattgctgctgctttctgagcccgcacctgtgcgcctaaactgctgattggcctcaactgcccaggcggacgggagggaggcacccggccggctggactaatctgggatcgcggtgatttgcagcgtggaaaagaaatgcagatgatcatgtctacctgatgcgctgtgggttttttgataattagaatttcgcacattcagttttcagggttcagctcctttctctaaagtaaacagcccattgtcagggatcttctggtcagaaaaaaaaaaaaaaaaaaaaaaaaaaaaaaaaaaaaaaaaaaaaaaaaaaaaaaaa

SEQ ID NO: 1119 - DNA, 697 bp, Homo sapiens
aaacttgctggctatatatccagcctgctcaccctggcaggctttgctacagctatggctgctgttgtcctctgcgtgaatagcttcatctggcaaactgaaccctttttatacatcgacactgtgtgtgatcgctcagaccctgtcttccctaccactgggtacagatggatgcggcgaagtcaagagaaccaatggcagaaggaggagtgtagagcttacatgcagatgctgaggaagttgttcacagcaatccgtgccctgttcctggctgtctgtgtcttgaaggtcattgtgtccttggtttccttgggagtaggtcttcgaaacttgtgtggccagagctcccagcccctgaatgaggaaggatcagagaagaggctactgggggagaattcagtgcccccttcgccctctagggagcagacctccactgccattgtcctgtgagctgccaaagaccccacggggtgcccgcatgtccctgtctagggcagcccagggcccccactcctggctcctcacacttgcctcccctatggccgctctccagaccctcctcctttcttctccccacatccgcacctgctgttcccactctggggttctcaagtccatgaacagatattgttgcattttccacaatgctgattaaacataataaacaatccagaaaagcaaaaaaaaaaaaaaaaaa

SEQ ID NO: 1120 - DNA, 611 bp, Homo sapiens
  misc_feature (22)..(22): n equals a,t,g, or c
  misc_feature (33)..(33): n equals a,t,g, or c
  misc_feature (48)..(48): n equals a,t,g, or c
  misc_feature (80)..(80): n equals a,t,g, or c
attaggcttttgcaaaaagctntttgggtgccncttttagaaggtacnccttgaaggtaccggttccggaattcccgggntcgacccaagcgtccggcgtgggaaagatctgacagtagagatctgagaggctgtctgtgtgaaggctgaatttcatgaactatctcattgttgggatggttccctttcagcctcgtgcgaacaagatgaattagataattgtataattccttggagctctgaaattctactgcacaaatagatgcctcgtgatcgctgttgagatgaggtcttccagagcctgtgatcccagatgtgattgatcatcttgccagagctttagccaccttctcacctgttagacaattcctgcccctgtgtctctactgtatcgcctttcacagctcatatgctgcacctatgcagtcttcttcagggtgtcctggggaagtgtcgctacgtttactatgggaaaaactcagagggcaacaggtttatccgagatgaccagctctgaagccaacttctgtataccttcacccatttcatgaaaataaaatcaaaagggaaatcaaaaataaagaaaacgctaaagaaaaaaaaaaaaaaaa

SEQ ID NO: 1121 - DNA, 676 bp, Homo sapiens
cccacgcgtccgattctggggccttgggcacaccaggggctgcaggctccaaggagtcctccagggtccccatgccctgagagaatttctagggaagtcatctcacttggccttctgaaggtcctccctaagagtctcctgacaaaagttacttattgaacacctctatgtgccaggctctgtgttgggtactttgatcaatgcccctgtttcagtctcatctgtactcacggcagccctgtggagtacggtgtactggcccagcttacagatgcagaaagcgagacgttctgccatcagataaagtcacgtggctctttagtaacacggacaaggctcctcgccaaggaactcgtggcagaagagggcagcagttggcagtagctgccgatgtctgtccccagctccaccattcctccctgtggctgtgccatgctcgtggtttcagtgtccgtgtgtccatgtgtctgcccttcaggagctcgcagctggtgtgcttggcggtcccaggcctgtgtagtgtctctcccctgctgcgggcgcccccaccccgattcctctccccagaagcggtgggatgggcccccatgaactgcagcagcatgctgaggtgtccatgttgtctgcctttgtataaagaaacagcctctgacctgcaaaaaaaaaaaaaaaaaaa

SEQ ID NO: 1122 - DNA, 572 bp, Homo sapiens
ccacgcgtccggaaatacatgcatagctgcagaaaccatgataggtagaggacttttcttttggttttgttttgttttgttttgttttgtttttggttttacagagaagagatttttattacaaagaaaaaaattccagtgaattgtgcagaaatgctggtttttacaccatcctaaagaaaaactttacaagggtgttttggagtagaaaaaaggttataaagttggaatcttaaattgtaaaattaaccattgagtgtcaaagttctaaaagcagaactcattttgtgcaatgaacataaggaaagactactgtataggttttttttttttttttctccttttaaatgaagaaaagctttgcttaagggttgcatacttttattggagtaaatctgaatgatcctactcctttggagtaaaactagtgcttaccagtttccaattgtatttagcttctggttggaatttgaaaaaaaaagaaaaaaagaaaaagaaaacctaaataaaataggtgaaagttccctgactattcaggtgatacacaaaaaaaaaaaaaaaaaaaaaaaaaa

SEQ ID NO: 1123 - DNA, 2235 bp, Homo sapiens
ccacgcgtccgcgctgaaaatggactcactgtcatcttccttcagttctcctaatgatccagatggacagaatgatatcttttgggatcagaattctccattgacaaagcagttaggtaaaggaagaaaaaaacagatttacaccacagatagtgatgagatttcacatattgttaatcgtattgctcctcaggatgaaaaaccaacaacaaattctatgctggacatgtggattggtgaaactgctattccttgtactcccagtgtagcaaaaggaaaatcaagagcaaaaatcagctgcacaaagttaaaaacacaaagtcaagaagaagaacttatgaaactggctaaacaatttgataaaaatatggaagagctagatgtgattcaagagcaaaacaagaggaattatgattttacccagatgatttcagaaacagagattttaagtaattataaagataatatacagatgtggtcattacataatatagttcccgaaatagataatgctacaaaaaagccaatcaaaggaaacaccaagatatctgtggcaaataatcaaaatagcagtcagaagccatttgaccaaattgctgaagcagcctttaatgctatttttgatggttctactcagaaatgtagcggacagttaagccaagaactgccagaggctttttggagcaccagtaatactacctttgtaaagacaaatgctttgaaagaggagaaaatcattactaatgaaactctggtcattgaaaaactgtcaaataaaaccccacgatcactttcttctcaagtagatacacccataatgacaaaatcatgtgtgacttcctgtactaaggagccagaaacttctaataagtacattgatgcatttactacaagtgattttgaggatgattgggaaaacttactaggtaatgaaccttttgctatgcaaaatatcgacatgcctgaactctttccttctaaaacagcccatgttactgatcaaaaggaaatttgtacctttaatagtaaaactgttaaaaatacgtcaagagcaaatacaagtccagatgccaggttaggagattcaaaagtattacaagatctttcttcaaagacatatgacagagaattaatagatgcagaatatagattttcacccaaattcaaataaaatcwcaacaaattatccactggaaaatraaratgaaaatttgaggaactgtwtccaaataaaactaagrtattcarggacraaaattyaaawatgtatakctamgatctmaawctgtcagataaataatmtgsatgwgtmttcwtactaacwctrmtggatkcywatrcaagtgaatagttccaaattggttctttcaggaagttcaagtttgaatgtaacttcagatcatatgaatacagaaattactacttataagaagaaattgagtactaatcagccatgccataagactgtaacagatgaagctcagagcaaccttaacacaacagttggattttcaaagtttacatttacaaggatgaaaaattctcagattctttctcagtttaatcaaaattgtataactggaagtatgtctgataccaaaattacacagggtgtggagaaaaagaaaggtgtcaacccattactggaggaagctgttggacagcaatctttggtgaaactttctgaatctttgaaacaatcttcaaaagaggaagaagagaaaaatagaaagtgttctcctgaagaaattcagagaaaaagacaagaagcactggttcggagaatggctaaagcacgagcctcatctgtaaatgcagctcccacttcatttctttaatgaaatattagttggaagacttcacaaagactgctgataactatctgtgattgataggaaattttttttcttgatttctctgtgagaaatgtaatgctgacttttataaagcctggacttctactttatttaataaatcaatgtttgcaatggtaaatgaaccatttccttggacatgtatttgaaagtcattaaatacaaaagttttggaaattcaggaaagttagcaattatgtacggatattatacagaggaaagtagttatatttttaaatgctattattgcagaggatcatcaaaaaagaggtaatctacgttatttcctattctaatgtcttttcctaataaaaaacttcaactttctaagttaaaaaaaaaaaaaaaaaaaaaaaaaagg

SEQ ID NO: 1124 - DNA, 1476 bp, Homo sapiens
  misc_feature (1417)..(1417): n equals a,t,g, or c
  misc_feature (1438)..(1438): n equals a,t,g, or c
gcccacgcgtccgcccacgcgtccggcagtggcacgatcatagctcactacagcctcgaactcctgggcttaagcgatcctcccacctcaccctgctgagtagctgggaccacaggcgcacgccacgacacttgacaattttatttttagtaaagacagggtcttggtatttctggtctcaaactctggcttcaagcaatcctcctgcctcggcctcccaaactgctgggattacaggcatgagccaccatgcgcggccttttttttttttctctccttgataaggtactggcgarttgcaactgtttgctttcctatagcacagctgaaatgaaacagtcttttcmatgtacagattagcatcattacctcaccaatcaaaaatccctaccttgarttggtctttatatttttctgggarctttggcccttgggatcctgcaacgccacaaagtatattaacaaggaattattattctaattttaatgaacggaatctaagaagttcagcgaggttcaagggtaaaagccaaggaaagtttcctttgtgtttccttaatatcttgagttcactgctttttaaactcctgccacagtgcacaggggctagtgcacttcgtctttctagataaactgtacgttcccgggagagcagagactgactttccttccgcacccccggggcttaggtgcccagtaaaaacagactgaaggcaacgtgggaccaggcccggaatccagagtttgtgtctcctagtctaagggcctcacgttgtcctccacctgccctattcaccagcatcacattggggcatttctaattcagccactgaggttattaatattttgtttgcaggagagaaagagtccacttaattatagccttcagtaaaagaaaaacttttacaccgggaagatggcaagctggtggtgttagacagatttaagactcaggaaaagggaagtgtggttttttccaggcatgcctgcttgggattggcccgtttacctttcctgcgtttgctctgggtgttgggatgkttcagcattacatggtgaaacccatacgagggttacatggtgctgtctgggagctctgkgcccatctycataaatgaaggcctttcatctccctactctgyccctgcatcccccaccccaaacagacacagctggccaatctctcgatcaatcctatcagaacttgagttttttctctccctgttcagtgatataacctcagctgggcatgcttatttaatagtttatttaataattgagtaagaaaaatggaaatattagggttcatcaacccatgaaatgggggctagcctgcarcatcaagtatttaaattacttgtaatttaagaatttcctttaaccaacctctggcaacccgtctcccctccccttcccncaaatatgtatattattatgngtcaattaaaaataataaaaacccaaaaatttcctccc

SEQ ID NO: 1125 - DNA, 596 bp, Homo sapiens
ccacgcgtccgcgatcacaaatgcagttctaatgtagcacttaatggcatcaatatttacacctaccgcgttttcacaaaattacactatccacctggtacctaagtcttgtcatggacttacaggtttgcatgggttccaaatactggtttatggtactgtttttggaactacttgtgggactatattttggtgtggtgtttgggtagtgaagttagtttgacatgaagttttgcattgaacagaaaaggaaacaggaagaagatgaagaaaacaaacctaaggagaattcggaactaccagaggatgaagatgaagaggagaatgatgaagatgtggagcaagaagttcccatagaacctcctagtgcaaccaccaccactacgattggaatctctgcaacatctgcaacattcacaaatgtgtttgggaaaaaaagggccaatgtggtgacaactcccagcaccaatcggaaaaataagaatgaaaacaaaaaaaaaaaaaaaaaaaaaaaaaaaaaaaaaaaaaaaaaaaaaaaaaaaaaaaaaaaaaaaaaaaaaaaaaaaaaaaaaaaaaaaaaaaaaaaaaaaaaaaaa

SEQ ID NO: 1126 - DNA, 1735 bp, Homo sapiens
acgatgggaagaggggaaagcccaggggtacaggaggcctctgggtgaaggcagaggctaacatggggttcggagcgaccttggccgttggcctgaccatctttgtgctgtctgtcgtcactatcatcatctgcttcacctgctcctgctgctgcctttacaagacgtgccgccgaccacgtccctccaagtgtgccgcccagctaccctggaccaagctaccagggctaccacaccatgccgcctcagccagggatgccagcagcaccctacccaatgcagtacccaccaccttacccagcccagcccatgggcccaccggcctaccacgagaccctggctggaggagcagccgcgccctaccccgccagccagcctccttacaacccggcctacatggatgccccgaagcggccctctgagcattccctggcctctctggctgccacttggttatgttgtgtgtgtgcgtgagtggtgtgcaggcgcggttccttacgccccatgtgtgctgtgtgtgtccaggcacggttccttacgccccatgtgtgctgtgtgtgtcctgcctgtatatgtggcttcctctgatgctgacaaggtggggaacaatccttgccagagtgggctgggaccagactttgttctcttcctcacctgaaattatgcttcctaaaatctcaagccaaactcaaagaatggggtggtggggggcaccctgtgaggtggcccctgagaggtgggggcctctccagggcacatctggagttcttctccagcttaccctagggtgaccaagtagggcctgtcacaccagggtggcgcagctttctgtgtgatgcagatgtgtcctggtttcggcagcgtagccagctgctgcttgaggccatggctcgtccccggagttgggggtacccgttgcagagccagggacatgatgcaggcgaagcttgggatctggccaagttggactttgatcctttgggcagatgtcccattgctccctggagcctgtcatgcctgttggggatcaggcagcctcctgatgccagaacacctcaggcagagccctactcagctgtacctgtctgcctggactgtcccctgtccccgcatctcccctgggaccagctggagggccacatgcacacacagcctagctgcccccagggagctctgctgcccttgctggccctgcccttcccacaggtgagcagggctcctgtccaccagcacactcagttctcttccctgcagtgttttcattttattttagccaaacattttgcctgttttctgtttcaaacatgatagttgatatgagactgaaacccctgggttgtggagggaaattggctcagagatggacaacctggcaactgtgagtccctgcttcccgacaccagcctcatggaatatgcaacaactcctgtaccccagtccacggtgttctggcagcagggacacctgggccaatgggccatctggaccaaaggtggggtgtggggccctggatggcagctctggcccagacatgaatacctcgtgttcctcctccctctattactgtttcaccagagctgtcttagctcaaatctgttgtgtttctgagtctagggtctgtacacttgtttataataaatgcaatcgtttggaaaaaaaaaaaaaaaaaaaaaaaaaaaaaaaaaaaaaaaaaaaaaaaaaaaaaaaaaaaaaaaaaaaaaaaaaaaaaaaaaaa

SEQ ID NO: 1127 - DNA, 1388 bp, Homo sapiens
gtcgacccacgcgtccgcatggctgaccccgacccccggtaccctcgctcctcgatcgaggacgacttcaactatggcagcagcgtggcctccgccaccgtgcacatccgaatggcctttctgagaaaagtctacagcattctttctctgcaggttctcttaactacagtgacttcaacagtttttttatactttgagtctgtacggacatttgtacatgagagtcctgccttaattttgctgtttgccctcggatctctgggtttgatttttgcgttgattttaaacagacataagtatccccttaacctgtacctactttttggatttacgctgttggaagctctgactgtggcagttgttgttactttctatgatgtatatattattctgcaagctttcatactgactactacagtattttttggtttgactgtgtatactctacaatctaagaaggatttcagcaaatttggagcagggctgtttgctcttttgtggatattgtgcctgtcaggattcttgaagttttttttttatagtgagataatggagttggtcttagccgctgcaggagcccttcttttctgtggattcatcatctatgacacacactcactgatgcataaactgtcacctgaagagtacgtattagctgccatcagcctctacttggatatcatcaatctattcctgcacctgttacggtttctggaagcagttaataaaaagtaattaaaagtatctcagctcaactgaagaacaacaaaaaaaatttaacgagaaaaaaggattaaagtaattggaagcagtatatagaaactgtttcattaagtaataaagtttgaaacaatgattaaatactgttacaatctttatttgtatcatatgtaattttgagagctttaaaatcttactattctttatgatacctcatttctaaatccttgatttaggatctcagttaagagctatcaaaattctattaaaaatgcttttctggctgggcacagtggctcacgcctgtaatcccaccactttgggagaccgaggcaggtggatcacgaggtcaagaggttgagaccatcctggccaacatggtgaaaccccgtctctactaaaaatacaaaaattagctggatgtggtggcacacacctgtagtcccagctagtcaagaggctgaggccagagaatcgcttgaacctgggaggtggaggttgcattgagccaagatcacgccactgcattccagcctggtgacagagcgagactcagtctcaaaaaaaaaaaaaaaaaaaaaaaaaaaaaaaaaaaaaaaaaaaaaaaaaaaaaaaaaaaaaaaaaaaaaaaaaaaaaaaaaaaaagggcggccgctctagaggatccc

SEQ ID NO: 1128 - DNA, 887 bp, Homo sapiens
aattcccgggtcgacccacgcgtccgcccacgcgtccgattttatttcctttgggaagaaggggctgaatttggcataattatacttgactatactgtaaaagaaaccagatctaatataaggacatcaatacttagttattaattcatttgcttatatttatatgtcatttgaaaatgtgtattaacatacacaattaaagggatataaaaatgaacatgccctctccatttctttaaaagaaatcaaggctgaatcaaacaggactactgttctgaaagaatactcagactatgaggtaccttattttccttcttttacacctgtctttcagttggcttcaaaaaatcatggcttttactgtgtttcttttttcctttatgtcttccttttgagggaaatgaaaaattgagaaaggaaattattattttataagtgggtgggtataaaagatggggtctgtaaaatctttctttcttagaaatttatttcctagttctgtagaaatggttgtattagatgttctctatcatttaataatatacttgtggactaaaagatataagtgctgtataaaatcagccaattatgttaaactagcatatctgcctttatgtgtttgtcattagcctgagtagaaaggcctttaaaatttttttagaaagcatttgaatgcattttgtttggtattgtatttattcaataaagtatttaattagtaaaaaaaaaaaaaaaaaaaaaaaaaaaaaaaaaaaaaaaaaaaaaaaaaaaaaaaaaaaaaaaaaaaaaaaaaaaaaaaaaaaaaaaaaaaaaaaaaaaaaaaaaaaaaaaaaaaaaaaaaaaaaaaaaaaaaaaaaaaaaaaaaaaaaaaaaaaaaaaaaaaaaaa

SEQ ID NO: 1129 - DNA, 804 bp, Homo sapiens
ggaactgccttgtgagaagtctgtattgtaccccatgtggcctattgccagccttacttatatgggtaagcccttagctctttgttcccctgcctttctgctttgccttgtgcatgcagtgagttcccaacagccttaacattctcaacatcttcatcatccagatgctatgttgcatgtggtggttgaggttgtacacagcaagactccagatggagccatccgcatggtaggtgagtggcatctcccaaggtatgcaaagccatcatgggagccctgcctgtcctgcagacgtgaactgggcatgcgatgcaggagggcctagggtaccgctgctcccggagctctggagcactgatcaggagtgtcgcatgtgtccggttgctttcgaatgcaggaggcgacaagtactagtggctcactcagagacccttggcactttcttcagggaagctatattcatattataaataaacttaaaaaaacattcatatgtatagttagaattgatttgtagggtttttgaacgatgtaacttgggcaaaactgaagttcttatttttgttgttgctaagagacaataaagataaaaataaaataaagattaaagataaaagatttggtatacaaggagtataaatatgaaatgagagggcattttaaaaatgaattaataattttgaaatatatgttaatacttgctgacttccaaagtatcatctgtgataatttatctcattgtattccatttcgttgtaccaaacatcctaattgtttggaaaaaaaaaaaaaaagggcggccgc

SEQ ID NO: 1130 - DNA, 3264 bp, Homo sapiens
  misc_feature (5)..(5): n equals a,t,g, or c
  misc_feature (36)..(36): n equals a,t,g, or c
gcccncgcgtttcgcccacgcgtccgcccacgcgtncgggacccgttagggcttcaatgatgctgagtytggaaaaggggaggagacccttgggaggactccaggcagctgtgctcccagggctcatgttctctactggattagggataggcacctctgaaatctccaccctgatgattggaatgaaacggagtgaacatgagcccagctgagagaggagcaggaatgtgtgaaaaacagctgctctccttgtcccagctttgtgattgagccctctgtcttgctctctctgccttccctgtgtctttcttctcttaccagagcatctgtttgcagaggtaacattaccttccccagccacaggtatgtggaatacggtgaggaaaaaaaaaattaaaaaaaaaatgcaagctgtcaggatgcttaagctcttttcagacatctgcagtttcatccctaccttgttcacataccatccaagaggcacataggctacccaagagagccttggattcagtggtacactccttgggcccaagggctttagcagctggatatggggttccttgattttcctctgggcccaaatatagccctcacactcttggaatttccaggtatgggggtagccccaaaaggaggaatctcctatggccaataaggtatcttgactttatcaaagtagaagagagggtcacttcggagtcaaatcatacactaggcctttgatgctttaattcttcttcagttcattaaaagtaactactaaggaaaggttaaaaacttcccctcaaaaaggaatcaaccccaggaagtaattatttacaacgattttcccaaattttgtacaatctgtcctggaaagcaaaccccttttaaaatctaatgtctgggctttgagtattagctcatttagggtggacaaatgcattactgttttcaaactgctcacatttattcagtatttctccaagttgctatctactcagccttatgaatgcccctcgcttttctaaggccatgtgaaaatcacggcactgcccttagccttgtgtcatctgctttttcgttctgcgatatgcccagttcccaaatcaattataggtacctgtttaggagagaggaagattttacctctcaaagggtgagatttgaaatttacactaaaaagacaactttacatttaatgcttcacttaatgagacattcttttttttataagtctatttttctactcagtttcagaacactaatctgattttcactctgatttttaacgtttctttaaatatttataatgtagcttctttcaaaatattttcatgaaaaattacttttattataccattatgtgcatgttattggtagcaggcatagtttattatttagtactgaaacatgctcttttacctaacagtaaacaagtatgttttgatatatatctgttaatatgcttatagtggtaagaaatggacttgaggtcccaggagatttcattttattcaccctggtcagatacaataaaggctatgagtataaatacataacttcctaaccaggtgtagggcatgttcatgaatatcaaatcttttgatgctggacccaagagaggaaaagttgtagctaaatgttgatttacttataactagacgtctatgtgagaaaatatatgtatacatatatatgatatgcagaagtcactttttttatcaggctttattctccttacaaagccacagtttaactgtctgcaacagttggtttatgttaatgatagacaaatacccagtgtttgttactttttccaactaccactgtaatgataatctttctcacgtatatacatgcaacttcttggcttcatttccatgaagctgtttcaatatattcagtatactttgtccttaatgctgcttctgttaacagtgatctctttctttttttcattcttatatcttcattagttcatcataaatctgtccagttgaggcctcaggaccacggcatgatttcatgactccgaagtattttacagaaacattttttaaataagggaaatattttatataccagatggttcacaagtgatggctcatagctagtttttttttttcttctaaaaaatgtcaggtttttaaaatcatttaccttattaaaatgaaaagtgccatacttaacttttaaaggaaagacctgacttgctttttctctatttagactgtttttgtactttactaatctttaaactatcaggaaaaaaaccaaaactttataccaatgatttagtaattttgaggcatagggtagcttacgtagtggaggatgtgccaaatattctcttcaaatgccaccttctcaatttataactaaaatagtgttatctgactaattcctctgaattttgatgtaagatctatataggcccccaaaatgatcgtagtacatgccagtcatttctcagtgaaataaatacaataccagagtacattatgggttttattgctttcttttatggtagacctgttaatggggaaaaaatacatcaaatcaaatagaatcttatatctgtatgttaaaatagagcacttacctgaagtcagtggcctggatcatagccctggatcatttcccagtctgtcctgtgctgtgtgaccttggacaaggcgcttcatctctctgggcctctatttctccatttgtaaaacaagtggctgcagtagatgatggctgagagcccttcctgttcccagatgccttggtccaaagaccccacccctctgctggtcctgccaacgtgttggtgctataagctgcttcagatataaaattggtttatctataatgtttgttcatttaatagcttctaaaaggcctttttgttatacagtgctttttttctagttttatggacttgrttactgtaataatgtcttgtttttagccatgtaactacaaacagatattctcttgatgtcttagtaaatttgcatttgatatatcattgatgagattttgttgttatgtaatattctttgcgtacgcatctgtccagcatcttattaaccataatactgtgatcattatttggaaatatgtcctatggaaagaataaaagcatgtacttcacagctagcatgttcacagatttgaaagaagtttcattaaaagcaccattgctttctgtactgcgtcagtgcctcattgtatcatcctacttgtgttttgctcaataaatgaataaaagaccaaaaaaaaaaaaaaaaa

SEQ ID NO: 1131 - DNA, 4417 bp, Homo sapiens
  misc_feature (4190)..(4190): n equals a,t,g, or c
gaattcggcacgagggagccggcgcccggaggagcaagaggaggaggaggaggagaggtcggagccgtctccaggagcccttagagaccgagtcccggcggcgacggcggggcagcgcaccggcaggcggattcattccacttaaaacctgaaaacattggaccacacaaagtcttactgatttcaggtaaaaacaataattgaagatgtccagcaaaacagcaagcaccaacaatatagcccaggcaaggagaactgtgcagcagttaagattagaagcctccattgaaagaataaaggtttcgaaggcatcagcggacctcatgtcctactgtgaggaacatgccaggagtgaccctttgctgataggaataccaacttcagaaaaccctttcaaggataaaaaaacttgcatcatcttatagtggaatagagaaacagctcctcgcctcttcccaacaacgcaaattatgagcagctccttgaagagatttaccttcagcttatttggtaaccactgctaataactaaaatgttctcagcttggaataatggactctgaagtctctattttccaagttgtcctttctcttaaaataccctttactgatttaatacagaataacaatcttattttccacttggtaactatggctttatgttgggttactgtttaaggaaagttgatctgggcctttttaaaaacataattatatactttagaaatacaaggsattccgatatgtcaggacctaaatggcctaagcacctgtcaaattaaaattccaaaattcattgaaatcctaaagccttgatattatattctttataaggcgtgtgccagcctgtatagtatataagagagaggggtgtttgtgtgtatatatatatgcctttgtgtatacacttatcaaagctattttcttatgaaaacgtccctctctccataccatcagtttctcagttccagaagttatacctttattttgagctgtgtataggtagaataaaaaattcctttcatatcgttattgtacaaaaagtaaagagtatcctaaagattgtattcattgtaatcaagtaatgcaatcatctctcctctcttgaaatcttgctggacctcttaggctacaataaactgtaccaaactaaactgacagtccttcgataatatgaaacattaatttacaaggacccgttagggcttcaatgatgctgagtctggaaaaggggaggagacccttgggaggactccaggcagctgtgctcccagggctcatgttctctactggattagggatagkcacctctgaaatctccaccctgatgattggaatgaaacggagtgaacatgagcccagctgagagaggagcaggaatgtgtgaaaaacagctgctctccttgtcccagctttgtgattgagccctctgtcttgctctctctgccttccctgtgtctttcttctcttaccagagcatctgtttgcagaggtaacattaccttccccagccacaggtatgtggaatacggtgaggaaaaaaaaaattaaaaaaaaaatgcaagctgtcaggatgcttaagctcttttcagacatctgcagtttcatccctaccttgttcacataccatccaagaggcacataggctacccaagagagccttggattcagtggtacactccttgggcccaagggctttagcagctggatatggggttccttgattttcctctgggcccaaatatagccctcacactcttggaatttccaggtatgggggtagccccaaaaggaggaatctcctatggccaataaggtatcttgactttatcaaagtagaagagagggtcacttcggagtcaaatcatacactaggcctttgatgctttaattcttcttcagttcattaaaagtaactactaaggaaaggttaaaaacttcccctcaaaaaggaatcaaccccaggaagtaattatttacaacgattttcccaaattttgtacaatctgtcctggaaagcaaaccccttttaaaatctaatgtctgggctttgagtattagctcatttagggtggacaaatgcattactgttttcaaactgctcacatttattcagtatttctccaagttgctatctactcagccttatgaatgcccctcgcttttctaaggccatgtgaaaatcacggcactgcccttagccttgtgtcatctgctttttcgttctgcgatatgcccagttcccaaatcaattataggtacctgtttaggagagaggaagattttacctctcaaagggtgagatttgaaatttacactaaaaagacaactttacatttaatgcttcacttaatgagacattcttttttttataagtctatttttctactcagtttcagaacactaatctgattttcactctgatttttaacgtttctttaaatatttataatgtagcttctttcaaaatattttcatgaaaaattacttttattataccattatgtgcatgttattggtagcaggcatagtttattatttagtactgaaacatgctcttttacctaacagtaaacaagtatgttttgatatatatctgttaatatgcttatagtggtaagaaatggacttgaggtcccaggagatttcattttattcaccctggtcagatacaataaaggctatgagtataaatacataacttcctaaccaggtgtagggcatgttcatgaatatcaaatcttttgatgctggacccaagagaggaaaagttgtagctaaatgttgatttacttataactagacgtctatgtgagaaaatatatgtatacatatatatgatatgcagaagtcactttttttatcaggctttattctccttacaaagccacagtttaactgtctgcaacagttggtttatgttaatgatagacaaatacccagtgtttgttactttttccaactaccactgtaatgataatctttctcacgtatatacatgcaacttcttggcttcatttccatgaagctgtttcaatatattcagtatactttgtccttaatgctgcttctgttaacagtgatctctttctttttttcattcttatatcttcattagttcatcataaatctgtccagttgaggcctcaggaccacggcatgatttcatgactccgaagtattttacagaaacattttttaaataagggaaatattttatataccagatggttcacaagtgatggctcatagctagtttttttttttcttctaaaaaatgtcaggtttttaaaatcatttaccttattaaaatgaaaagtgccatacttaacttttaaaggaaagacctgacttgctttttctctatttagactgtttttgtactttactaatctttaaactatcaggaaaaaaaccaaaactttataccaatgatttagtaattttgaggcatagggtagcttacgtagtggaggatgtgccaaatattctcttcaaatgccaccttctcaatttataactaaaatagtgttatctgactaattcctctgaattttgatgtaagatctatataggcccccaaaatgatcgtagtacatgccagtcatttctcagtgaaataaatacaataccagagtacattatgggttttattgctttcttttatggtagacctgttaatggggaaaaaatacatcaaatcaaatagaatcttatatctgtatgttaaaatagagcacttacctgaagtcagtggcctggatcatagccctggatcatttcccagtctgtcctgtgctgtgtgaccttggacaaggcgcttcatctctctgggcctctatttctccatttgtaaaacaagtggctgcagtagatgatggctgagagcccttcctgttcccagatgccttggtccaaagaccccacccctctgctggtcctgccaacgtgttggtgctataagctgcttcagatataaaattggtttatctataatgtttgttcatttaatagcttctaaaaggcctttttgttatacagtgctttttttctagttttatggacttgrttactgtaataatgtcttgtttttagccatgtaactacaaacagatattctcttgatgtcttagtaaatttgcatttgatatatcattgatgagattttgttgttatgtaatattctttggntacgcatctgtccagcatcttattaaccataatactgtgatcattatttggaaatatgtcctatggaaagaataaaagcatgtacttcacagctagcatgttcacagatttgaaagaagtttcattaaaagcaccattgctttctgtactgcgtcagtgcctcattgtatcatcctacttgtgttttgctcaataaatgaataaaagaccaaaaaaaaaaaaaaaaa

SEQ ID NO: 1132 - DNA, 324 bp, Homo sapiens
ggcacgagtgtgcatgtatgtggttactgtgtatatgtgtatgagtgttgtatatgcatgtgtgagtgtgtgtctgtatgtgtgtacaactaaagaagctgcagaaactttgtaatactttgtgaaaaggattatattataaaggtttgtactgtctgagtgcacagctactggaataaatttagggaatctcaggaacaagcatataatttgtccaagatttatttcttctcagaagtgtaagtgcagtttttaattctgtatattatttaatattttaccaataaaataaacttctgacataaaaaaaaaaaaaaaaaaaaa

SEQ ID NO: 1133 - DNA, 765 bp, Homo sapiens
cttaacctgtgcaattcagattgatactcagaatatgggttgatttgaatatctgaaatatcaatggaaaatcccactcagtttttgatgaacagtttgaacagttttctgtaatcaagcagcttgcatagaaattgtatgatgaaattttacataggttcttggtgctgttttgttctttttttgttttttgttgttttgttatttacttatatacatataaaattttattgaaaataaaaaaaaaaaaaaagtcacgttcacgcatccactggtctagattttcatataatgtattaaagacaaagtagtgaacatcaatgaacatctgatagagataaactgtaatcaggcataagcttgtttgtatgttctggcagtgactaatcagtaaatgatgtcggtttgcccagtatcacttatcttctgtatttttcctctgtcgtgtaaatagtataaccttttcatttatggacaattttttggactagtagccttcaatatacattctgctttgaattaattttttcaaatcaataaattatgtagacatttaaaatcaaatatcagtagaattgaaaaatgtgagttacataagttaaaaacttactttaaatcttaccttctataggtagctctaaataaattcatatggttatatgataaaaaaaaaaaaaaaaaaaaaaaaaaaaaaaaaaaaaaaaaaaaaaaaaaaaaaaaaaaaaaaaaaaaaaaaaaaaaaaaaaaaaaaaaaaaaaaaaaaaa

SEQ ID NO: 1134 - DNA, 853 bp, Homo sapiens
  misc_feature (36)..(36): n equals a,t,g, or c
  misc_feature (49)..(49): n equals a,t,g, or c
  misc_feature (820)..(820): n equals a,t,g, or c
  misc_feature (838)..(838): n equals a,t,g, or c
ctcaattaggccccccaggctttacactttatgctnccggcccgtaatnttgtgtggaattgtgagcggataccaatttcccacaggaaacagctatgaccatgattacgccaagttcgaaattaaccctcactaagggaacaaaagctggagctccaccgcggtggcggccgctctagaactagtggatcccccgggctgcaggaattcggcacgaggttctgggtccatacaccagcaatgaaggagatagatttgtgtacttgtgttttttaatcagcattaacatgggcaggcaccctcatttatagatgtcaggaaacattcagtgaaaaacttgtagaatgggatgtgataacgaggttccagtaatctgagcagtctaacgaggcccacctcctccaccacagaacgtggctatgttccaagtgctactctcactcagcctgttgcggatcttcatggcctcaggagacttgtttctccatgggctcttctggactgcacacttccaccatagcttgctgggttgatctagatgtctgtttgttgtatggaaattttgggggaaaaaatccaaaacacaaactgtgggttgaaatattaaccgtctccttggttccttggtattcaccgtgcctgatctgcacatttcatcgtggctgtttctgtatagcctatactgcattagcccaagagattgttgctttgtaactttttgcactattgttttggctggatttgtattacacacagttttaaaaaaaacaattccacactaaaaaaaaaaaraaaaaaaaaaaaactcgaaggggggggncccggtaccccaattggncccttaaaagtggag

SEQ ID NO: 1135 - DNA, 1293 bp, Homo sapiens
ttttttttttttttttttttttttttttyaaacttaaaagggatttatttgtgatttcctatatatatttagcttgtaaatacaagactgtaaatgtattaagagacaatttctgttaaagttttcattgtgtttcacttcaagtactgcacaagttaaaatctgataaaggatttacattcggttatctgaaactccccatctcagacttttgttttaatgtggtgggtaacttcatcatttccatagataccaccagcaggaaagtgtctcttttatggcttctaggactttcattagttagtgtgcatacagttttcattttctatatcattgtcattatcattgctatcttcatcactttctaatgggatgccagtggcagctgaagcacctttagtttctcggtcaagaggaaaaaagccagttccactgaaagtgtcttgtctctggtagaagagtacatatgctgctttggacacaatttggtcttcagatgcagtggagacactactgtcatcaaaatagtaccattttccatcatctttattttttgcaaaagcagtatagtgtcctcctcccatccctccatagtggttggaaacagcaatcagattatagcggcaaggacctgcatttggattaattaagaattccgacatatccaagtcattgataggaaaatcaactaaggtatccaacttgtctctcatgtatcgactgtaagaaaatcgcttgagatgtactacaagtactggaggcagggaccataaayccaatttctttgtggcttgctgatgttctttacaattcggacaataccagggatcttcagcacctagcttttcttttgttgtaaaaagttcaatgcaatcttttaatttcacaaagggttttttaggaggtttatactccacactttcatgtttttcaaagtcctcagcagcattttcatcaaaatatctttttttcaaatcaggatcccaatccaaagcaagaaaagatctttcatctagcctaagctgcctatcatcaaatcttatatgcctggtatcatctttgatgtagttgatatcagtattgcctaagttgttgaactggaatgtaaacaatcgttttttgtgtcccgtgagttgaccttkkcaagtatccwcagtacataatccattttcagaatcattatctcctccaactgaatcttcagactgactgttttcattctctgagggaagttcttgatcctggctggattcatcatctggctcatctgtttccatttcacttggtgagccc

SEQ ID NO: 1136 - DNA, 1771 bp, Homo sapiens
  misc_feature (1706)..(1706): n equals a,t,g, or c
  misc_feature (1740)..(1740): n equals a,t,g, or c
  misc_feature (1770)..(1770): n equals a,t,g, or c
cgccgtcgcccctcccsccgcgcaacccgccgccgcgatggcccagcagcagatgaccagctcgcagaaggccctgatgctcgagctgaaatccctgcaggaggaaccggtggagggcttccggatcaccctggtggacgagtccgacctctacaactgggaggtggccatcttcggaccccccaacaccctctacgaaggcggctacttcaaggcgcatattaaatttcctattgactacccctattcaccacctaccttcagattcttgaccaaaatgtggcaccccaacatttatgagaatggagatgtatgcatttcgattcttcatccgcctgtagatgacccacagagtggagaactgccttctgaaaggtggaatcctactcagaatgtgaggactatcctattaagtgtaatctcactgcttaatgagcccaacaccttctccccagccaatgtcgatgcttcagttatgttcaggaaatggagagacagtaaaggaaaagacaaagaatatgctgaaattattaggaaacaagtttcagccactaaggccgaagcagaaaaggatggagtgaaggtccccacaaccctggcggaatactgcatcaaaactaaagtgccttccaatgacaacagctcagatttgctttacgacgacttgtatgatgacgacattgatgatgaagatgaggaggaggaagatgccgactgttatgatgatgatgattctgggaatgaggagtcgtgacgtgctccttcagtgcccctgtactgccctgccatctcaggccaaagggaggggagcaagtggggacctggccatggcccctcagcaaaaacctattcacagcgggtggggaaacacacacagctcctgctgactccccttatggatctcagtttgctcctttttatggacctttaatggagagagagtaaccctccacagaatgtctgaattcttgcattctttacccttccatcactatattgattcttttttaaaaaacatgaacccaaactcccgcctcacttcgtctctacagaatgttcacagcaaaacacgtttggtctgtttttagattcttgaagaattcaatagtctttcaagatgtttaatgtgtttaaagctgggaacctgttgggagttcacaagtgctgcatatactgggtagcaaaagaaaatggaaaaaaacccacaaaacaaactttaaaaaaaaaaaaaaaaaacaaatttgccaaggtttagctgctcatttacattagtgtgtgtgcattcgttcagccccatggtggtgaattctgtttctttcctttcctaaggctgggacatggtgggcatcagggactttgtgctaagcctgatgaaatgtgctccttcaatctccatgaaaccatcgtaacatggaggcctcagctgctctgaggagagaaatcagactttgttttttgaaatcgattgggatcgaaagcctgaaataaatattcatactttccatagaactgagcacttggttgctatttattttaaaggcagggttatttccccccagggagtggggcaagcggggaagttgggatgagtgcgtgtgggagcaaagagttaaaaatcactatgctaagtttggttgatgctactggggggaaaaagttgaaactactggtgaccactgttgggagaagaaacatctgttttatanatttagcatggccttcccatcaaaaatacactcntaccatgacgttttgtttttgttttttaant

SEQ ID NO: 1137 - DNA, 699 bp, Homo sapiens
  misc_feature (694)..(694): n equals a,t,g, or c
aattcggcagagcccataaggggctttgtccagccaggcagagagtagaagttccacccctacccctgtattaatgtgctcaggctgccatgacagaaaaccacaaaccggctggcttaaacaatagaaattaatttcctcacaattctggatgcttatggtccacgatcaagttgtcagcagggttggtttcttaggccactccttggcttgtagatggccaccttgttgctgtgtcctcacgtggcctttcctttatatgtgcgtgcccctgccacctctatcttaagaggacaccagtcatattggattagggtcccaccccaacaacttcatgttaacatcatctctttaaagaccctgcctccagctgggcacggaagctcacgtctataatcccaccactttgggaggctgaggtgggcagatcacctgaggtcacaagttcgagaccagactggccaacatagtgaaaccctgtctctactaaaaatatgggcacsgtggtgggcacctgtaatccagctactcaggaggctgggacaggaaaatcgcttgaacccaggaggcggaggttgcagtgagctgagatagctccactgcactcaagcctgggtgacagcaagactttctctcaaaaaaaaaaaaaaaaaaactcgagggggggcccggtaaccaattygccctaaagtgngtcgt

SEQ ID NO: 1138 - DNA, 1453 bp, Homo sapiens
ggcacgagggaatttgggatttctattaatttgaaacaattagtgtcttaaaatattggagaatatggtatgtctctccatttatccacagatgtttaaattttcttagttttttcatataggatataatgtttgatttgttgtttatttccacttttatattaatctttttagctagcttggatttggaagtgaactactgaatctttttttctttttttataagcttttgttaggagtgataaacccaaactgttcagaggactgcaaatcaagtatgtccgtggttcagaccctgtattaaagcttttggacgacaatgggaacattgctgaagaactgagcattctcaaatggaacacagacagtgtagaagaattcctgagtgaaaagttggaacgcatataaatcttgcttaaattttgtcctatccttttgttaccttatcaaatgaaatattacagcacctagaaaataatttagttttgcttgcttccattgatcagtcttttacttgaggcattaaatatctaattaaatcgtgaaatggcagtatagtccatgatatctaaggagttggcaagcttaacaaaacccattttttataaatgtccatcctcctgcatttgttgataccactaacaaaatgctttgtaacagacttgcggttaattatgcaaatgatagtttgtgataattggtccagttttacgaacaacagatttctaaattagagaggttaacaagacagatgattactatgcctcatgtgctgtgtgctctttgaaaggaatgacagcagactacaaagcaaataagatatactgagcctcaacagattgcctgctcctcagagtctctcctatttttgtattacccagctttctttttaatacaaatgttatttatagtttacaatgaatgcactgcataaaaactttgtagcttcattattgtaaaacatattcaagatcctacagtaagagtgaaacattcacaaagatttgcgttaatgaagactacacagaaaacctttctagggatttgtgtggatcagatacatacttggcaaatttttgagttttacattcttacagaaaagtccatttaaaagtgatcatttgtaagaccaaaatataaataaaaagtttcaaaaatctatctgaatttggaattcttctggtttgttctttcatgtttaaaaatgatgtttttcaatgcatttttttcatgtaagccctttttttagccaaaatgtaaaaatggctgtaatatttaaaacttataacatcttattgttggtaatagtgctttatatttgtctgattttatttttcaaagttttttcatttatgaacacattttcattggtatattatttaaggaatatctcttgatatagaatttttatattaaaaatgatttttctttgcttaaaaaaaaaaaaaaaaaa

SEQ ID NO: 1139 - DNA, 1140 bp, Homo sapiens
ggcacgaggtaaattggttgaagaaattagatcccaaagattcttggtgaattttgaagtcttcatcagtatatccatattaaaacgagatgacagaagccaaagtaattatggcaagtaatggtttttatcttaactataagttatttgctcaagggtgtaatggtcattaccaaggcttttagaatgcagtttctcatttgctgtggacatgaccataaaaaaatttcccagtaggttttctatctgctactttgctagcaatcagcttattgggaacagttgattaactgtaatagaaatgcaatacaaataaaatgtgaaccacatgtgatttttctttaaaatcagtgagatttgaaaattctcctagatctcttgaatcatgcaaatttgctttgcctttatattgtaacccttgtgggttgctaataaccaagcagtttgtagtagagttaactcaggctcgttctagggactcattcatgttcactcactgtacactcatctctggaaatgtaaaatttacttttatactattgttatgtaggctgacaggacaactggatcagtttcattaaaaaggtatgtatgcattagaaaagacatttgtatgggtcatttcaaagaaggcttatgaagctgtgaaacccagagctcttaacgctgtgaccaaagatggaagttctctataggaagccctatagcactcctaatgtttggtgctatgttttcctgaggagatataaaacgtaataatccatgattgttgccatgtgagagttttaaaggttaatcaaaatttctcttcttcagggcaaacttgaagataaatcttttgactccagctctttagaggatctaaagtgaccttgatggacagtggaagaaatcacaacatggaattcctcgaataacaatttattgactttaaataattttgtctaatgctacatatacacaattaaaaaacctttacactatttctagaaagtcagcatgtatttttggctcgaagtttctctagtgttttctgtggaaggaataaaaatttgagtttcagttgtgtaaaaaaaaaaaaaaaaaaaaaaaaaaaaaaaaaaaaaaaaaaaaaaaaaaaaaaaaaaaaaaaaaaaaaaa

SEQ ID NO: 1140 - DNA, 1397 bp, Homo sapiens
  misc_feature (579)..(579): n equals a,t,g, or c
ggcacgagctgaatctgtaaattgctttgggcagtatggccctttcaacaatattgttttttcctatccatgagcatggaatgtttttctatttgttatgtcatctctgatttctttgtgcagtgttttgtgactttcatcgtagagatcctttacctccctggttagctgtattcctagtattgtattctttttgtggctattgtgaatggaattgcattcttgatttggctgtcaccttggatgttgttggtgtataggaatactactgatttttgtacattgattttgtatcctgaaactttgccaaagttgcttatcagatcaaggagcttttgggcagagactggaattttctaggaatagaatcataacatctgaaaacaggaatagtttgacttcctctcttcctatttggatgccttttctttttttttgtctgattgctgtgtccaggacttccagtaatatgttgaattggagtggtgagagaaggcgttcttttcttgctccagttttcaaggggaaggcttccagctttgctcattcagtatgatgttggctgtgggtttgtcatanatggttcatattattttgagttatgttccttcagtgcctactttcttgagggtttttaacctgaagagatgttgaattttatggacagccttttctgcatccattgagctaatcatgtggtttttgtttttagttctgtttatgtgatgaactcacatgtatttatttgtgtatgttgaaccaatcttgcatcccagggataaagcctgcttgatcatggtggagtagctttttgatgtgctgctggattcagtttgctagtattttgttgaggaccttggcatctatattttattaaggatattggccttaagtttttttgttggttgtgtctctgccaggttttggtatcagaatgattctggcctcacagaatgagttagggaggagtccctccttctcaattttttggaatagagtggtaccggctcttctttatacatctggtagaattcagctctgtcaatttctgtcaattgcctgtgttgaaatccaatgactacctcaaactatttctaatctcttttacatttttacccaaccaatttaatttcttggattcccacatttggccctcaggccgtactttgctgactcctggtatctggacaagattgctgggtttcgagctgaggtttcacatggggcttgagacccatataatcacagagtggtctcaaatgggtctcatacttttgtatgtatttgtaaagttcacggtaatagcacttgccatgccttccttagaaagttacatgggataatttaatttttaatttttgttaacattctatagacttaaaaaaaaaaaaaaaaaa

SEQ ID NO: 1141 - DNA, 1883 bp, Homo sapiens
ggcacgagtggaaagcccactctcttggaaccacgaccacacctgtttaaagaacctaagcaccatttaaagccactggaaatttgttgtctagtggttgtgggtgaataaaggagggcagaatggatgatttcatctccattagcctgctgtctctggctatgttggtgggatgttacgtggccggaatcattcccttggctgttaatttctcagaggaacgactgaagctggtgactgttttgggtgctggccttctctgtggactgctctggcagtcatcgtgcctgaaggagtacatgccctttatgaagatattcttgagggaaaacaccaccaagcaagtgaaacacataatgtgattgcatcagacaaagcagcagaaaaatcagttgtccatgaacatgagcacaggccttcttgactggaggaagagcttgctggcatggtggcagtattccaggagaggccatgtccgtgtcacttcttggcacatttcagttccgttttcctcttgtttaaaactgcctctttagatgtggatgccttaatgctgtaacacatttgaaaacattggcaatacttaagttgctgccatgattacagatggaattattggctaccaaagagacgcaattgatgatgagaagcatgattcttgcttccatataaccaaagttaatcttaattgcaatttgactccgtttccttggtagggatagactttcttcagattccaagtgctctcttaaatggcaaattaagttaaagaatactactgctccattcccctcacttattctccagttaattgcttgtcagttccatttcaagaaagcagtgatgttccaggtttgattcagttttcctgtgcacactattgccaaatttttttttagcaaagattctgcactggaacgtagacagttggaaacagtactacctacctagaggttatgtgttttctctttctccccgctttcacctctttctttcccaattcaaaacagccaagtgagccctgttctggtattttgaatcattagagaaaagaaagggagtggctgttttgagttgtccttctttgcagaaaggagaaaatgtgattgtgttttttttttaccagcctacttctaagtgtcactgcctggtttttctctttttcaaggattagaactaagaggacacaccagcatcggagtgtattaagcccctgaaacacatggtagctagggactgaacacaggaaccgtatgacagcagcacaaacccccaaaggatgttcctgccttgtgggcccctgagccccttgggagactgagaatcatgaccagattcatccagaactgctgcagtgttaagtgaaaatcctctgtagttgttctgcagaggaaccttccttccattagaaaatttctgctcaatacagaatggtccacatcacccaaagtgcactgttggagatgctgtgaaattaaaacctctttgtacctgagacatctagattcacctcaggaggcctgaaggaaatgtgtaacttgtgggaaagaactagacaaccatttaggaattctctagatatactcagcctaacccagtggcttaacacaaggagattggctttgatctttttttcttgtggcatcttccagcaagttagaagtctcatgggataagactgcagttcccctggttcaatagctggaacagtgattttaaatgtccctttttctggatcccttgtaaacatgaaatcattccatggatggctgccttataattttgtctctttccactttaattgtgaatggttaaaaaaatgctgttttctgatattaaatttttattagtgcataccttaaaaaaaaaaaaaaaaaaaaaaa

SEQ ID NO: 1142 - DNA, 2220 bp, Homo sapiens
ccccaaggtgtttgaacgggtaaaaaatcggggctttcgggattcgccaaggtttgcctaatcattatccccggcccgaattttttcggatccaccttaaatatttaggaaaacaaggtttaatccttatgtgtcctatarggaataaaatggtcttcattkgacacttactttcccatgaacacttgcagttgctaagggactttattttgtaacatatcaattataaatattgtatttatctttgaaattttgtacattgcttttcccaccttttcctttttcttctttcttgtctgtattggtttttgatcacggcctggtgttgtgatactgggaagagcattagccaagaacttgtctctttgatctgtttcgttaagctgaaccagtgtctttacatttcatttgtacttcaaaaatatatgctattgtttagactttccatccttttttttttttattttgaggaaaagtcaaattcattgtttatttttatattatttttaagttatctgaacaaatacttttgaaaaaaaagtttgttgtatagtcaaaacaaatcggtgccacccggccgtgacaaatcctagtagattctgtgcatgtggagcggccgcgaagaggtgacaccgtttggggctgtgtccttattttattttatttttttgtagaatgtaaaaagtcattttagatgccacccattgactttgccacatagctgaactgtgtttactggaaaaattcagaggcctaaagtttaaaataaaatttacttctgatgttttaattaaaatgtttgccacattaacttttctgatgccttaaaagtgaacttctttaaagaacctttgtgctattttatcacaggcttacactacaattgttaataaatacttcatttggagatgtatggtgtaaaacacacaaacacacacaaaaaagcacaagcccgctgcatgacccgtctctcctttctgggactatttctgctgcgtcctgcaccctcctgggcccacctccgattcacagaggtttcagggggacccaaatcactgctggttttcaatttttttttaacaatacatttttgtggtcagttccaacagcactgtccgtacttttaaaactggaatgacctccttcagatatcgtgcctcttagtgccaaacccacagtgagaccaaaagtgtcaggtgtttttttttttttttctttctcctttgcactaagtgctttgcagacacggcacagcaaacattttgcaaactgcagcagaaatcgaatttaaaacaaaaaggagggactttaaaataccttcttgacaaaaatcaacaatgcacaacttacaaagtgttcattcctagggacaaaattaaataaacagaatgtcccccaggagtcagcaggtcacagtctggctttgtgatggttgacaaggtctagctacatgggaaagcctgagaagtcactttggaactaaattgcctccattttattttgtacgagtaagggtttgatctacaaaagagctcacatggacgcactgagaacgcctgccagcttccccatgccctcacttggtttgtgttttaggttaagtagtcartgcccacatcacttcactgtctcaagactgagcacttcactaaatggtagattttactgttaaagaccctacaataagattgttttatctgtacattttttcagatatttaactgtataaaaatgttcattttacacaatatttaattaaagtatttcttgtctgtgaatttcacttttggtaattttctctgtttttgattattaaaatgactaaacactaacataaaagttacatcaggggtttcatttgcacagaccgggttctgaagctgcaacttggccaagataaaaatgttccacagaggaactttccacaaagttatccagcctccgtcctctaacctgcatagaaagagaggttcagcaaattgtcacttacgtggtcctgacccccagaggtgccatctgtattcatgctgcactctggctgatgtttctgtgtcacagatgttctgtgggccacagcagcactggggtgacacaatcactgttccagcacttgtctttgagaactcaaacaatcccaaggctcactgaggggcttcataacccactccctccagaccttctgccccagcccctctgcttctgaatagcgcactgggcagc

SEQ ID NO: 1143 - DNA, 432 bp, Homo sapiens
ggcacgagctagttttgaagatttacttcaagtttgaatcttctagaatgcttgtaagtccagttttaatttttagagtcaatttgtagttacatgtagtttaacttttgggaaacgtcttaacattgttctgagaataaacttgctaatgaggtcaggtcatggtacagactgatgcagtcaacatgatttcattgcagagtttattagtatcagcaagtttttgctttgctaaataaaagtactcaatgaacacaattctacataaattttgacataccatctaatttataaaaatcaataaaaaaggttttggtaaaactttttcatgccagatgctgtttacaacaatgaacatgccaataaaacatttgttcattcaaaaaaaaaaaaaaaaaaaaaaaaaaaaaaaaaaaaaaaaaaaaaaaaaaa

SEQ ID NO: 1144 - DNA, 1799 bp, Homo sapiens
  misc_feature (1355)..(1356): n equals a,t,g, or c
  misc_feature (1589)..(1589): n equals a,t,g, or c
aattcggcagagctagaatttactatttgttagttacatacaaaaattataatttatatacataaagttatactatgctgtcatttttaatatccgtacaacattgcatagtaccataatttagtctattgatgtacattaggttatttctaatattttgctatttatatgcacattgcagtgaacactccctttacatatgtccttgtagtgttgtctcctaagatatattccttttatatcttacatggtgacaacattaaatatctgaactctgtgacatcttggggacatacatttacctctgataatttgctatttgtatgacccttgaattgagtaaatgcaccctaggcatggtagaccagagaactaaccagaaaagtggcactgtgtttagtcatcctagattctttaagatttttaaaggtaacttaagtagtagtttttgtctagtccatacatgcatgtggtgtaaaattcaaaagatatagaaaggtaaagtaaatctttctcccactctgaaacctcttctacccagtttctgctcctgggaaactactatgagtttattcatccttctgcacatattttatacatatatgtatactttctgcacatatatgtgcatatatatgtatatattttaagttttttgtaaatgatagcatactatgctgttctacagttcactttttctcacttaactataataatatctaacacttacgtagtgctttgttctaggccctgttctaacaagtgtttttgtattgattactaatcttcatcacaaacgtgagaagtaggtaaatattattcccttaccacagaggaagaaactgaggcacagaaactttaaatgacatgctagtaggttgtcagctggaaggtgaactccagcatccagcagtttggctacagagtcttttatattagcccatttgctatactaactcaattgttgcctcattctttttattaactacataatattcccttgaaaaaacttcagtttatctaactaggtcctagttggtggacatttaggtgtttccatatactgctgttatagatgatgctagtgtgaatatcctggtgcttataaatgcctgtgtcattttgaatatgtaaatctctttcattttcatccattcaaatttgggagttaggggagtcttgtgttcatatagttacattctattttgagatctaatatgagacttttttttcaatgaatgtatttagctaatttatatttattatatcattatggttatagcctcatcttttatagctaatggactaagagataagtcaaggtatgttaacaattgaaatatacttaaagatgnnaagcagtacagwataaagatattagcatycctcagtctatttactctctcacgttttgttggttatataaaaacattatcaggaattgtaacaattacattatattctatagccatagccatagttttagaccaatagttaagtggattcaaatgctcaaagtttgttattttcgatagttttttaaaaatcttttagatggctgaactttatcatcaagtattttcttaaantttatgaaaactattccttagggttttgcatatttaatgatgttttatgctgggggtaaattcttgagtactctagatattgcttcactgatttttttttttttttttttgagtcggagtttcgctattgcactccaacccggatgacagtgtgagactctgtctcaaaaaaaaaaaaaaaaaagaaaaaaaaaaaaaaaaaaactcgag

SEQ ID NO: 1145 - DNA, 1521 bp, Homo sapiens
ggcacgaggtaaattaaaagcatgatcattttgttgataatcagcctttggagaattaaacagcctgcttactgccagtgctagttcagtaaatatgtttctcattttctatttggcaaaattagataacctaagcctaggaaaaataaaaaattagaaaaaaaaaagtagatttggggatatttaactcaaattgcccttactggtggaaactcgaggcagttacttagattatttccaaatggctttttttaaatgtatttctatattgtatacaacagtctcagtcttcatctctcctgttcagctatccatacatcccttaaaattagatatttttaatgtttagtaaaccttcagtttgggtttatagacaacatttaaccttctcatgaaagggtcagaatactccagttgcaggcacaaacaggccatagtttagttgaaggagaaactgcgaactcaaaggagcactgcttctctgcaggaaagatcccgtcagtggacctgcggggcacagctgccaccagtgtcatgtagctattcagtgtcggaaaactagaaatcacaagtgaagagaaattgtaaattacctcaaattctatgcccagaagcaaccactatggaaatccttctagacattgtcccgtataaatatatttccctaaaaaaaattataccccatactctgccacttcaaaaaaatcaagactgtttttccatgtcaataaatatctatatcatttaatgaatacataatactcccttgtttgaatgtacaatattctgtattgttgcacatttgttgtttccaatttaacaattacagtactccaatgaagcaatcatcttaaaatacatgtataacatattatgatgttccatcctttaaggttagaaacgacgtcccatacctgtctcccgtcactctgagaacagtgcggtaacaggatcagcgattctcaaccatgggcaatttagccccctatggcacatttgacaacgtctggagacatttttggttgtcacaactagggggtaggggatgctactggcatctagtggtggaggataggaagctgctaaacatcacgcaacgcatgggaccgtcctccatgacaaaggacccgtgcaaaatgtcaatagtgccactgttgagaaacccggattaagatcatgttgtaactacatttcagtgggataagactttgaaagtttccaccgggcacagtggctcatgcctgtaatcccaacactttgggaggccaaggcaggcagatcactggaggtcaggagttcaacaccagcctggccaacatggtgaaagccagtctctactaaaaatacaaaaactagttgagcatggtggtgcgcacctgtaatcccagctactcaggaggctgaggcaggagaatggcttgaactcgggtgggggaggttgcaatgagccgagatcgcgccgctgcactccagcctgggcgacagagcgagactctgtctctgaaaaaaaaaaaaaaaaaa

SEQ ID NO: 1146 - DNA, 1185 bp, Homo sapiens
cgattatgcagtgtatctactaacagtgttataccatgagtcttggaatactgaagaatgggaaaaaagtaagactgaagcagacatggaagagtatatatgggaaaatagctcatcagaaagaaatatcctggaaacgcttctccagatgaaagctgctgagaaaaatatggaaataaataaagaagagctccttggtactaaagaaattgaagagtacaaaaagtctgttgttagtcttaaaaatgaggaggaaaatgaaaattccatttctcagtacaaagaatccgtgaagagactattaaatgtgacatgaattatggagtagaaaaatctgcttgatttattaattttatgatatatgtgatcagtatctaatttgatataaaattgaaaatgttaaaaaatcattttttttcctcagagttaaaattatttccctcatactaatgcttaatggcaatgattactccagagttttttaatttttacactggggcaatagactaggaggtctctgatttcttcttggtctaaagtgttttgattttatttctacataatagctttggtattcatgtatatacatgcatttaattgtgattttatcacctttcccatttctttccccacaagctggcatttcagtagttgcttttgaataatggttttggttacctgggaaggcaggcccagaacccatttccttgacttgcagttccgggctgtgttcacatgactgctgtctagctgatgcatttttcacatttgtcaactctggttagaaacaggtcctcaggagtattctctaacctgatattttctaaaaagatatgttgattcaactttgtttagcatcctactttctagattgtggggctcattttgccagggccaagctaccagaaaagtagaagtggagattacctggtatgtatctctctgggtgccccagttagagctgccacagctcaggaaaaagatgaggcataacgaccttgaatgtaattggagtaagtgacaaaataagaactaccctgggaaaccctgcattcaatgtagctgtcaattcagtatttttaagtacacctgtcagctgtttcttaccacttcgatggttgtgattaatttaaaatcaaaataaaggaattactgagtttaaaaaaaaaaaaaaaaaaactcgag

SEQ ID NO: 1147 - DNA, 1649 bp, Homo sapiens
gcaacagtcagttacctctgattgtaaaaggtcgctcctcctgagtcttagtgtttactagaatttgcttcaatgttttatttttgtgttaccagttttaggttgactgtataatgaaattctgtattttgaatcacatttccctgctgatatcagcccagcttataacaagtaatgcttgccttaaacatattttttctttctctcacttctgccatcaattcaacaataggattgcagatacagtttactttggggctgaattaagcagtagcagaggggtgtttgtaaactaactgatgttatcaataggcagggacacagcatggcttaggatcatggtcttccagcttgatgacctgctttgcaatctgtttgcttcatccacatcaatgaggagccagaccttctggtccttcatttactcatagactctcttaagagctttgtacattcaattctgaacttattggtgccataaaatattattactgtgcaaaagaataaaagtgctagtgtgttcttattagtagccatgaatttcatttctcttttccctcttcccacctgagattcatctttgaggggaagccagataccttgggcttcttattttcccatcctgcccttattcttggaaggtcctcaggtttgttgacatggtttttgttctctgggacttttctagtgtgttgtttgcatgtcagccagctcaacttaatgcatgtcagctcagtgccacttgtgctccatgtgacttcagttagcaccagtgtaaatcttgtggctgttaatagaggtggagtcccagctctgacggcagtagtgggagaagaagaggaaattgtcagggcccaaacatttcatatctcatttaaatggatctgaccacttcatagaaaagaaaatttgaatcattgtgctcaaaggtttcccctttgagatacatattttgacctttataaactatagagcatttgtgttttcatggatggttatgtttagttttataaggaccaactctgctatacttcggattttcaggttcctaaagagaaagatgaaatggtagagcaagagtttaaccggttgctagaagctacatcttaccttagtcatcaactagacttcaatgtcctcaataataagcctgtgtcccttggccaggcattggaagttgtcattcagttacaagagaagcatgtcaaagatgagcagattgaacattggaagaagatagtgaaaactcaggaagaattgaaagaacttcttaataaggtgaaattctgtattttcttcatagctgaagaagctttaataggagaaaaagtctttagaaattttaaaagcatttccgagattttttcctccatggaagagaaagtctgcacagctgggactcattcttaagaaaataatgactaacgaaagagactgttttatctgtcagtctttcagtgtggcattattgataaatggttgccagaggaaatagatctttcctctttgtctggttccctttggctcaggggtgtccagtcttttggcctccctcagtcacattggaagaagaagaattgtcttgggcaacacataaaatacactaacactaatgatagctaatgagcttaaaaaaaaaaaaaaaaaaa

SEQ ID NO: 1148 - DNA, 3484 bp, Homo sapiens
aaggtagacaacacttcagtttttcttgagggggaaaaaatgtacccgctaaccttttttcacccatgatttgagccctaaaacaacagcctttatgttttcagtgcaggatttcttggaatttcttgcttgtatcaatcctgatgatagccatcctgaacagatgcttctggtctgttttcctggaatagcagacatccttttgaacactaatgatgccaggaagagagtaaggctagaggaggagactcattttaaccccagtccagtggcttgtccgacaacaggccatttccctttacattcctccacagacagaaatggctattaaaaatgttttaacctcatgtatgaactgaatttaaaaaaccactaaagtgatactttatacttctgttttactccctagtgggttttctttaatttggatttttgttgggatgtagcttttcctagactgtatttctgtagctctttttctctggtgtattcatggaaagcatctactgccgcacgacactagtactgtgccttctttcactgccctctgctctgcagctctcacccagcttggctgcttcaagtctgtgcagttgacttggctgtactgaaaagtgaacagcatggattaactcatcctgctgctgagggcagtgcaaacaggtgcttattagaggtagtgacttgcttaattagtgacactcctaatttctactatggataatttcaaagtagaatcactctatgcttagagttttggcaccaatgctgtagggcagcagaatctattctcagtaaaataacttatggtttattagatattctgtattggattttaccagcttgacttttactgctcagatgctttctttcccccccttagacgctgtaattctcttgggaagagtaactattcttaaggtttttacagatacccaccttagttgtaaattggatagtttatatttctgggactttttaaatgaaaatgtggaatgttaagttacaaaagacttttcatcagaaaatttcaaacaaagtaaacatggcgttttatagtcctctaaaatctaggtgctcccacccaccaaaggcatatcctgcaaagggctgtgaactatcttggtgaactgtcttgggtcccctttccatgtatgttttcttgtcactgaaaacaaacaacgctgagtttatcaagaaaatttaaattgggggatcataataattccaaccaagtgacaactctgacatcaaggttattaggagctgtacatccaattcaagttttatttgctgctattctgggagaataaacttgtatatggagaataaactaataaacttgtatcgaggaaatccataaagttataaattagcctgaaaaatatttcaggtaatggtgtggattggcctgctttgactctcagccaccaacagaaatctttgtcacctttgttcctcagctaaaagtaattttgttataaacacaaagtgactttaaacaggtaaaaaacccattcctatttttgtacattaccaaaagtttttcatatacctacagagctaactaattacaactgatttaatccactcaagtttagaccagttaaacccataggatcctgtatggttatcaatgtgatgccttgcttttcataaaataggtataattgggtcatacacttgacgagagggtgactgtttctaggggaagaaaaccctttagattgcaggtaactttcacttttttttttttaatatacactttacatttgtataaattatgcagggtactcctaaccctgtagaaatgtatgacctctcacaaagttgagatttgatccaaagagaaatgcaagtataaaagaattagatacttattatcttttaaggttttttttttttttggtagagatgggggtctcactgtgttgcccaggctggtctcaaactcctggccacaagtgatcttcctgcctcagcctcccaaaatgctgagattacaggcatgagccactgtacccagcctttccttataaaattcaaagagaaaatttctacacctttatccctcaaataaaacaagtgctcagttcttaccgtgcccttgcaaggtctatatgtaaaagaaatctgaaatttagctgtagaataaaacttgataaataaaaagaaaaaacatacatttctccagttggtttgctctttgcttgttgaagtaataaaccgttttaaagagaaaatacttgctgtaaacccccagtgccttcaactcttttggcagaatatttttaaagaaatccagcaagcaaactttgaggtgctaatgaaagtaaaggaaggtggtatttctagttttggcagaaatgaaaagtgtctcacaagagacatcactacccacgtggggtctggctgctttctaccaaagacatttagagaagtgaattgagtcagggtgatggtgaacactacatattttatagatggttaagttgagaattaattatgtttatcatggatggctactaataccaagctcatgattgttgcagcctcaacgtcttaggcagtaaaacttgtctgcagcactaaagggggagaaacccttatattttgcaaactgtccattcgttaaatttattgtaacctaataccaaaaactgccgtttttcatattatttccccacctcctactttttttttttttttgctacttgtaaaataaccccttctagaaaataagcattaactggaatgtttcaaacaattttgcttcattttactatcagccactagtgaactcttacagagatgtacatttaagataaaattagcttgtgctaagtgttttaaaaacattgtttactgttaaaggggaattgcacattatatttaactgggattgctccctccctcagttctttaaaaaacaagagtcaaggctcacaccaacttgtaggctgtgggagctttgccataggtagatacaatgtagaagtatacttttttaaagcatgaagaagacaaggaacttcattataatgtaccaggtagaggacattattattcaaaggattatgcacagctcagtgaagatgaagttacaatttttctcgcagctttgttgctattattttcttctgcataaatgtatgctcatttcattatgtgccttgctccctgattgtgcaaagctatatatatatatatatatagatagatagatagatagatatatgagagagatatattcagtactactgaggatgtttttctgaggatgtttttgttctgctggattaagttattttccaagttactcttgccagttatgtcagtaaactattgtaatggcttagcacactagtcgtacagtcagtgtaaatgtttttcatttacatgttttcattatatcagcttatcaaatccttaataaaaaaaattcatagatttcatttaaaaaaaaaaaaaaaaaatgaccctc

SEQ ID NO: 1149 - DNA, 1593 bp, Homo sapiens
ggcacgagccccagataaatcagttgacccacattttcattttaggtgttaggtccaaattagcataatgtcttgcattattattaggttcagtgtgaaactttacagtgctgcatttgaagtttagtaactggttattattaatcatttgggaaaaatgaaaatgtgttgggactttctatgactaggcatttgttgattatttttcatgattgctttttgttttctcattgtgtaggatttgtgaacttgtatattacaggaaacaagatactttgtaaaatttactggggaaaatccatttggagtgcatgacatttgccaggataagaaagcagtaatatgtttgtattataaaattacaccctgccagaaaactttctttcctagtaaggtaaatgtagaagggacttttacagcatagtaagttgattaggagccaaaattttattccagtttttttttgaactaagaatgttttaaattctgtaatgaacttttatgtttacccattactcatgcattctttcacaatatgtttaatagcctgaggaaataggaaagctgtgaagctactaccattctttacttttaataagaataataggaaagaaaagtcaggtcagtaatccaaatccaaatatgtatactgcaaatgctcaagaagtcacattttttgataaattgtattgagtacagaagaacttatatgaatttattatctgttaataacttagttttgacaacagaataacatttggaaattgtgagaataatcaagctgtttttccattaacagtgtaaattcataacatgtccttcaaaaggtgatattctaagctgtcttaattgtctacggttgataacttttaaataaagtacaggactttctgaaagtgtttggcatgttatgctgccaaaaacaatctgtgttttgaaataccaattaatcagttaatttctgaagactttgtataggacttgatatatgagtcagaatctgtctgtactcattctgtacattgtaactttgaacacttatgaaaaactgtatctgttggtgtgttttgattagttagtgtagatttgtttgcgtatttgaattccgattttagtttaggaagactaaaagtagccatttttgtaaagttcatatgctattttttaatgtcatttttgtttttaatatttatacaatagtgatgttactagtaaaaaatgtttatagataacacgtagagctattaactgttcaaaagcctacatgataggcatattttgtatttcgtgttgcactcgttctgtttcatattggactttttacatcccttttttagcaaaaaaaagagacacatttgaattctctttagcataaagctgtgcattggaaactatgtgactgtatccatacggttagcaaaatactctttgccaccaaaggtaaatgaaactgtaaaatacctctggatatttgtgccaatgaacttttcttagcatattaggattaaagcaaaaataatcttttcagtatgtttcatctaggacttacaataaatgtttaaaccatgaaaacttaaaaaaaaaaaaaaaaaa

SEQ ID NO: 1150 - DNA, 933 bp, Homo sapiens
ggcacgaggtaaaactgattactatgcttggaaacgcttagtgatacaggataaaaataaatacaaaacacacaaatacaggatgataatttgtgtaacagagatatcatttgtcagattgcttatgcccttatagagggggatatgatagtctgtgcggcatatggcatatgaactgccaaaatatggtttgaaggttggcctgacaaattatgctgcagcgcattgtactggcctgctgctggcccgcagcttctcaataggtttggcatggacaagatctgtgaatgccaagtggaggtgactggtggtaaatacaatgtggaaggcaatcttggtcagccacgtgcctttacctgctatttggatgcagaccttgccagaactaccactggcaataaagttttgggtaccctgaagggcgctgtggatggaggcttgtctgtccctcacagtaccaaacgattccctggttatgattctgaaagcaaggaatttaatgcagaagtacaccggaagcacatcatgggccagaaagttgcagattacatgcactacttaatgaaagaagatgaagatgcttacaagaaacagttctctcaatacataaagaacagcgtaactccagacatgatggaggagatgtataagaaagctcatgctgctatacgagagaatccagtctatgaaaagaagcccaagaaacaaaaaagaagaggtggaaccatcccaaaatatcccttgctcagaagaaagatcaggtaactcaaaagaaggcaaactccctcagagctcaggagcaggctgctgagagctaaaccaaacaattttctatgaggatttttcagataaagacaataaactgatggatagcaacaacaacaacaaaaaacagaaaaaaaaaaaaaaaaaaaaaaaaaaaaaaaaaaaaaa

SEQ ID NO: 1151 - DNA, 1685 bp, Homo sapiens
aggattctagcagcatattgttattaatggccgttgtgaatattgtccgcatctgtgtttcgtatggcatacagtgaacaatacaaataatttcaagaagtttgattttgactactatggactttcattttctagttgttttctttttttcttatcattttcctttcctttttcttcatgttggaaatctttcttctgctgccttcctctgtcaattaaaaggaaaatcccacctaaacgcccaccaagaaaacacattgtggagcgctatacagagttttatcatgtacccactcacagtgatgccagcaagaagagactgattgaggatactgaagactggcgtccaaggactggaacaactcagtctcgctctttccgaatccttgcccagatcactgggactgaacatttgaaagaatctgaagccgataatacaaagaaggcaaaggaaaagataccccttcacgtctttagtcccaaatacacaaaattacgtgactggcaccatgaagtttcagcacgtgctcttaacgtacagtgatttatgagccttgccccccaagcagccagcacataccttttcatttactttttttttttcaacttcatagcaaaatctgtattaaatttgccttatgaaaaaatagaactttttctatacttttctaacaatttcctattgttgtgagaaaaggaagatgaacatgttttgtgctagttggtagctcacaaatgtaaaaccaaaaaaaaaaaaaaatagaaaattaagggactagatctatttgtggatttgtatctgtttttgttgtgattagggtagtaatcttggaaaacgaattattttcataagttgaatttggttagttggttggttgaagcagaggataatgagcaaataaagtccttgtctaatttggaaaattctttatattattaacatctcccaagattactttttaagttcattattatgttacattcaaagttgattgtaaattattctaaataagtaaatataaggaggcaagaataaacaaagactttattaaagaagagtgygtgcattgtagatttaggtatcttttaaagtaggtactattcaggatggctctatgaagaggaggaggtccagatttggctcctgaaaaaggaaagaagagaattttacccctatttgcaatggagaaatacagtattctttggtttggttggatttgcaaatcctatttcctatcaaaggaaatatctctagtggatatttttagaatatagacaatttctaggtattaactaataagatatggaaaagatagctttgctttttttaatcagaagaacataaaataaattacaatatgaatgattgtgagacatcagagaaatattttacttagtgacgtaaactactgtgcactgctgctattcctaggaagctgtgttttgggcaatacatggaagctaaatatatgaccagaaatgctttctgccttgtaatatagtgtattatatattagagctaaatttagtaataaatgcattttgaagtttggaaaagtattgtaataaagttgcctttaacttagctttgtacttgttctgtttccttgaggctagacacagtgccatccaggacttattacagtataactgggtaaaataaacaattctctgacaaaaaaaaa

SEQ ID NO: 1152 - DNA, 526 bp, Homo sapiens
  misc_feature (12)..(13): n equals a,t,g, or c
  misc_feature (57)..(57): n equals a,t,g, or c
ttgggaaagctnntacgcctgcaggtaccggtccggaattcccgggtcgacccacgnttccggaaaaagaaatttacacttyggcacragaggaaatgaaaaaaatgtcccagagaagtggaaccctgtggctggcattgttattgcactctgttgtcaccacaggtgtgattggagacattatgtgggcaaagaatatttcagggctctaggccttggagcagtggaattccattatttccagcgaatgagtagttgggcaacttgtgggatgcggaaaacatctttggaaacctcaaatagtaccacaaagaggcaagataatcagaatgatgatagtgaagagcatgatgatggaggatacagaatcacagatgatggcgctgattgtttgcctgggtaagagactacttttgtaatgcatgwtactaaaggrgaatattatattgtactgtactttagatgactattatcamcattctgaaatgtattttataatctaattttagaataagctaaaatatac

SEQ ID NO: 1153 - DNA, 1582 bp, Homo sapiens
ggcacgaggataccactttcggtagagctaggaataacagcaggagtaggaatgagagttagcagccttgcagtttccctatcctattaccaatgcttgtccaaggattttatggaaagcttaggtgacattgcccaaaagtatcatcaccttacaaaatcagatagagtctttggcagtggtggctttgtaaaatagaaggggactggatctcctaaatgctgaagaaggtggcttatgtctttttcctagaggaagaatgctgtttttatgtcaaccaaacaggattagtaagggatgccacccaaaaactagccgattggtaccataagatatgacaacagctgtctgagtcatggggcgcctagtcaaaatgctaatttggggctcacatctccttcctctgggccagtccactattaaattattatacttgccttggcttttggatcatgtttgttaaatcttttaaccagatttatttcttcttgcctagagaccattatgataatgcagcagggccaccagtcagtttcagataatgatgtcaaccccggccaccaagaagtaaccttttctccactagacagagcagggcgagagttctgtaatccccagtaggtagggactgtgccccaagtcagcatgaagtagttatggaagaaagaccatgggtccctctgcctcccagaaagatttatggggatcacatctctcaggggaaaatgaggcaggagaatagggtctggagacagggaacctaaggctgatttgtgctgagtttctaggattgaatgaaaaggaaaaccccacctctccacacccaagtaacaaaaggatcagaggctactccctttgcactgcattgcagataaaaaatggaaagtacctcagattggtcccctcccacaaccaatcatactgggccatgggctactccttcgtttacatagggtgttaaccaagttaaccaatggggaaacctctagcgggtttgttaaacccccaaaaaattctgttaaccagtgctcttgaaactgcttggttggaacctactcccccttgttgaaattttctttcatttcaataaatttgtgctttcatgcttcattcctcgttgctttgtgtgttttgtccaattctttgttcaaaacaccagaacctggatgactcatagtcaagatcctctaccagtaacacttgaactttctggtttgtcctgaacatccctctttcttaaacaaccagtcgttttattctaggccaaaattttaccatacaagaatatttctcatatacaattatcttccttctaacttttcttgccagaaataccttttataactttctttacattgcttttatttaacgattacttttaccttgtttcataagttttaaatagccttgaattagataaaaaattattttcctttaaataagaacacatttctttttttagaaaaatatttttctgtaattttttttttttcttgagacagagtcttgctctgtcacccactgcacttcagcctgggtgaaaagtgagaatctgtctcaaaaaaaaaaaaaaaaaaaaaaa

SEQ ID NO: 1154 - DNA, 268 bp, Homo sapiens
ggcacgagattttctaggaagggacagcaagaatattctgctctgtagttaaaatactggctggcttttgatgtcttcatgcttaattgtgatcactttcttgcactgtgatgtttttacgtgaatatgttgaagtagaagtctaccatattattttataaaatgttttctgtatggcaataaactgaaaacatggatcaacccttcttttgaaaataaactgagtcaatttagccttttaaaaaaaaaaaaaaaaaaaaaaaaaaaa

SEQ ID NO: 1155 - DNA, 755 bp, Homo sapiens
aagctcgaaattaaccctcactaaagggaacaaaagctggagctccaccgcggtggcggccgctctagaactagtggatcccccgggctgcaggaattcggcacgaggagaactgcaggcagatttctgagggcacaccaagccgctgtgaaaatggggataaacacccgggagctgtttctcaacttcactattgtcttgattacggttattcttatgtggctccttgtgaggtcctatcagtactgagaggccatgccatggtcctgggattgactgagatgctccggagctgcctgctctatgccctgagaccccactgctgtcattgtcacaggatgccattctccatccgagggcacctgtgacctgcactcacaatatctgctatgctgtagtgctaggattgattatgtgttctccaaagatgctgctcccaagggctgccaagtgtttgccagggaacggtagatttattccccaactcttaactgaaaatgtgttagacaagccacaaagttaaaattaaactggattcatgatgatgtaggattgttacaagcccctgatctgtctcaccacacatcccttcaacccacacggtctgcaaccaaactctaattcaacctgccagaagaatgttagaggaagtctttgtcagcccttatagctatcatgtgaataaagttaagtcaacttcaaaaacaaaaaaaaaaaaaaaaaaaaaaaaaaaaaaaaaaaaaaaaaaaaaaaaa

SEQ ID NO: 1156 - DNA, 1875 bp, Homo sapiens
ggcacgagtgctaattgaaattatttctacattaaacagacttgtagaatttacttatacatgcttgactttttaattatcttttttctccttttcttaaagatgatacttgttgatgccactgttatcatcctcctagcagaagatagtcctactgagaaaatgagcactttgatcattcagtctttgaactttaacctttgactggaagtgacctataggcaatgaagactacttccttttactgcatttttactcgtgtgcattctgggcgcatgttgatcgctggttcagtccaggcaactgacatgcttttattagtcatacagtattaatgcaggtgtcaggaaatgtcaaatataattccattttttatttttatttttttaagcttttggaaaagctccaggtcctcatgtattgtgcaataacaatgacttccttggcggttttggtacgttcattgccggcaatgggcgttgtaacaggaaaagttttcattaactcctgccattcaatgattaatgcatgatagggcctatgaaatgaacttactggttatagtgggaatataaataaagtgagggatccaacattactttaaaagtcaccccaactgtttatatttggattctatgcactgtgatcctaaggttaacagcatgaattaacatgcgtctttaaaggactgtaatgaaagatcattgcatatttattgaattgtttatatctactgtcaagttgttttgacatggaagattttcaagtaacattggcagagaggtacagtatgttatccctatggtgaaaataaattaatttgttgtatatagttcctcaatctctgaagtaaaggtatgagtaatatagggtatgaatggtttaatcaaggctttattttggaagtaagaaaaatggcagtgatgattaaattgctgcagtccataatttgggcttgttatttgtacattaaagattttttccaagtaagttacactctgttaacttcctgctagccatcagcatgagccctactgcctaaacactatttcatttatttatgtttggaaaccccgtaaacatttttgtttgcaatcttgtttcttttgttataagtcaagtttgaatgttacaatacttttattgaaacttttgttaagttttttcttgtaaattttctttacttgtgagtatcatcttgtcctttaatcctgtaccctaaaataagaaatacatttttgacagaggcttaatgttttaacaaaagagtgtggacatttttattttaaaatttaggcaaaagtcactatcaaatggttgcttatttgtctcatacagccatatagtttttcctggagggttttgttttgttgttgttgaaaagactttgcttacagctagatgaaactttctatagaaaaaaaaattgttgaaaggtccagttctcagtaccatgtgagttaatgatactacaactaagttctttttaaaaagtgattaatgtattttataaattaccttttcacatatgcaaaatctgtttctactacaatgttatttttactaatgccttattgttgcactctttttgaaatatcctgcagtgaatatatgaatcaatttgggcttaaaactgaaagccagttggctgaaaggtttgaaatacgtaccccagtaaaaccattcaatcaataattggtaaataatattttaaaattgtttttaatctgtatagatgacattttgtagctttgtacatgttgttaattaagggcatataattttacactcaaagtataattgctgaactcaggggtgggtagacttcaaaaatatgtctgctatagaaataacttgaaaaaaaaaaaaaaaaaa

SEQ ID NO: 1157 - DNA, 1222 bp, Homo sapiens
ggcacgaggtgaagcagctcgttcagaaatccaagtattagagcacttaaatagtactgatcccaatagtgtcttccgatgtgtccagatgctagaatggtttgatcatcatggtcatgtttgtattgtgtttgaactactgggacttagtacttacgatttcattaaagaaaacagctttctgccatttcaaattgaccacatcaggcagatggcgtatcagatctgccagtcaataaattttttacatcataataaattaacccatacagatctgaagcctgaaaatattttgtttgtgaagtctgactatgtagtcaaatataattctaaaatgaaacgtgatgaacgcacactgaaaaacacagatatcaaagttgttgactttggaagtgcaacgtatgatgatgaacatcacagtactttggtgtctacccggcactacagagctcccgaggtcattttggctttaggttggtctcagccttgtgatgtttggagcataggttgcattcttattgaatattaccttggtttcacagtctttcagactcatgatagtaaagagcacctggcaatgatggaacgaatattaggacccataccacaacacatgattcagaaaacaagaaaacgcaagtattttcaccataaccagctagattgggatgaacacagttctgctggtagatatgttaggagacgctgcaaaccgttgaaggaatttatgctttgtcatgatgaagaacatgagaaactgtttgacctggttcgaagaatgttagaatatgatccaactcaaagaattaccttggatgaagcattgcagcatcctttctttgacttattaaaaaagaaatgaaatgggaatcagtggtcttactatatacttctctagaagagattacttaagactgtgtcagtcaactaaacattctaatatttttgtaaacattaaattattttgtacagttaagtgtaaatattgtatgttttgtatcaatagcataattaacttgttaagcaagtatggtcttgataatgcattagaaaaattaaaattaatttttctttttgaaattaccatttttaaatacctttgaaatatacctttgtgtccagtgataaatgtgattgatcttgccttttgtacatggaggtcacctctgaagtgattttttttgagtaaaaggaaatcttgactaaaaaaaaaaaaaaaaaa

SEQ ID NO: 1158 - DNA, 2048 bp, Homo sapiens
ggcacgagtgcatatctctcttcctttttatatttaatttgaccatttgccatgcccactatttgagtgggtgtggacggggaggttgggaataaggaagagatggaagaggagactaatagaagatgtgcttttcattcagatttgtttctcttttccttcattcattccagaaacttttattaactctactgtgtgcaagatactgtaccaggctagctgggaagacaaaacaccttaggcatgcccttaccctcctggggtccttgcactgtctggggaggcaggattctggttgtctaatgtctaatgtggtaagcgctgtgaatgtatgcaggttatgggaagggaggatttgtctggggaagggcaggagggcatcctttggtctaaaggggaagttggaatgaattattcaagtggagaggccagggtagtagtgttagaggcaaatgaaagagcatgcttgaccagagaggatagagcctgtgtgcttagagctgtcagcgttttggccattgtgccaagatcagtggaaagacattgcagattttaaaaatcaatgaaatattttatacattataaaatacatgtaagatgtaaaatggtatattgaacacacatattcaccatctagcttaagaaatgaaacattacctataccattagcgtcccctgcttaccctttctagtcttatcgttcttctctctgcttttttttcttcctcgcttcttcccaggagtaaccactagcctgaattttctatttatatattttttgcttttctttctatttttactacatatgtatgcatccctaagtcatgcatagttttgcatgattttgacctttgggtagtaagaatcagcatggatgaatctcacataatgttgagcgaagatgctaagttggagctacatatagtgtgaaaccactgaaaggctttgcacaggggagtgacatttaatttgtattttctaaagattactttttatgcagtgtggataatggattggaggtaaacaaaaatggatggggagagcagttagaaggatgttataatctaagtggtaacttatggttgatggttgtaacctcttaagagaaatcatagacaaattcttagccatagccctttaggatcttatccctcccagctattcaaccttgctcttccctgaatctggcaagcttgttccctgttaaggtctttccctgttctctgtaacctgagcctttcatctcgggtctgcagagttcagtctttaactgcactcaagtctctgcacagagaggtctttcctggccattttgttgagaagtgaccccctgcccttgtcattattttctgttctccttactctgctttttcttgtagtttttaaaaaaattgcaacttgaaattatacatttatttatagcatgtttgctgctgctaaaatataagatccatgggggctggtcttatctaaaattgtaacctcctttccccccgtgcgtagtacatagtaggtgctcaataaatatttgttgaatagatgagtgaattgattgaagttgggataatggaattcattcttcccttttcagctgtttctcaaacatctctctggctgtgaacttttttcagagcttgaggttaatgcccaaaccctgtcttgctgtcacctcaaactcagtatatataaaattacattattttccttcctccagtctttcacttttgttaatgctgccatcactgacagtcctcaggcacaaaaccttggtgttatcttgcagtgttcactacccccgatccctagggtgctgtatattcccatttatgtgtttgaggaagttttctggttactgtttcacctctgctttttgcctattgacattttagccagccctcagggccctgcctcagtctttctcttctgagcacgaagctgaatttccatccaagcaccccttttgtacttatgtttatagtttgttttgttttgtttttgagaccctgtccccaaaaaaattaaaattgagaaaaaaaaaaaaaaaaaaa

SEQ ID NO: 1159 - DNA, 1746 bp, Homo sapiens
ggcatcagtaaggtctgtatttaaatgtggatgtagacatcataattaccaagacaagaaattgttttgagaaattctctgatgtttttcttcttcaggtttcacgtgccacgatcatggtgccacggtactgcagtatgcacccaaacagcaactcctaatctcggggggtaggaaaagacacgtctgcatttttgacatcargcaaaggcagctcattcacacgttccaggcccatgactcagctattaaggctctggccttggatccctatgaggaatattttaccacaggttcagcagaaggtaacataaaggtttggagattgacaggccatggcctaattcattcatttaaaagtgaacatgctaagcagtccatatttcgaaacattggggctggagtcatgcagattgacatcatccagggcaatcggctcttctcctgtggtgcagatggcacgctgaaaaccagggttttgcccaatgcttttaacatccctaacagaattcttgacattctataaagattggggttttatttttatatacatttcagttaaaaggcacactacagtcatcactaggcaattctgctttctaagcagttgtattgaaaacagagaatctctgtgtagaatttgaatatgacccaagctgagtattatctaaacaggttggtggaatgaatgcgcatgtaccttattatgctgacatactaaaaaaaataaaacctagtattgtatgaaggatagctattctttacagcatttagcaaacctgattcagaaaacatttgagattagcaaattagtaacttgaaataatgaaaaggacgtttataccaaattaaggaagaaaatgttgctgatttgggtttttcttcctgttcttaccactgactgaagcatgcctgcagtctcctcctctgttgaatgaaggataatcataaggtgtttgttaggagcgctagaccacctggaaaactttcttagctgtggagcagtgcgcagtgaccagttctctgctgtgagaggccgtttccattctttcctgctgaatatttttcctgttagtgtttatactgagctagtactgtaacttgcaaatgagtgcaaatttaaatgcaatgttttactcacaatttgcacattcacattttttggactgctagtttttctatttaaatatttgccttcatgttaggaatgtactatgtgaacatgacatatttgtagttaaccaaacacaccttcttagtccagtttagtactttttcttttcgtgtattcaaggttaaacacccaaacatttaaggatatgttgaaactacaccaatagagcatttcatatcataattaaaatgaatgttaggcttcttgtggccagttaatagttgatgagattggtgacattatttattgccacagcctattgtataaactatgcagagttaaatatttgcttgtaaaatattagccaatgttgtcattattttgatgtatttccttggttatgaccaaaaatatgttgagatactgaaactaatgtctgtgtgtttaaatgtttaccagcaaattgtcttatcatgttaatgagaatgttcaatgcctgtgtggtaaatagtaaatacaatggcataaaagtaactttctctgaagatgtgatgttcaggctgtgaaatatatatgtaaaagaaaaataaatgttatttgttagaaaaaaaaaaaaaaaaaaaaaactcgta

SEQ ID NO: 1160 - DNA, 516 bp, Homo sapiens
  misc_feature (426)..(426): n equals a,t,g, or c
  misc_feature (443)..(443): n equals a,t,g, or c
acgaggtttcaccctgttggccaggctggtctcaaactcctgacctcaggtgatctgcctgcctcggcctcccagagtgctgggattacggtcatgagccatggcgcatggcctatacagtattcttattggcttaggtcttttaactgggttattactgcttcataattggtctccctgcttccagtttcttccatccatatcttccaacctgaccccaaaagtaattctttcctctttaaaaaaaaaaaaaaaaaactcgagggggggcccggtacccaattcgccctatagtgagtcgtattacaattcactggccgtcgttttacaacgtcgtgactgggaaaaccctggcgttacccaacttaatcgccttgcagcacatccccctttcgccagctggcgtaatagcgaagaggcccgcancgatcgcccttcccaanagttgcgcacctgaatggcgaatggcaaattgtaagcgttaatattttgttaaaattcgcgttaaatttttgt

SEQ ID NO: 1161 - DNA, 1671 bp, Homo sapiens
ttttttttttttttttttttttttttaaatgataataattgatttattttcatcttattccttgagaattttcacagcttattttttccagatcaagttgtgatacctatttgtatgcacaaatcaaacaaaaatccataccaacttcccagtgaggtctttcagatgctataggattaattttctttcttacctcaccacataaatatgctcaaaacatctctctgttttcatgaaatatcgtcatcatcatcttagttccattacaaattatggtgctgcattagccacaaagctattcatggggtattggttgtgattctaacttcttttcaaagaactatatactatacatattgtatggtgcttttgagaattcacgattttggtgtttcacatctagtggtgttattacatttttcccctggtaattccacccacctaaatggaatatattttgccactctgtgtatacctagtatgtaacttgttcagtaagttcagatatatgcacttaactgggggattctaagctacttccccaataaaaaccaatattttctttccctctcctttatgagttataaaacactttccctccccttcttcttttatttagtttatatgccagagatttttctgctctagggatgaaaatggaagaccagggaagaaagttgatgaaatagagatgattcaaagatcggaaatattttatcctcactcgatataaagtaaattattttttctcttttccaataaccatcatttcccttgatcttggaatcattcaaaacctagccactgagtcctgtacaaactaatgtgctgtctcaagatgagaagaaacatgaaatattggtagctgtacagattgtactagtctgattatatttacagttatgagataccgcaaatttaagaatgccaattttttctcatcactgagtatttattatatataacaaatacatgggacaggaaaaactatattgtgtgatataaatagtttatttacattacagaaaaaacatcaagacaatgtatactatttcaaatatatccatacataatcaaatatagctgtagtacatgttttcattggtgtagattaccacaaatgcaaggcaacatgtgtagatctcttgtcttattcttttgtctataatactgtattgtgtagtccaagctctcggtagtccagcccactgtgaaacatgctccctttagaattaacctcgtggacgctcttgttgtattgtctgaactgtagtgccctgtattttgcttctgtctgtgaattctgttgcttctggggcatttccttgtgatgcagaggaccaccacacagatgacagcaatctgaattgttccaatcacagctgcgattaagacatactgaaatcgtacaggaccgggaacaacgtatagaacactgtagtcctttttttcacagtgttgtccagtataaccagcatcacacctgcaagatggctcctgcatattgatagaatgctcacccttcccatgcatgcagaagccattgtaatgttccggacaaggtatgtggtgttctctggcactttcttctaatttgttagcattctctgcataatctgttcttgcataatgcccatcttcagacttagtagttgtagttgtgctcgtgcc

SEQ ID NO: 1162 - DNA, 1356 bp, Homo sapiens
  misc_feature (682)..(682): n equals a,t,g, or c
tttcaagctgaaaatcatggcacaacccacaaaacaactaacctttttctccactagaaggcactgttgtttcatgcaatgtgagaacacagccaggggagaaacatcaatgcaatctttatttttttatttttattttttttgagacagagtgagaccctgtctcaaacaaaaacaaaaacaaaactacaagagttatatatacatacatatttacacatagacacacatacatgtatacatgcatatgcacacagacgtacatgtgtatatctaaaatgatcttcaggaatgcacagcagaccattagggtagccacctcttgtgggaagaggggtggcagatcttcatatttttattctagattttcataatcatgtacaaatttaaaattaattttttgttgacaaaaccaggcagtaaggagaggcctacatagggttgcatttggtaggcttctcttcacatactcttctttctcattccctgtgtatctgacacatcctttcagaggggcctgactgtggagtgatgtttcttcactgcctgctcatctcctgtgactttcttgcgttcccttctgagccttaccaccttcgtgggatgggtgtccctggctgaaggtgtacctctgccatgttcccctcctccagtaccttggaaagtcccggtgtgtcctgancagcatgtctccgaggggactgtctggaactctcatccccacaataggaagggtttttcagtcatgggggaacactgcgttcctgtctgacctcctggggttcctcatttacgtggtcagtgagctgttgagaggcttcaggaagtcaggagtgaggaggcctgcctagctctgtgaatgcagctttcctaagtttctctggccgtggaaccactttcccagaatgcctgttgacatcttcgtgctccaccaagatgttgggaagtgcggctctttccctggttcccacttggactttctccttaaatctttgcagccctgggatttccagctggttccatgcccatccatagcccacatagcctctcagtctgccttggccccttctcctacctcggccctcaacccattcaaacaacagacctggtcacctctgaaatttggtgttaactccagggattgattgctcactggggagcaggggctagatccagcccacagtggtgcttgacggggtcacccatgtttaaaaacacaacttgagccaatattgggctcttggaagatacttagagatctggtttcttattccataatccatgtgcctgtgaaaatgggaaaaagaaactttgacagggatagccatatgtttcaggaaaaaaaaaaaaaaaaaa

SEQ ID NO: 1163 - DNA, 880 bp, Homo sapiens
gtttcaacagaagtaaaaatgatcctcctgatcatcccatcctttcgtctctctccattctcttcttctaccatcaaggaaccattgtgaaagggtcatttttaatctctgtggtggggattccgagaatcattgtcatgtacatgcaaaacgcactgaaagaacagcatggtgcattgtccaggtacctgttccgatgctgctactgctgtttctggtgtcttgacaaatacctgctccatctcaaccagaatgcatatactacaactgctattaatgggacagatttctgtacatcagcaaaagatgcattcaaaatcttgtccaagaactcaagtcactttacatctattaactgctttggagacttcataatttttctaggaaaggtgttagtggtgtgtttcactgtttttggaggactcatggcttttaactacaatcgggcattccaggtgtgggcagtccctctgttattggtagctttttttgcctacttagtagcccatagttttttatctgtgtttgaaactgtgctggatgcacttttcctgtgttttgctgttgatctggaaacaaatgatggatcgtcagaaaagccctactttatggatcaagaatttctgagtttcgtaaaaaggagcaacaaattaaacaatgcaagggcacagcaggacaagcactcattaaggaatgaggagggaacagaactccaggccattgtgagatagatacccatttaggtatctgtacctggaaaacatttccttctaagagccatttacagaatagaagatgagaccactagagaaaagttagtgaatttttttttaaaagacctaataaaccctattcttcctcaaaaaaaaaaaaaaaaaaa

SEQ ID NO: 1164 - DNA, 1003 bp, Homo sapiens
ggcacgagaaaaacacccagaatactatcagtttccttggtcttgtgaatgttttgatcagcagcaaaatgtcattctgtttccagctgttgctaggtgttgcaatgtctcagcctcagtctctgatttctccggtttccataactaactgcctacacttaaaagcgtttctttacctactcattttccctcaggcctttccatttttatcttgtatttttccactcttttggcagacctgcatgggcaaggacgtaacccttcacgtctcagcaagcaaccccgctatgctactgtaccagaagtttggattcaagactgaagaatatgtattagatttctatgataaatattacccattggagagtacagagtgtaaacacgcattctttctgaggctccggcgctgatgcgaatacagctcacagagaaacgcatgtgctattggagaacaggtctttgtggagatctaaaggcagtgattgatttcacagggagctctaatctctgtgattacatggtccttcaaactcccaaccaaagtgagaaaagcggcatgcagtgaaatgagcagtgagcagccctttagcaaaatcgccctccagtccttcctggagatgccttcagccagcatcccagactccacagttatttatgaatgatgtcgtgattctccctccacctgacagtttgtaagagtgaaagagcatctaacctgatgctcttggagagagataacctgtctgtcataacttaaaggatgagaaaatgtggtgtagctattaaagattcatgcagtcccaaaaggcactgtcctgggatgatgagagattataaggtgatttcataaaaggaatccaaccctgtgcccggccattgatgtgttgtcattgaatccaggaggatttctagggcactgaagttttgttgtttcttttgctgactttggttacagtcagaaaaaataaactagatgtttgtgtctaaaaaaaaaaaaaaaaaa

SEQ ID NO: 1165 - DNA, 1061 bp, Homo sapiens
  misc_feature (1056)..(1056): n equals a,t,g, or c
ccagatttgtagaaaattgtaattttctcagtatctaaaactattttgctttccattaagtttctatttgctattttctcagaattttacaattaaagataaatcacaaactgtttgtttttcttaaagttctttgagaaaatgtctaattatacaatccttggacaatactgtgtttttttggtgctgtgttttttaagaagtcctacttactggaattttgactatttggatatttttgtttttaaaaggggaggggaatttgcttaatacttctaaagatgtgaattgataattgatattaaaatagaattactctcaactcaccagaattaaattttatatctgcatatttaacactattagctcatataaattataagaaaaattttcaaaggatctggttttaattttttggatatgaaatgaatttgccttttctgccttttcttaagtactattttgtaactatattgcactaactatatccaaaacacattctgagcatcactgtgagtaacagccttccagtttgtacccttttgattcacagcatggccctatagttaattaagaggtggataacttaagctcacaactgcctttaatttgatttcacatccacagttataaactttgcatttaaaaggaaaatgagacatttaaataggttcctgttgtttcacatataattggtaaaaacatattcccttgtaggatcctattatcagagcatcaaataccaaagtcagcaacttgggttgscaaataaattaggctcattaattattttgaaaagggctgctgtttccatgtaaatgataattttctttttcatggacaaggttatggtacttatctactaaaagaaacatgcataaacatagtttttatctttaacttcagtattaaaatatgcagttttttgcaaagaggaaaaacatctggtcaattacgctgaactctgactacatgtgggccagtaataatatgaattggacttaagaataaaccttgkgkttaatctctttttttccttaaaattttaatgggagntttct

SEQ ID NO: 1166 - DNA, 1080 bp, Homo sapiens
ggcacgagcttttattgagaaaaggggaagtaggatttagtctactgcgtatttccctgctctctacagataccttatcgctcccgtgaagtgctggcttcatgcattcctatcacaaggcaatcactcagggtaaacgatgatgctgcatgtcttttgtgccacctctacatttctctaaaccatattaaaattgaaaccaaaagcacagataaaagcaatgaaaatatgaattcacttttccatgtgctggtctcacctagtgcttctacttaaatttttaatttatgggaaatatacttcaatctataatttttttgtaattttgaaatgagcgatatgaatttttattgcattattgaatggcccttgtttacctatcctttataccttatttataaagtgcatcctttataaaggatgaagtgtatatagtgcataaaagatatactttataaaatatatcctttatgcactatatgcctccatagtatcaggtatatatttcattaggagatgcatacatatttatatactgcaatccaggccattatactgatataggagagaagaggtcatctatgtcagaattgttttcctaacattctctaaatttccctagcttataaattacttccttgcatttcaaaaaagatgcttttggtttttgtagataatatgggtcacaccagttctgctgagccccagttgcatttacttctctaagacctagattatatggtttaccatagtgatatttttcattgactcaaaaatataagagattatttactcctaaatatatcgtaagatgttagcttcaatttagaaaactttatttgcttatatccttattgttccaccttattacttggccaaaactatggaaatcagtcatatctcattcccaagattaaaaattttaggaaacctgactgggcaccgtggctcatgcctgtaattccaccactttgggaggccgaggcaggcagattgcttgaggccaggagtttgagaccagcctggataacatggtgaaaccctgtgtctacaaaaaataccaaaaaaaaaaaaaaaaaa

SEQ ID NO: 1167 - DNA, 464 bp, Homo sapiens
cggcacggaggcaattcttgggcaaggactgactctccaagggtttgttcttggctttggacacctgagaaccccctctcccctcccccaatacaaggtttttgacatgagtgtactcctgcttagttcctcttgtggggctgcatttgcggtgctttgccctccccactgtgagtgaggggccaagggatctcctcaatcctgtctccccagcggctctgtttcctccttctttccttggcctctgtcctttgctgacttcctcttccttacccagcagaactcaccctggggtcggggcagtggggaggggcctatccactgctcttcctagtccttggcagctggcctaggtgggcagactataggagggactggttaggagtctgcattgctttgacttccctctccttggttaataaacacaaatgcttgtttctcaaaaaaaaaaaaaaaaaaaaaaa

SEQ ID NO: 1168 - DNA, 1708 bp, Homo sapiens
ggcacgagctattccatccaagggaagcagaactgccaaagactcaagtcttttcatatttatttcccatcctgcgtggctttcccatcagaagcgatgagccagcctgcagagccaagcctgatgccagcatggtaggaggccacccctgaccacggctcagtacttgccacctgctggcctgtctgaccctcagggtgaagcaggactgaggagtggccagctctggatagctggctgtggagaggaagcctccatgggctgctttggtctgtgggctccttcattcccttggtgataatttccctttattctgtgggatttttggtggggttttccccccttttttatggagttggccaataggattgagttggggctccagtagagaaggcagggttggtggtgggtgggggcagcctgtatcagacaaaggtaaatcagccagccaggcacccacagcctcagctcctgtgcagttcctgggcagcacagtggaagtgggagcctggtccttcccctgcccatggagagctctttaagggatcccagcctgcccctccacttctctcccaagccaggtcccggcatgggtgggttatgctcatgctggcaatacttgaaacgggtttattaatgctgggtattttgcacaattttatagacctcttttctacatagtcttttttaaatggaaggagaaaatgtcagccacattactgtctgtgtagtgccaggtgaagggttatcagaaggctggttggttttaataagtttattccaagagaccttctggctggaatgagtgagagtgtgtgtgcatgtgtgtgtgtgttcatgtgtgccctgtatgaatgtggctggctcccatatcccctgggctgccccctgccccatcccctttgagtgtcagaagcactctgagccaaggggacagggggcacgtgcactggtcacgagaaaaccctgggctccactggggctcagcccagcctcctatctttccttcttctatggacttcagacagccagtgtctggggactctgccactctacccccagccctacccaccagcccccaggtgaggcttccagctgggacctgcccagacaggctgagcctgggcgtggtgggtggggtgatggctctggggagcggctgccatcctacaagccacaccccctcctctgagctctgaatatgggacccagtgccaggagctggaagacaaggtgtttctgccaaacggggacctccatccagagaaaaggaagaaggtgcagggtgggccaagaggcaagtgaaggttggcctgagtctgggccggaaactcagaggatgtttctcctctgctgggagctgtagtttcttatcaaaatagatattgttccaccatccccctccttggcccttcaagtgggctgaagcccttggaaagtgacataggaagtccccagatcttgcccttctcactccagaggctagtggtcacagacagctgggaatggcagccacagagggtcccctctgggagaaacagcttcaccccagcctcagggccctgggccatcactgcagtggccctgggaggtgaggaagaagctggctagaggagggggctcccacctaccttttatttaagccagtattctttgttcctgcttgtaataaaacttcagtttataagaaaaaaaaaaaaaaaaaaaa

SEQ ID NO: 1169 - DNA, 603 bp, Homo sapiens
ggcacgagaacaaccagaatggatggtgtgtatttgttatatttagaatgttgatgcttcttaccctcttctcttccttgggaatgtttgggactggtggtttagggggaagagtattctgtccccacacccacactgattcagaatatctcattcatgttgtggacagtcccataacagtgcagtgggggaggggccccaggttttttcccttcctttccccatttatctcctgtggccagaggctccagccaacaatagcactcagggttcccagttctgcattctccaaatatggcctcacatagcccccggcctcctacaggcaaagaaagggaggttctatgcagccaaagacattgagtcacttaaagaggtttccctagaaggcctacacttcctctttctgccccctccccattttgctcagtctggatctgggaacaccggctatctgctaggccctaatatagttaaccttttccatgggtcactgttgaatacttggcagaataatgatctcacccactgatagatgagtttcccccattcttctggcctccgccacatgatcaggaagctggacttgctcttatccaacca

SEQ ID NO: 1170 - DNA, 1415 bp, Homo sapiens
  misc_feature (1085)..(1085): n equals a,t,g, or c
  misc_feature (1196)..(1196): n equals a,t,g, or c
  misc_feature (1337)..(1337): n equals a,t,g, or c
gctcgtgccgcatgtattttcaggctttttctgtgcttcattttggacggtttctatggctttgtcttcaagtttattaatctttaattccggcatttctgatatattcttagttctactcatatttttcctcttcatttatttttcatccgtcatgagatgaaaattttgatttatgtttgtttattgtccacatctckatttaatatattcaggcattcttctacttcttgaacatatagtttacagttgcaataactattttaatatctttgcttactaattccatcatctgtatcatttcctggcttgtttctattgctacatttttttcctcataatgggtcacattgttctgtttattacatgcctagtttttttcactggattccaggcatggtggattttaccttgtgttctggatatcattgtatttttagaaatattcttgagctttattctgggacacttaagttatttggagatagtgtaatcctttcaagtctttttatgcttagttgggtgggaacagaacaaacttaactagggctaatgttgcccatctactgagtcaataatcttatgattattctactcgatgtcttgtgaagtatgtttccttcttagatgaaacataagttattcctgctactgtgtgagcccttgggattgttccctctgcccattttagttacttatttttctgctttaggtacattcctcacaaagcacgtgctgatactttcagtaaaaccttgagggaaccctctgcagatctactcctgtctgtctctttgcagttctcttctcccggtattctactaggcaaattctaacaagcatggccttcaactttgtttcctcaactcagggagattgccagcttccacctgggtttcttatccctctgctccgtggaagctgttaagtggggagctattgaagaaggacttacaatgkttgkttcccgtctctcarggattactgkcctatgctggccaatgtctaatgtgtaaagaccattgatttacatgcttttctgkttattaattatttcargcagtgggtaaatgkattcctattanttcaccttgctcaaaaccctgsctactcgkttttaaagkttaagctcaagcattaaatcctytccaaagkgkttcatattccattttctattcaggaakgattkgtttgcnaagaccacaagctctttcaaaaaagctgtaattggccaggtgtggtgctcacgcctgtaatcccattcagcactttgggaggccggggcaggaagattgcttgaggcaagattgcttgaggagtctctaactcctcaagcnggagttagagaccaggctgggcaacataccaagacctcatctttgttaaaaattgaaaaaaaaaaaaaaaaactcgag

SEQ ID NO: 1171 - DNA, 780 bp, Homo sapiens
tatacacatgggggtggaaaggccaggcctgcccccatctcgttggtgtggctctgcgtatactacacactcattctcctgctcctcttttcccttagtcagtgtcctttcatcctgattcagctctgccttgcatcaccctcagcctaagggagtgggaaggaaatggggtgttttcttgctgacctgaggctatagggtcacttgccatttcctaccttctctgggggatttgagggtagaggcaggggaagatctgttgttgcagttgcttctgcccccttgatccaaatgaccatcatctctgatggagatgggttgggtacctggccttcatggcaccttcactgctagggatgctcaaggggcaggcctggggcccttccctcctgtctcttctcggtctttcctctctgagcagcctcctacctcccctgcctgagccctcactccacagccctcccaggtacctagcagaggctgtcagtccttggctcacctggaacagggctggggctgggttggaacaggtgtgtgcccccaccacagctctatgactctgttctccctccctgccattgtggactcttgtatttgagggacctcaagagagtgaggaccctaccatccactgtccatattcagtcccagccccagtgcgcttcctctgttccctccctcagccatccaattcttgagttttctcactgattggttttctttctttttccttggattaaatgtgaaagcaaaaaaaaaaaaaaaaaaaaaaaaaaaaaa

SEQ ID NO: 1172 - DNA, 3334 bp, Homo sapiens
ggcacgagcacacacgcccacacgtgcttacacacacaccttaactttttttgcacagaagttgtgttgttcctggtcagtgtataacattttttgcaactttttgagtcactctggaagacatattcacattcatgtggcttaaacttactccttgaaagtcttggaggaaaatgcttaaaataaaacaaatttgagtttgcgacatgggccccttatttaactgcggaacaaatggttgttattttaattaccttttgtttcattgtattttaactcatgaaatgcaagtgttactgctactggtaggctttttccagatggaactaagcctatttattcttaaaaacatgaaaatttagagccatgtggccctctgataggtatgaccaatttatcatgtaaatttctttaaaacatattaaagttaagtggatacttagaagcaaggtttaattttaactctgtagtttctggggaagcttgaggaatctgcttacattatatatttgaacacagtggataaggtctgaaaaataagacttcctagaaatgttttagcaaggcttacataactaatacaatataaatttagaattgaaatattttgtgtatgatatcaactgaatttaatcatgtgtctctttagggttctattggagcacctggaattccagggatgaatgggcaaaaggtgagttctatagaatattgtattttaaaaataatttggtgagcattgaaatcacaaaattattctagtccataatgttagtaataagcttatatgcttataaaaacactatgttttgaaatacaggaaaattgtgctacaaattaccaaattagtttaatttttaaagatgcattaaatagtcaggaatcttgaagatttccatttcaagtattttggatgtgttgcttttcataaattatgttgtgatacactatatcctcccataaataatatgaattgggaaaatttatgtttaacattgatagtgataaacaaaatgcactttagtttattctggtcatggtaaaactaatatgtattaataattggctaacaaaagttattctcatagaaggaactagtcaaactttctgaatccagaaggtagctcttttcactgttaatcaaaagtagaagttaaatagatttgtcccgctttggtattacatacacttttattgtactgttaataatgagaggaaaaagtaaagtgaaagaaacaacacagtctacatacacatatctatgtgttgtgtacatttactcctgcaacatacttactagttgaacaaagcatagctcctcaacatccctgaccggccctttagtctggaaccttcacagaaaccaggaaagccactgtggcagctgacaaagcccattgctgagccggtttgtcaggagccaggaagctgagcgagggactttcctgtcttccccagagttcttggcctggcccttttatactctgcgacccattatcttgccttcccagagtattttaaatccatgcaccctggaccaaattctgaaatcatacgtaactcaaccctttcaggtgcaataaatactccttgtgtccttttccattgagtccatcttttctttctatcaataagacataaacaaccacaattttaaacctagtaagttgctaagagcatgagtcttccactcagaggctgtgtgaattttggcaaagtccttggaattctctggcctcagtttctcatctgtaaagggagacaatggcagtgcctacctaatagagtcaatgagagttaagggagtaaatagatgtaaagcccttagacagtatttgatattaccattaaacttttccttcacttcagttaagtgaaattccaaaaattcagttaatctatgtttttaagaggctctgtgttcccagaagtactcaattaccccatgaaattaatgttctcagccaaagcttatggtgtcctttagtccataaaccaaacaccgcacactcgccagcagttaaccgcccatgtcgcagctacattttccacttagtaaaatgcatatccatttgcttcacaaatcctggcaaagacagaatatttagaatattctgtttagaatattgcagatcatggagggaaacctaagcaaaaatttaaaagtgtattcattctcagatggatttgaaaattatataactcaagataacatttagaaagaacaaaatacagatatggcataaatgttgtttttgacattggtgagaaacaaaacttgtatgcctaagattaataatgttttcctttttcgtctttgtttcttttcatttttcagctttgacacaatcatgaaatttatagaaacttttaacatgaaacaaaacaactttaaaactgtcacatacactctttcaaagactgcatattctttatttttgcaaaggaaatatgcaatttccttagcaagagaaaggaatgtgacattttcttgtcctagtcaccaagtttaaattatatttcaaggaaatagttaatatttgcagttttatgtctcgttatacatctttgtggcattttagaagtgttttctgtaaaacccagggaaacgaaatgatttcacacttttatgaaggtatcagcaaaatgtaatttaaatttgttttccctccttcagagaattgaacctaaagctttgtgtatggaacttctgttaggtctagtaattacttaacatttgtaatatttgctatatcatttttaggaaaagaaagtgtaaaaaacacgagtctccttcactgaaacagcaggtcacttagagagtaaaaacaaagttggcaatagagtaataattttacatacttagagcacatgaaatgaactctagaatttgtttttaaacaaatttcttgaactctagactttgtttttctggaatcttgaactctagaatttgtttttctaagaaaggagcttacaatgacataataattttgttttagtaagagcacctcaatatccttaaactgtcttgagaaaacattttcttctccattacaattttgctttttccaaaagattacttttgatgcttagaaaagttttcagacagtggttaggggaggatataatttctaagccatcagaaatatggcaaataatatccagctacttggggtgggggcgctcaggcagaaggattgcttgagtccagcttgggcaccatagtgagatcctatcctatctcttaaaaagaaaaaagtaagaaatatggcaaataaaaactagggaataaaaaattattttcttatgtttgaaaaaaaaaaaaaaaaaa

SEQ ID NO: 1173 - DNA, 918 bp, Homo sapiens
  misc_feature (4)..(4): n equals a,t,g, or c
  misc_feature (886)..(886): n equals a,t,g, or c
cggnacgagaagacattttagtctttgaggttcatcccattctgttttaattttttcgagacaaaaaatgaccaatctcttatttgcgtattcaagcattcttaataagtcactaaaactctgatttttcataactctccttttattaaaaaccttggggaagagaacaaaacattccacattgaccttagtgagttgttcctaggtaggcatgatgaaaatgcaaaactgaaccccaaatctagccaactgaaagacattgatttttctagaacagcaccttccaaacaccagtctgtggaccagtcactgcttgcccaagacaaagttctcaccagcgtgaggtaaaatgaggaaaataacagcaatgtgtctaaattcattcaacctaaagacttcctttcattctttattgttgtccttcctatttctttgattatttgaacatctttacttctataaaaggaagttgccagcagatggtagttgttctctttaaacgtttctacttagtgaagttaacatttaacacacacctatgttggtcctcccacacccactttatttttttctcatccgtgaaaactagatatctagaaactactgctaggctaagggatagcttctgctatccaagacccccagattttccaaggttcctggccttggagcctttatattttataaaggaaatattttttaatcacattcacatctttaacttttgttttgaacatgtgaaatacaaccttttctggataactctatcatgatcaataatcaatggcattggattagaatacagtgaatctgctggagggcaaatatcatagggcagttttccagaaccagaatcgcccccgggccaccattcttttagcaattngattctgtctccttaaaaaaaaaaaaaaaaaa

SEQ ID NO: 1174 - DNA, 3193 bp, Homo sapiens
ttggcacgagaaatgtcctttccccatagttgtcctatgcctttgggctttagtctatcccaggactaactgtggagaaatcattggtttgagagtcaagagagcattggtttgggagctttaatcctctttctgcttcacactaagtgtgtcatcttggctaaatcacttggtctttctgcattttgttttcttatttataggatgaggaaattagattaaatggttttgaggtcctttcttgttctgatatgtccagtactcactggaaaattggatctataactgatgggtttagtaatctgctcatttcttgctctgaaaattgtagtcagcaaaagagatcatggaagaaatcactgtaatggtagtaatagtaacacatgcsatttgtattgtgccttaggtttaccaggtgtttccaaatacattagcatatttsatatgtgcaggactagataccttgggacctgccacactccactttcaagatatgtattagcttcattagaattaaagggacttgaactcaggacctgcagcctattctttatccacatgtctctggtagggctacatccagatcacaccatgacttcttatagagcaagagaaaataatattattatatcttcctttgcctaaaatctctccacttattcttttttatgattctgcaccagttcactgggttattctatgattccatatttttttttaaaaaaatcatatttaaaatgaacttacaatgtctgaattttcctggccttgagtcacagaagtaatatgtttcagatggctgcccaatatgtattatcatgtaatacatatctgtgtccttttctgggatgaggaaggcttcaacttctggcactgagaactttgtattacagacacaggtttagtttctagcttagtcatgcctttagagtttagtagcacaaatccatgcaacccaacagaatacatggtgagggcctagtatgtagaatttgaaagtagttcaaatttgaattagaagaatgaagctaggacttatttggaaaaggagatagaaaaaaaatgatcagaaactgtggggccttattacctttgcagtaagttatcttcttcatgatatatgtgaattattttatgtgcagattgtgttttgggattgtcagatctaaacttatattcttgctggctaatgtgctgatagccaggtctgaaacttgatgtgctatccagacacatatgatcagaaaagatctagagtgcaaagaggtgtctgaggagcaaaatgtggttttaatgttgtggaaagatcacttgcaagtatataagactgtataaagaagaggactgtgtgcaagtggggtgaaaaaaaaggatacgcgaatgtgcatatgactgaatagggaggaaggtcagggctagaaaggaggctacataaaaaggggcaatggagagtgcacaggaaagacacaggggaaggtcaagtcgagcaaggtagaaacaggagtagctagagccattgggaatccattttgaaacaagaaggagttttgaaagggaataggaaagtaagtgtcttgaagtaaaagataaatatggatggagaaagaagaaattctggatgatagagatgataaaaatatttattaagaaatgaagtcaggttcagtgtatgaaatggaaaggaatttttcagaattttaagaaaggggaagttcctcttggaaaagatatagcaaccattggggaatgaccttttcatttcagaagtggatgaggaaggtggtgtgagcatcaggtatattctggaccatttcaagtgctggtgagaagaaaggaactctttgcctgaactgggcttggttttccaagtgctgctttggaaatgaagacccagagatgcagagcttatggtagttcataaatcttcatgttctattatctttcatctgccaataaagttcattttcaataatgtccaccattgctgtgcccagaataaccacaggcaaacatcaaaacaatacgcataagttagacaagattaaatcttgtctgatatctgcacaaacagatatgcaccatgttggaaacatgtgttttcctagtcccatccaggcttcccacaagaaagccatgatgtgggtctaaaccatatgttttgagtaaaggagaatagaagaaggggagtgtccgcaaaatggaaagagatgaagatgttccaaggaaatatgctgaaacagaacagtgaatgttttgcccaaaactacaaaaataaaagaaaaaaagaaaattgcaatacatggctactaagtctttgatcataagtcgaatttatagacctggaatttgccatcctagtctttcctttttagtaagacttctgtcctctggcagtgcatatggtaggtctctaatgtttctgcatctccaggaagatgcagatccttatttttgctgggaaatccttctaaatagaaatgtaacatttttataaaaacagattaatgtgtttttcacttagtaaatgttttcaagagctgaattgagaaggaaagagactggagtggttaatggtgatttgatttctggcattctgagttttctgctacaattagctgcattacttggtgccaaagagcagtggggaattgttgagttgctgtatcctttaaaaaaaaacaaaaaacttgttattttgaaagaacttaaggctcacaagatgttacaaaaatagtagagtggccttaccctagatccagttttccccatttataacatttcacttagtccattttcggaaccagaaaattaacattggcataatgctattaactaaactacagaccttttttcaatttcgccagtttttccacacatattcatttagttgctggatacttttaattcttgctgatttgtaaactggccttgcttggatacaacaggaaagatactatctggataaagttctacagttttagagagactattaacacattaatgtgttcctttgtcatgagcaataccctgcctacactgcttctaaattttctgatttgtttggctgtttggcatctgaaacaatccaagacaaacttagaaagattaggcaacacaaaacacagtaagacctgttcatagcttgttgcctaggaaaaccmggtwgscrggatawtcctaggatggcttcctg

SEQ ID NO: 1175 - DNA, 1859 bp, Homo sapiens
  misc_feature (917)..(917): n equals a,t,g, or c
  misc_feature (981)..(981): n equals a,t,g, or c
ggcacgaggctttctgaatgtgacctcgggatgctgcagcggcgcaatgctgctactgctgaatgagtagctctcctgccaccgcaggcgactgcggtgggcacagcagggcgcacagaggagggggtaatctgcccacccaggctaaggatttgagggttctgacaaaaaagagctggttgaggatgacacagttgtgaactaacctggctcctactaccccacagggcagccaggtcccagtagtcttgggtaccactgcccccaccataccaccattgtaaagtatggactcctgcttagccaacgtgcagctctaggcaggatctctgaaggatgctctggcacacagatggtgcaggtatgactttacctgcacacaagcttacatgtgccctgtcatatatggctacacgtttccccatttccccacagtcttcctatttaactggtcttcaatcctcctttctagggctttccgcctgcacacagtcatttggagaaaatcaagtgagtgcacttctccccacagaggattctgtatgttatgtaacacactcacactgggattcctcaagttaccattttgccccaactcagccagcacttggttttctggcgggggtgtcaggatgatgcaaatggaggtggaagcttcattccctgggggcttttattcccctccttgaagccccagttcaaggcccaggaacaaaggggaaaggtaactgatctctcttttggtctttctctcccctcacttccaccccttcacctgcaggccctcctctttgataaatagaggaaagcccgtgggatcaggtacatatgtaaatactgctgacctcggccgcccctcctcaccgaaaagcagaaagcccgtttcaggtgcaggctgctccgtgcctttgagtgtncaccacttctattcccccagactgcttgggactcaaggccactcacttaatacccgtctcttgntaaaaacattcaggacaactattaaatagttattggaagagttaaagaccttctttcaggagtgaaacgtttttaaagctgtgcttggcataagtctttaaggcgtacaaagtagaatcagtagacttgcctgagcgattttgaaatttgaaagatttctccccatgaaatggtaatttaaaatagtttgtagatgttgttttgttctgtgatggctttttcaccattgtcacctaaagattctcaagaccaagctactaagacatttcatttggttagtttctgggtgatactgtgctttctgattagacctatttaatttatttttaactctgcaggagagttttcaaccttggaaatgtaagtgaaacacagactcaccctccttctgagaccttgataggggcagaaaggaacaaatctggctagcccccctcacacctggaagtttccctgtctaaacctgggtacaatgagcgtggtgggttttgtcaccttttattttattgctggctcaaggaaaattctttgaaatgaacatctattctatttcagtgtgcaatgttccagccgacttaatgggcttgccttatgcggagaggcagtcctgcaggacagagctaatgtgtggtctcccaggaagctcatcagaacacctcttgtcccttttctttaaaagaaaaaaaatttaaaaagtttttgcttccatctcaatgtccattccattattttgtagctacaataaagaaacatgggcagcagtaaaaaaaaaaaaaaaaaaaaaaaaaaaaaaaaaaaaaaaaaaaaaaaaaaaaaaaaaaaaaaaaaaaaaaaaaaaaaaaaaaaaaaaaaaaaaaaaaaaaaaaaaaaaaaaaaaa

SEQ ID NO: 1176 - DNA, 2867 bp, Homo sapiens
ggcacgagcctgttgacaactccaatgttgactgttctacatgaaacattttctcaacacacattcctcatgaatggtctcattcaaggtgtaaagggcctgctctcttttttgagtgccccactcattggtgccctgtctgatgtgtgggggaggaagccctttctcctcggcactgtattctttacctgcttcccaatcccactgatgaggatcagcccatggtggtattttgcgatgatttctgtgtctggagtcttctcggtcacgttttctgttatatttgcctatgtagctgatgtcactcaggagcacgagcgaagtacagcttatggatgggtctcagccacctttgcggctagtcttgtcagcagcccggccattggagcatatctttctgccagttacggagacagcctcgttgtgctggtggccacagtggtggctcttctggacatctgcttcatcttagtggctgttccagaatctctgcctgagaaaatgagaccggtttcctggggagctcagatttcttggaaacaagcagacccttttgcgtcgttgaagaaagttggaaaagattctactgtcttactaatctgcatcaccgtgtttctttcataccttcctgaagctggacagtattcaagtttttttctctatctcaggcaggtcataggttttggatctgttaaaattgcagcattcatagctatggtaggaattctgtctattgtggctcagacggcctttcttagcatcttgatgagatcattaggaaataagaatactgtcctccttggcttgggcttccagatgctccagttagcctggtacggttttggatcacaggcctggatgatgtgggcagcagggaccgtggctgccatgtccagcatcacgtttccggcaatcagtgccctcgtctctcggaatgcagagtcagatcagcaaggagttgcccaggggatcataactggaataagaggactatgcaatggcctggggccagcactgtatggcttcatattctacatgttccatgtggaactgactgagttgggcccgaaattgaattctaacaacgttcccctgcagggagctgtcatcccaggcccgccgtttttatttggggcatgtatagtccttatgtcttttctggttgccttattcattcctgaatacagtaaagccagtggagttcaaaaacacagtaacagcagcagcggcagcctgaccaacaccccagaacggggcagtgatgaggacattgagccactactgcaagacagcagcatctgggagctctcttcatttgaggagcctgggaatcagtgcactgagctgtaaactcggcagaaagtgggattctgcatacgccatctctgagagccatggagggagccacacccctggtgacttcatggtgctggatgggagacgctagcggcatccttcagggccaagtttgataaataccaccgccatcattctgctcatcctcctcctgtttttttttttctcttacattctttttttttttcctgtttatacattagaacaagataagatttgaaatacttccttgcaaataatgtgcaactcccaaggtgaaactcaaatagaaaaagtcatctctctggtagaaaggatggctttcctgtaatgactatagagtaagagtggcagcaatctttccatgcccttttcagcagaaggcacagaacagtagcgggactgccatctctggcaagatttcaggtaaagaatctcttcttaatttctaccttcctgtttctctgaatcagcccataggtgttgatgagtggccactcttaaagagtcactcagtatcagggatctactgtctttgttcaaaggtcaaataaaaacctagtctccttttattctactttctattcttagctagaatgaaactcagcatatatacacttctggacataataatattgaatagtaattacctttactagatgaaagaaattttcattacaaacttaaatcatgtaaaactcaacaactcagattcctggacctggtgtcctggttgggtccaaggtgattttacagaagaaaaaaacaactcaagcattctggtggcaacatagagattgtaggctgcttctaagaaagttattaacaatttggaaattcctaagtaggatgagagttagtaactggatacgagtgaagtttatatccaagttcagactcaaaggcattattatgatttgcttcttcccatgtcttccatgtcctgcttctcaaagtttttctcatccatcacactcctgccttaactgctctgagtatgcatttgttttcaattcatctttatttcaatctgtttaacttttgaatcgcatgggaatacgcacattaagttcctttctaaaataaggttttatgaagctgagtttcacgataagtgtcttgctattttttgagatgttttatggacaaagaaaactttacagatttatatgtattttgctgcaccagtaaatggaccattaactagggcccacctttaacagagcacccctttgaaagttttataggtatgaaatatatgtagatatttgtaaagggttttaattttttttttttgatggggtgctgtgtaaatcttgtatttataaatgtaatgaaggtattgacagaaaaaaatatatacaacttttataaaggattgtgtactgactgaatacatttaaaagaaaatatattttgaaacctgttctgctatgaacagagataacatatctttttactatgctattggtttttaggttaagcttcctaatgcataataaatttacagtggttaaaaaaaaaaaaaaaaa

SEQ ID NO: 1177 - DNA, 1875 bp, Homo sapiens
  misc_feature (334)..(334): n equals a,t,g, or c
  misc_feature (966)..(966): n equals a,t,g, or c
  misc_feature (1304)..(1304): n equals a,t,g, or c
  misc_feature (1319)..(1319): n equals a,t,g, or c
  misc_feature (1329)..(1329): n equals a,t,g, or c
aattcggcacagtcagacgtggtagaaagacagtaagagaggaacaactagaagtggagcccgaagatgtgactgaactgctgcaatctcatgataagacttgaatggatgaagagttacttaagtggtttcatgagatggaatctactgctggtgaagttgctgtgaatattgttgaaatgacagcaaaggatttagratattacataaacttggttgggcagagtttgagaggattgactccaattttgaaagaagttctgctgcgggtaaaatgctgtcacacagcatcacatgctacagagaaatctttcatgaagagtcaatcaatgangacammcttcattgttgtcttatttcaataaattggcacagccactctagccttcagcaaccactgatcactcagttcagcagccatcaacatcaagacaagaccctctaccagcaaaatgattacaacttgctgaagggctcaggtgatcattagcgttttttagcaataaagtatttttagatataatgctattacatgcataatagactagagtacagtatagtgtaaacctaccttttatgtacactggggaaccaaaaaattgtgtaacttgctttattgtgatacttgctttattgtggtagtctggaacagatcctgcagtatccccaaggtatgcctgtatctcagtatagtcgtgatcataggtcttgcttttctttagattcactgttggtgttatcatccatgaatttcaccttcctgtgtacaaacatctcttattacagtaggagaatatgggagtcagaaaaggaagacatttattgtcattatgaactcagaaaatatgtttwctastgacattgaaacaactgagattgatattttccagccacggcagttttggtgattgaaagcaagatctgttttttaaaaattaaatataagtttgcacattcttccagggnaagggcacgggataatttcccttgccattttattttgaaaccagctttgttgtggtggcacgctccatgagatttgctccatgagatttgctccatgttgcaccacacacagtctttgctcctgtgtccttccatagaaaaaaacagtgtggggaargatttggtttgtcttaccctttaatcttctgctcctacagctctctggtctgatagttcactattttggtaataaagtcagatatagttcaaatcctgtctggtctattatttcgtgaaatttttgaacttttccatgctttggcatcctccaagaactttttcctttcwaagtttactgntttaataaatggacncctatgtgancacttttagactggagtctaaaagcscctaataggcttgctatttttagagaaggagaaagttgccttttgttctctctgtgcttttcacctcccacatgttctttagagttttttttcctgttctggtcttagtagtgacagctttctaatyccagaggctttttcctgggtctgtttctggctcattttgtctcatactcaaaatttttaatgtcagaattgggctgggctcttctctttctattatctgtaaacattttgggtttcttttcctctaatttatgaaaattatgaaatgtacacataaaggagtggaaaatatattcacccagtttaaagaagagtaataaaatggacattcgtatatacccaccatccaggttgagaaatagaacattgcttgtgtctcagaagctctctgtgttcctctcagtcacgttcccccaccccaactcctacccaaggtaacctctcatcctgaagcttacatggaagatttgggcatttttattaaaaaaaaaaaaaaaaaaaaaaaaactcgtag

SEQ ID NO: 1178 - DNA, 1651 bp, Homo sapiens
gctcgtgccgtacagttaaaatgtataaaagaacctagtgccaattttcttaggtcttgcgaaattaggttacttattgttttggttattaatgaacaattgccaatgtgaatgaaatcttttgttaaattataagggaaagtttcacatgcagcaaaataatacagaaaatgtttttataaatttttataaaacttgaatctttaatgtttgtttttaccatttactgtattgttggtctttttacatttggccatagttctatgaaatgtaaactttttcaggaaagccatgaaaaataatttagatagttatttcttaaacatgtgacttgtgatagttttgatattaaagacctttatcactccacagaacatttttatttaaactttaatacagttgaccagaattgcaatctaattaaatatatcaatttgttgactggctgaaatttaagatcctttcaatgataatcatatcaaaattacttcttttggttcaattatatttaccattacataaaactacaaaacatttggttaatctttccgtgggtatacagtgaaataggtagccagaccaacacctctttattttttattgggttgtttgatgagctgttctacttctaaaagatttaatcttgtttcattctaggtaataatgtttccataaatatagaggtagaccccaggcatcctactatgcttcctgagtgcttctttcttggagctgaccatgtggtaaaacccctgggaattaagctgagcaggaacatacatttgtgggatccagaaaatagtgtgttacaaaatttgaaagatgttttagaaattgattttccagctcgtgctatcctggaaaaatctgattttactatggattgtggaatttgttatgcttatcaacttgacggtaccattcctgatcaagtgtgtgataattcccagtgtggacaacctttccatcaaatatgcttatatgagtggctgagaggactactaactagtagacagagttttaacatcatatttggtgaatgtccatattgtagtaagccaattaccttaaaaatgtctggaaggaaacactgaaataagaatacaacatttcggtgaagagctggaaacttaaaaaattatcaaaaggaattttggtatcatcttcagagaaaaaataaagcaagaaatactaacatcaaaaggacaggtatgatgatgcgataataataaacatctgcgtttgtctcttcactaagagtaaactgggaaattgtaggccaaagtccagttgaactttctaagtctgtgatccccgtgctgactgtggaagtgtatttataccaagatggagatcttgacttcttgaatatatctggactggtaaaatcttgatgaggctcataaaatgagtttgggaattgtgtatagctgattttttgtgggaaactgtttacttcattcaaaggttcttgagactcttgatatttctgtcttctccttgtgctttcctatggaaaaaatacatatatagtttagtttgttagacgtgagttatccaagtatttattttgtgtagtgtgtaagaatgctaaataaaatgttatacaagatcaaaaaaaaaaaaaaaaaaaaaaaaaaaaaaactcgag

SEQ ID NO: 1179 - DNA, 2292 bp, Homo sapiens
gagccctccctcatgggttgtatttccctaccttcccatacacttctctccctaaggtcttatctaaccatcattctcttcaagttgccatttccattccctacttcccagctatgcacctttctgttccatttggttgacttttatttttttcttctttccagcacatggctttcagttttcctgcctctgctggagttgtcagggttggagccaggagggctttactttttccttttcttctaccaggttagcccggttggtttatgacatctcctcattttcaactctcctcatctcttttcatgtggctttgttggggttggatggctgaggttggctggactgatggttacaaaagaatatgtgagagtattgagggagtgactaaatccctcagggataagagagggaacaggaccttccagaaggttgtgctcttattgtctcagactttgtatatacatgtttatttctgtaaattgctttctccatttggacaaactacaataaccagagtaaaaagctaccaggaatgagttctgttcaaaattacagagatggacattggagtctcagtgagtttgcttgagagttctcggaataatatgaaaatagctttaaaagggacaacaggagagtatgcagagtggagctgcttcttttttttttgatgccgaaattggtttagatagaatgaaactgtctctcttaagattcgaaaaataaaagccaaaacaacccactcattctcaaatcccggttgagctaaagctacaaatcatattcatttgtaggatacggttgagagatgactctcgagtaatgaaggctcataagcctgggctgtagttagcgtaagaggtaaacaggggccttcttgttttcactcttttggaagctctaattcatttctaattactatctcctggaaaaacaccgtgttgtcattgccttttaaatttctttctcttttcagagaaaacacatattttaggtcattaagaaaaaccttgtcttaatttggatgatgtttttattctacaaaatagaattattatcttgttcgaggcacaatttggtaagaagaagaggctgcatgcattttaatttggcaatgaattaacaataataaagaggatatgacttttccactgttacacagttcaagatctacatgcttatgtaggtcagagaagaagcatccttgctatttgaatttttacagggaattggtcaggaggaaaaaataatggcatgtgaaatatcaaaacctttccttaattttcaactcaataacgtgttttgcaattttaaaagtccatgaagaagaagaaaaagaaaaagaaggctttacaattagtaggtgtgaaaaagaaaaaccaatattgttttgtatagacaaggaagcagaatgtggcaaaaattagcttttgttgtttttcatattatgaaatattccccaacacatatgaaagtgtaagtaggcaaaaatttttttctcactcataagctgaggttatcttggttatttttttgaacaacttagtctgttcttatggtaatttggggaaacgtatgaattgatgggataaacttttccttgagattgtgaatgaaaatgggctcaatggagtgccatggtcttcctcagtgcatagcagattctgaagacatcacatacacaaattgtccaccacttctagttccaagagaaggtgtgggaaaaaggggtgaagggaccagcattgcctggcaagatggttgggggagtaatcagctggggagaccaccttagtctggatacagacgagagaggggaccagagaggtctcagactttgccatggttacttccaaagtatgctagagtgctccaagtgtgaactgtaatgtagagagtcaggaagaaggtaggtcttaaatcttgttaaaaaatggatacattcttaaatgcttcagcttgtagagaagagagaagaaattttgattattccttatgcctctattaaaatacctgggaaaaccatttactcaattgatttttaccagctgcatttttgtatgacataggtaaactatatttgttttaacaagtaaagaccaaaaatgctgatcgcaaaaagaaaaatacattattcacaattctacctctaatagacgggtactgttgtgtgtactcgtatacacacgtataatataaaatattatatttgtgtgtgtgtgtgtatgtgcgtgtgtgtgtgcgtgtgtgtattctttcatttggcaaaccaaaaaaaaaaaaaaaaaa

SEQ ID NO: 1180 - DNA, 3560 bp, Homo sapiens
  misc_feature (380)..(380): n equals a,t,g, or c
  misc_feature (991)..(991): n equals a,t,g, or c
  misc_feature (3560)..(3560): n equals a,t,g, or c
gcccacgcgtccgctgaggcggccaccgcgactccggctctgcgctcggctgcctgacttcttcctgctgctgcttttcaggggctgcctgataggggctgtaaatctcaaatccagcaatcgaaccccagtggtacaggaatttgaaagtgtggaactgtcttgcatcattacggattcgcagacaagtgaccccaggatcgagtggaagaaaattcaagatgaacaaaccacatatgtgttttttgacaacaaaattcagggagacttggcgggtcgtgcagaaatactggggaagacatccctgaagatctggaatgtgacacggagagactcagccctttatcgctgtgaggtcgttgctcgaaatgaccgcaagnaaattgatgagattgtgatcgagttaactgtgcaagtgaagccagtgacccctgtctgtagagtgccgaaggstgtaccagtaggcaagatggcaacactgcactgccaggagagtgagggccacccccggcctcactacagctggtatcgcaatgatgtaccactgcccacggattccagagccaatcccagatttcgcaattcttctttccacttaaactctgaaacaggcactttggtgttcactgctgttcacaaggacgactctgggcagtactactgcattgcttccaatgacgcaggctcagccaggtgtgaggagcaggagatggaagtctatgacctgaacattggcggaattattgggggggttctggttgtccttgctgtactggccctgatcacgttgggcatctgctgtgcatacagacgtggctacttcatcaacaataaacaggatggagaaagttacaagaacccagggaaaccagatggagttaactacatccgcactgacgaggagggcgacttcagacacaagtcatcgtttgtgatctgagacccgcggtgtggctgagagcgcacagagcgcacgtgcacatacctctgntagaaactcctgtcaaggcagcgagagctgatgcactcggacagagctagacactcattcagaagcttttcgttttggccaaagttgaccactactcttcttactctaacaagccacatgaatagaagaattttcctcaagatggacccggtaaatataaccacaaggaagcgaaactgggtgcgttcactgagttgggttcctaatctgtttctggcctgattcccgcatgagtattagggtgatcttaaagagtttgctcacgtaaacgcccgtgctgggccctgtgaagccagcatgttcaccactggtcgttcagcagccacgacagcaccatgtgagatggcgaggtggctggacagcaccagcagcgcatcccggcgggaacccaggaaaaggcttcttacacagcagccttacttcatcggcccacagacaccaccgcagtttcttcttaaaggctctgctgatcggtgttgcagtgtccattgtggagaagctttttggatcagcattttgtaaaaacaaccaaaatcaggaaggtaaattggttgctggaagagggatcttgcctgaggaaccctgcttgtccaacagggtgtcaggatttaaggaaaaccttcgtcttaggctaagtctgaaatggtactgaaatatgcttttctatgggtcttgtttattttataaaattttacatctaaatttttgctaaggatgtattttgattattgaaaagaaaatttctatttaaactgtaaatatattgtcatacaatgttaaataacctatttttttaaaaaagttcaacttaaggtagaagttccaagctactagtgttaaattggaaaatatcaataattaagagtattttacccaaggaatcctctcatggaagtttactgtgatgttccttttctcacacaagttttagcctttttcacaagggractcatactgtctacacatcagaccatagttgcttaggaaacctttaaaaattccagttaagcaatgttgaaatcagtttgcatctcttcaaaagaaacctctcaggttagctttgaactgcctcttcctgagatgactaggacagtckgtacccagaggccacccagaagccctcagatgtacatacacagatgccagtcagctcctggggttgcgccaggcgsccccgctctagctcactgttgcctcgctgtctgccaggaggccctgccatccttgggccctggcagtggctgtgtcccagtgagctttactcacgtggcccttgcttcatccagcacagctctcaggtgggcactgcagggacactggtgtcttccatgtagcgtcccagctttgggctcctgtaacagacctctttttggttatggatggctcacaaaatagggcccccaatgctatttttttttttaagtttgtttaattatttgttaagattgtctaaggccaaaggcaattgcgaaatcaagtctgtcaagtacaataacatttttaaaagaaaatggatcccactgttcctctttgccacagagaaagcacccagacgccacaggctctgtcgcatttcaaaacaaaccatgatggagtggcggccagtccagccttttaaagaacgtcaggtggagcagccaggtgaaaggcctggcggggaggaaagtgaaacgcctgaatcaaaagcagttttctaattttgactttaaatttttcatccgccggagacactgctcccatttgtggggggacattagcaacatcactcagaagcctgtgttcttcaagagcaggtgttctcagcctcacatgccctgccgtgctggactcaggactgaagtgctgtaaagcaaggagctgctgagaaggagcactccactgtgtgcctggagaatggctctcactactcaccttgtctttcagcttccagtgtcttgggttttttatactttgacagcttttttttaattgcatacatgagactgtgttgactttttttagttatgtgaaacactttgccgcagccgcctggcagaggcaggaaatgctccagcagtggctcagtgctccctggtgtctgctgcatggcatcctggatgcttagcatgcaagttccctccatcattgccaccttggtagagagggatggctccccaccctcagcgttggggattcacgctccagcctccttcttggttgtcatagtgatagggtagccttattgccccctcttcttataccctaaaaccttctacactagtgccatgggaaccaggtctgaaaaagtagagagaagtgaaagtagagtctgggaagtagctgcctataactgagactagacggaaaaggaatactcgtgtattttaagatatgaatgtgactcaagactcgaggccgatacgaggctgtgattctgcctttggatggatgttgctgtacacagatgctacagacttgtactaacacaccgtaatttggcatttgtttaacctcatttataaaagcttcaaaaaaacccaaaaaaaaaaaaaaaaaaaaaaaaaaaaaaaaaaaaaaaaaaaaaaaaaan

SEQ ID NO: 1181 - DNA, 1902 bp, Homo sapiens
aattcggcagagcgaatttatattatttttaaaaataaatttcactagtgcatggttttaaaaaggagagagaatgcaacagggtgatacaaagatacaccatgtttattctttaatcatagtctgtgttttggcagacattacaaatggaaatactttctagaagatacttaaaattctctttatgtgacaaataagtataatatattcaatttatttccatgttaaatatacaaatcttatgaagttcaatatgtgcaaatttttcacatctttctccttctctcactttacctcttctccctcttttaaacttttctttctccctgccagagtgaaccttatactaaaaaattacaagttttgatctgatcctctctcataccccatgtttgattcagagctgtagatgcctctgaatttgcgaatttctcaagggaaaattaactttaagagctttctttatttcaagcatgttgaaaaggattttgcaacatgacttgggagtacattaaagtaagtcagcatgtatttgacgaagaagatatttgaacttttgcagtttattgtacagtgcatggtaattttttcacctttaaaattcagtttacaggaaaattctaaaatcatgttgccattgtgatgtccaataaatttgtttttagcaccagcattattcatacaggggttaaagtattatttgtagaaggtcttaggttttgtttgttttttaatcatttaaagcaatttctttagccagtttccatttactatgtgaatagaagcactgctaaaaattgggaaccctgaaacacagggctgtttattaattcatttttctgtagtaaaattcaatttttcacaaattatatttctaaagaaatatagtaaacataaatttgcaacaattttaaagctccagtttttaggtgactcaaagaaagtcattatgcctattaatagttatttgatgccatcaccaaaagtctatgtgaaaatctcctaaagtcaaaacccctgcctttggttttacagacggttattaccattgggtggagctgcaaggtcaaatttctcctaagttcccctatttagaggaaaagtcactggttattgtaataaaccacccatggttctttatgtacattttgataacacattattatagcttgattttaattttttgcattaatttttgaaatccacatacatctcatttgtttaaattaaggccatgcacaaatattttttttagttcagtgctgaccattaaaaactatcatgcttgatacggtgcaaaagttaaaatgagtatcactaaaaatgccttctttttatgtggtgcaatatgaaatacaccaagactgtgtcttgacattctgatggacccaggtaaagttgttaaaagaacgaataaaactttattaaaataatttagacacctgtgtaccagcaacaattgatttaatagacctatagtgtctatactatcccttagaataaaggtttatgattttcctgatactaagatgcagtcacataatcttttgtgcatattcctatacaaattatttctaattttaataagaaggacgtgactacggaatatttgtacatacttgtcattatgcagtatttatttaaaagttggtgtttttttttttaattttcacatctgcacctcgacttgtggtttagtcatgtaactagcactatgccagtgaccgttgttgccctgtacatagtatgtttgaaaagtaaagggaattccagttgggraaaaagggcagattagtcctgtaatgaacaccaactaatgtaaatcaaattcattctggtgatggtatttaacactttaaataaaacattttctttaaaaaaaaaaaaaaaaaaaaactcgag

SEQ ID NO: 1182 - DNA, 1538 bp, Homo sapiens
gctcttttgcttattgaaagcaatttgattacacctatgtttcaggttatagtggggagaaaatttggtcagtgccttattakttgaagagcaattttagggcatcaagtatgacaataatcatgtgccctcttgctcctcttatttcaggagtgtgtgctatccctctctccaccagcttaatctttctcaccccaagtctaacaaagtctttacagaaacctctgtaggtgattgttgcagtcttccttggtttttgagtctttttaaacaagctcctaccctgcttctatccttttagagtaggagattaaaaataaacccaccccagtcaacctttagataagcactcttaaaaacaatttgaagagcactcttcagccaagttcmyttttattttgttgttgatgttttgagcatacatttaattgtaaggccttttggaaaagccctaaaagaataagatacaaccagaaatatttgagttttgttaaatgtactgaaatcttgtaatgaaaatccctttggccagaaatgagatttatttccatttatttttacatttaagtaacactcaaaacaaacaagtagtcacttaacctgccagttattattttcttgaaaatatacaagaaagtaaaaatatctctaatatataagttaaaggaaagttaagagactaagctagttttttcagtgaaagcaaagttggaaatattttgcttctctcagattattggaagacctagagctactggatgttaacctgaatcaagatgttcttttcacatttttttaaagggctagtatgttccagagtaggcaagtagtcattcaagccaaatgaaagagttaactggtccttgaggagtgttagcaaaatttaaattttgaccctggccatttgtactacagaagtgattatgggattaaaagaatacataattacagtgttttgggattgggctcttttttttcttaatagaaaagcagaaacttcataaataatagctgtgctttagataccagataacaaatattgtttcccctgaagatatgacctactagaactactcacatatatagtccaataattactgacttaataggtatggtaaaatagctgataataagtcagactctcaagagtttctgtaccttgattattgacaaattcattgttttacatcctactaaagaacatgtgtgtggggagggggtggggaactggttcacaacataatctgaaggagatcaaacatctgtaaggacaggtacccagtgatgataayatatctgaaaacacaagccatttttattctttatcccaattaacttgaggtactctaatgatgaagcactcgattgcactatgacctccttgagtgatgtgcagcttggttcctctctcactttttgtttctttttaatatgcaaatgtgagtgtgcgatcttcagtgtgtctgcataagctaacttaagatgaatttaagtacagttttctgaaatatttctattgaaataaattacttaaaatt

SEQ ID NO: 1183 - DNA, 2148 bp, Homo sapiens
  misc_feature (378)..(378): n equals a,t,g, or c
  misc_feature (381)..(381): n equals a,t,g, or c
  misc_feature (408)..(408): n equals a,t,g, or c
ggcacgagtgcacattcatgtgcaagttttgtgtgaacctgtgttttcatttcccttgagtatgtttctaggggtggaattactgactcatatggtaactctgtttaactttttgaggaactgctggactgttttccaaattaacattctcattagtagtgtatgaggagtctaatttgtccaaatcctcaccaacgcttgctgttctctgttcttttgattataaccatcctaatgggtatgaattgattctcattgtggctttggattgcatttccctgatggctaaaggtgtggagtatcttttcatgtgcttattggccatttgtatatcttctttggagacatgtctatgcaggtcctttgcccattttaaanttntattatttatctttttataattgaggngtaagatttctttgtatacagtagtcctcccttatccagaagggaaatgttccaagaccccagtggaagcctgaaaccctggatagtactgaaccctatatatattgtgctttttctcatacatacttacttatgataaagtttataaaccaaaccctgtatatactgttttgtctcatacatacttacctatgatcaagtttataaattaggcataataagagattaacaacaataactaataataataaaggagaacaattataacaatacatcagcattactactcttgcactttgggggcattataaagtaaaataagggttacttgaacatagcactgagatatcacaacagttgatctgataatcagtatggctactgagggcaggtggtgtatacagcatggatgttctggacaaagggatgatttatgattaaggcaggatggaacaggacagtgggagatttcatcatgctattcagaaaagcgcataatttatgaattgtttatttttagacttttttgtgtcatatgtttggattgatacatgatttgcaaatattttctctcaatttgtgggttgtctttttactttcttggtggtgtcttttgaagaacaaaactttttcattttgatgtagtccaatttattattttgtattgttgttgcttgtactttttgtgccatatccaagaaaccattgctttctccaatatcaagaagatatatacctttgtttttttcttagaattttagagctttagctttaatccattttgagttaatttttatatatgatgtgaaatagggaaaaatactattaatttttgtttattgatcatatcctgtaatctagctaacttcacttagtagatctatttaatagtaattttgggtaaattttttttaagtagacagtcatgtcactgcaagtgactgctgtttaatgttttcattgataatctgtgtgtcttctatttttcttgccatgttgcattggctaggacctctactacaatgaatgggagagtagtgagaggatactcttgtcctgttcctgagcttagggggaaagtattcagtctttcatcaagtctgatgtaaggtatagggtgttttgggaaaaatatatttaccttctctttccctctctgtttcctttcccctacactgccccttggcatttctggagcttttatttctttatgtaggtccaagtttcagtctggtattatattcccatcgactgaagaatttactgtaagttcttaaagtgcctgtctaatattggttgattctcttagcttttatttctctgagaaagtatttcacctttgttttcgaaagataattttcaaaggatatagaattctgggtttataatttttttttctagtagtactttacaaatatcattccattggccaggcatggtggctcacacctgtaatcccaacactctgggaggccgaggtggatggatcacctggggtcaggagtttgagactagcctggccaacaaggcaaaacctcatctctactaaaaatacaaaaattagccaggcgtggtggtacacacctgtaatcccagctacttgggaggctgaggcaggagaacagcttaaacctgggaggtggaggttgcagtgagctgagatagtgccactgcactccagcctcggcaacagaataagactctgtctccaaaaaaaaaaaaaaaaaaaaaaaaaaaaaa

SEQ ID NO: 1184 - DNA, 2608 bp, Homo sapiens
  misc_feature (2598)..(2598): n equals a,t,g, or c
  misc_feature (2608)..(2608): n equals a,t,g, or c
gaaattcggcacgagatttactgtaaaagtattcccagtatgtgtgcagcatgaagaaagtattagtgcttctcagtgttctcagtgtaaattctatttatatacagcatattcacatactactttccttatattttatatagttctatgactgttgaaacatcaaggagttaaaaaaatcttaatatttcatgattaactctaagtactattaattaatagcttgcgaaatattagcaattttcccattatggactattctctctaaagcaagagagactagcattcccagacatcattctagggtctttaagctcattttgggtckgctaaagtttggggggaaatgttacgcaaagtgatactgtgtatgttgccattttgctttattcttctgttgaagcaaaattgtggggtttkattatgtgtgtgtgctttwcctagatgtcccagttagctgtgctgagatatacctgtactatttatggtttaagttttgatycttaggtattttctccagctctgacattgttttccaaagacacactaaactgcattgcacagttcaaaatttgattacttaagggatcaatctaggtggtgttcttggtcttaaatttaacagcaaacacagcacatatctattatcactatattaattttcaaaggtttttctktgacgtttaaaactgtgacaacagatattcacatttgattatagaaacttaatgtctattaataattttagtacaaaatttcataaaccgtgtttttcaaaataagtttatgtcaaatccagcttcccagaaacactaataattaagtacatcaatgtactaaataaatcattcagttgcacccatggggaagattgtgttactgcccttcacagtgaaaaaaagaaaaatctttcatttttaaaattaggagatgttacgtaacttggcactttagtagtgtatacactagcattagtttatacaccacttttgccgctggggaattcaagttgaaatgtccctcaatcatataggtctggaatacatctttcattcataatttctgctcagataattgaatagtttgccatcgagattattttcatttatactataaaacaaaagcaaactagtccagtttaattttttgtacttagaatattgcacattttctatatatgagttattcagattagtatctatgtaggttcagtcagatccaaccatggattcgaggtattatactgtataaccctacaaaatacatagaagtattatttgccttcataatagaacccaagagtctgtttcaatttatgaattcagtatttgcaccgagattttgattcccaaagtttggaaaaaaatgacaaaacaacgagggaagaaggaaccagaccttagtgccacatatttttctcttggggttgtaaggtagtctcctgctttccagaacactttattatatttcacttatagacctgattttctgtgtcaaagtataattctcatgctgaagctgtagcctaaaaagccaaaagaaagttgtcttcattgtacaaacatattcatcactttaacaataagggaacaaaatttagtattcaagctgagtgagaatactgtttcaatgagcatgtccctaagataaaccagaattggcagttaatttaggcgtctagaaaatctcagttcccaccagtaaaattatcctgagtagctaatgcaccttgagaaaaatctggcatactgaataaataacattaacttgggagccaagagctgggtaagccttacctttagactactctgtgactacagaaataaagccagcacttttggaactaataagccttcacttgtcagtatcataaagagtattgcccaactgaactttgctcccactggtttaatagttacttatttctgcctaagcactcaccttccgattttacccaagtatatatataggatagaaaaaaatgcattatatttgagagctacttcgcccaaattacaaaatgagtgtttttagattcaagtgacagtaaaaggatttgttcccttcagtgacttgagtgttttagttatgcataagtatttctagcaaaggaagggtagaaaggaattgaaaattaatttacactagttgctacttgggaataaagggctttttgaggggggtatggatattaaatgttttcgttatatacttatccctattaaaacaggcagttgtttctttgaatatgcctaaataacagtattcttaaaatctgacagacaagtaacatgtcaattacttgatattccttgtctccagtaccacaggccactcttgacatcccatgtttgcctggataaagttcctcatttcaaacagtatacatacttctttgcagttcattatagtaaggcttaacctgtaaacagtatctgatggcccacctataaataaaattcagcattctatttttaataatttgtatgccaccaatttgtattatttgtctcaataaatacttagtcatcaaaaaaaaaaaaaaaaaaaaaaaaaaaaaaaaaaaaaaaaaaaaaaaaaaaaaaaaaaaaaaaaaanaaaaaaaaan

SEQ ID NO: 1185 - DNA, 1642 bp, Homo sapiens
agtgattcctccacttttttttcctgaacagtcaaggtgaggcaattgattgagtatatttcccttcttatttcagtaatactctattttttttcatgaaaatgtcaacatggttcttctgaatctatcacagtgaaaagttctaacttgtttttgagaagtcagtacagcaggggaaaacatatgtgatgcaattaacatctgcataatttcacttaaaattattatgcaaaaatgaatgttttttcaaaaaatgtgaaatgtatttattttctttatttgtattcttgtttcattttttaatatgttgtgaacatgctacagatttgatagtacttttgactaaatgttgggagtggtcgtattaacttcttgcccaaagaagtaagcatattggtgttttctcaattagtcactgagaaaattaacactttaggcagtggctatttaaagtaggaattgcatcttaaaaacctttcctaagagatttggtatgtgaggatactttcagtaccactcctaccattcatttttctaaattccttagtacatatacttggatcatgtyaaattaacaagaaagatgaataactgcgctgaattgcctttacctataaataatttaatattttaccttcgggttttatcaactgtcaatataaaaggcagtactccacagaatgatgttgaaaaacttcttcgaagaacaccttctattaaacttgttatctcttgtaaattattgtgtgtgtccttttgataatattcacaggtgtttcaaaggtaaggaataggttgtctcttggattaagtcatatgcctccagccattatatgagaactgtgaaaccaatatggttttctttatgtmwwggctgcttgaaaattaaaaaaaaaaaaggtttgttcaatattgccgttacatttattagcctgtaatttctaaattggagattctctacatttcacttgcagtttcctgttctcctcattgcctgccttccattcatattacacttatttttctattttttgtattacctttttaaaaatatataccagttcaagtccttttaggaagaagaaaatacctaatttatgtaaaatttaaataattacttttttataatatgattcacttatgccacagattcaacattagaatatgttttatctctackgtcagttttattaccttatatacaaatcttcattttcatacatagtacaatgtaatatataactttgttaacacttttgttagctctttgaccwtaaaataatgacaataagctgtttctatgtatttgtttatctacaaattacaggtttatccatttgcaaatattttcaaatggaaatcactgtttatattgattataaacataagacatgctcattgtaaaaaatgtacacaaggcagaaggaagtaaaatttccacagttcagaaataccacaattaatattttcaatgtgtaaatatcttttcataatttttcctacgtatacacaaacattttgaccaaaaatccacactatatgtactgttctgtatttttaattttaaactgaacaataatcatcttttcctgacaataaatatcaatctctatcatcaaaaaaaaaaaaaaaaaactcgaag

SEQ ID NO: 1186 - DNA, 1783 bp, Homo sapiens
ggcacgagatttcagcctggagtcagtcaaaaaatcttagaggtctgtaaaggagatgactatgctgttagggctgtggtagaaacctttaataacaagtgaaaagagcttgtatttgccaaaatgaacacaggatatgattctttttttgcttttgctttggagttgtatcagctctgtgcggtcacatgggtatctacaaatcaaagcacccatcaaccagatgcatctctgagagttaacagcagaaggtggcataataaaagaagttctcggtagtgaaaaaggttggaaaccaccagctaaaccaatcctcttgtaccaataggagattcaagttgagaggtgggaaagggcctatctcagagtaggtgcttgaatacttcttactagaatgaaagaaggaacttaagatcacacagccatgttactgcaggacggggaatggaacctaggtcttcttatttttggttcagtgttaactcccattctctaagcagactgggcctgttattcaaactgccttcccataggtgcttccctgcttctctcctcacccagagaaggacttacaaacagcttatcttcagaggttttgtgcctgatagttatggaatgtgctggtttgagcagggaggatgtaaggggaggaatgctaaaagcctgtctacttagagtcaggtttcctgggtaagtccctggaaccccatccccttcccctttcttgagaccccaggacttgctccagtaactgccaccctgtgcctttgcttcacggccatgctggataaggagctggctgcctctgtgaacatcctactcaaggcatcttcactgctgtacatccttttgaaatcccagagatcttcagtctccctgtggattaaggagatgtgcagtatttaaagtggcttcaggaaggcatggaagaggactgagtggggaaagctttttgtgcatgctgctggctacctccagcggctgcctccagcctccatcagctgcactctggggaagaggagctgccttctacctcccagcatctctggatttcatgttcctgtcagcacagaggagctaaatggcctgtagaggctgaaggtctgaggctcctaaagctggaagaaaaggctgggccagtcaggccaagcaagaacacagtgtaacttgtctctgagtgcttcatggttaagggggctaagcaggcacaagggcatgaggatggttatatgtacagactgaggggaagaagcagtgaagatgagacttgccatcttcttgagtcagtaggcctgcctcaggtgcctaggatgtaattgctctgctgcttctcatggggactcacgggaagttaaacagcctcgtcggcgtcctcgaggctccaaaaccaggctctaggcggggacgactgcagccgttatggaggccaccgcggctacggccgcggctgaggcctccccaggtggagcggtggcctggaggggaatcttgatcctgggccagccacctgtcaagaggaggcggagcgtcatgcctctggaagactggatgaatattctccaggagcctgacgaaggcgtgagtaatagggacgtgcgccgccttgttggtgttgatcagtccaccaaggagaagcagctggtcgcagtggccgtacctgtaatcccagcgctttgggaggccgcggcgggaggatcgcttgagcccgggagttcgagaccagcctgggcaacatagtgagaaacccgtctctaccaaaaagaaaaaaaaaaaaaaaaaaaaa

SEQ ID NO: 1187 - DNA, 1799 bp, Homo sapiens
ggcacgaggattacacgtctgagccaccatgcccagcccagaaaaaaatttctatcatcttttgctaccatttttgctggcactactaaaagcattaaaatgtgacagcagttccattgcctccacatctatgtacaatttctaataccatttttgctctggtgctgatggtttcctgatatcaggtagggtggagtacagggatgcttctaccaggagtgtgattatacagccactgcctttatttctggctttgcctttgtgatatggtctatcagatgattgataaaatctatctagagtaaggatataagacaaaataaagatactgtaattaaggggaaagggaggctagaggacatggctcagtatccccaagtcttttatttaggatatgggttcagctacttctgacttgacttaaacagtgacaaaataacaatggcttaaacaagatagtttatttctcttcatgtaaaaatttgaatgacaatttagtgaaggtgacaagggcccacgcttctgctaaggtccaggcattcctagagtggtatatgatagatcatatggtataagctagatcacttccatagccacagagtatccagttattaatacaaacaaatgagaagaggaaggggagagcaagtctttctttgtttttagagcacaatccagaagttgaattcctatcttagtcacattaaattggctagagtatcgttacgtagtcagacctagagttgcaaaggagactgaaaaaatgcagtttaatctgaacagccatgtgtccaggtaaaaattctgttattagggaagaaagagagaatgaatattgggaaacactttcaagactcccacaccaaagtactacctaaatattttattcttcctatgtttgtgtgaggtattgaggttttayaaatgtgcacataattttgcaattgtatttttatttatattacacagtaagaaaaacagaatgttctatatttatagtcttcctgttacaaatatgcgattagagcttaaagagtcatagtatcagaattagaatgttaatattcccactcaatatactgaggtctcattttcattatggtgggtttactaactgccccatatacttcgcagggctgctttgaagctaaaatgagatcattcatatgggatcacattaagctgctagaaattagaaaatgtacatgagatagtataaattttacagtcactaatttaagtttcttttcattagacgctgttggaagctctgactgtggcagttgttgttactttctatgatgtatatattattctgcaagctttcatactgactactacagtattttttggtttgactgtgtatactctacaatctaagaaggatttcagcaaatttggagcagggctgtttgctcttttgtggatattgtgcctgtcaggattcttgaagttttttttttatagtgagataatggagttggtcttagccgctgcaggagcccttcttttctgtggattcatcatctatgacacacactcactgatgcataaactgtcacctgaagagtacgtattagctgccatcagcctctacttggatatcatcaatctattcctgcacctgttacggtttctggaagcagttaataaaaagtaattaaaagtatctcagctcaactgaagaacaacaaaaaaaatttaatgagaaaaaaggattaaagtaattggaagcagtatatagaaactgtttcattaagtaataaagtttgaaacaatggaaaaaaaaaaaaaaaaaa

SEQ ID NO: 1188 - DNA, 3198 bp, Homo sapiens
caaaaaacaaaacaaaacaaaacactcacccatcaacgaatatagactcttctctcatttatcgatgatcctctttttccattttttaagtacttatgtggaagctagtctcccaaaacacaatctttagagagaaaagacatgaacgaactccaaaatatccatttaatcaatcatgtttttggctttggataaagaactttgaaccagtttttttctcaggagctgtcaaatggacacttaattatgacatgagaatgaagaaattattttggaaaaaaaaaatgacctaatttacctatcagtgaaagctttattttctggtgccttttgaaagtatatggagtcatatcattcttctgtttaaaatgttagtttggtttgactttccactttgtcctttctgctcttgtgaagaaaaaaaaaagcattttcgaggaaagaattatgcaatttcttttgttttctgtgtcattatttattgcttttcaatgtgcagccagtggatggttttagttctttcagatgaactgccatttgtgtttcagctcacagttctttgctgggtaaaagaaatactttctgacagtcacctgagccttaaatgtaagtattacatgacatgcattctgtttcttccagagttctgtctgccacacgaaagagaatatttgcttacttgatagaactttggcattttcatcattcttttacttaaccaggcttatggcatgatctctggaacaaatttgtaggaaaaaaattactccaattgaatgactgatgtatgtaatcaacttcattgggctgcagtaaactagtggaaattagagagttgttttattggtgttttctactgtgagttaattaaaaattgtttttatttggggtcattatgtcacagtcttgagttaacaagatcttacgtgattggccttttctttgttttctcttaggagttgtgtctcgtgaatgacagtactaaagctattaacaaccaagagtttgacagagaactataagcctgttgtatctcctaaaagttgcaactccccacccttggactttaaatgaaaattttattcagtccagctattcttacagtccctaaggattttcatatatctatgtataggagataaaatttgctcgtaagatttttaaaaactggctagtgaaaggaaagtcctctgaaagaaaccattttagcaaattatgggtatatgttttaatgtaatctacagaatgttttatagtaaaattctagcaccactagaataatcacatagcatgtacaatatatttatgctggctgaaaaggcagaatctgggaataataaaattgcaaccagtttggtaatgcaaacagcagaatagaatgaaatctcagtaatgaattaaagcaacaaaaagatattgattggcaaaaagcaagatataagagatgcatttgcttaacatctctacataatatttatggtctggtcagtattggtctggtcagtattgcctggctgccgtgaaatgtaaactagtaggcatgttattgatctgctaaaactaaccctctttttaagaggagatttaaggaagacgtcaatcaaaatgtcaaatatgtgtgtcagaatataaataatttttcacattgtattgttgctatataaaaaaaataatagaattggttgggtttctgaggtgaaatccagagtaagagtactagacagttcaacaagccacatctaatggcacagatagaggatgtagctattttatacctttcataacatttgagagtaagatatccttcaggatgtgaagtgattattaagtactcatacctgaaatctgttgtcaagattagaactggggttcatgttaaaaaccttccatattacctgagggtacctgtggggaacagttccttcccctgtgtggtagtattttgttggaagagaatgtttatacgaaaaatgaaattcttccaacagcagagaaactctaaaaagtttgatagtacctatcaaagtgctgtacttctgtgatagagaacatctgatgtaccaatttagatctatttctttatactttttctaaccaattgcttaatagtactttggatgattatcacctttgccacttaaaatatataaatatcctttttacttcatgaggaaggaggaattttttgataattactgagttcagccttttgtgatgacttatattttggacttacattttaactttaaagaatgtcagatcccttctttgtcttactagttaaatcctcacctaatctcttgggtatgaatataaatgtgtgtcatcgttatattgttcagctagatgagcaagtatcttagggtagtaggtagcctggtggttttagaagtgtttggtgatttttacggagagagttttcctaagtggtggtttataggtggtatcagatattattagggcagctttttggggagtaatctcaggtctcccagagcagcagcatttttctcattgatataagtaagattcttaggagcttttcttatcacacaagatgcctgaatcgaatgtgagaattgaaggcatttcttctgcataaacaaagaattctacctgctggacagaaacctggaaagttctttggaattcgctgaattacagtttagtatgtcctgattacagagtgacaatatttatcaagcctttgttatattggattatcttctctcttaaaatacaactgtattataattgaaatgacagcccaaaattggatggtttaccaaaaccaatgaaagggatttcacacatcaatttttatttctgttttgaagagcacatgctatataataattgctagtagcaactgcagtaaaacaggtgataagttattttctctgaaaagatccagtcctagagcaggattcttcgatcattcatggcagagtgaaaaaggtttgtatggttcttgtccaaataactcagttcttaaaattcttaaaatgatcgtaaaccattatcctttaaaggtttatttgaagatgctgttaaagtacagaattttgtgtacaggtagatttttccgtccctcattaatagtgccttcttaattaatacagactggtgttagctataacaaaactccagtaaggccaaagaatcccaagttctttgtggaaaaaaaaaaaaaaaaaa

SEQ ID NO: 1189 - DNA, 4185 bp, Homo sapiens
  misc_feature (2673)..(2673): n equals a,t,g, or c
ttttttgtactacaatcaactttattttgatgcatgtaaaataagatattagactgttttttgaataaaatatttttattgattgaacctttgaccctctatcttattacatttagaggcctggcatctttcttgtgagacaagcttaaggacacaaaagaaacacaactttgtgataccactcttctgaaggctacttatagtaataacttcatagatgaacagcatgattcaggtacagtggctttaaacatcaaagcacatttctcattatataaattaaaacgggtggctccagtgccactatcaaagcttaagttatatcttttatctagttctctgaatgtactgaaacagtactttattcgtccaataaataaagcaataaaaattgttcttactgaaaatgaagtagctaggtgctcctgaatttctctccaaaaactaaaacatttaggtcaaaccacttctccggttgagcagtgtattttgatcttgaggattcatggcttgataagtagatagttctaaggcaaaagtagctgagcctgatgttagcgttcgaagcacagttgaataacccataatttctgctaagggaacaaatccaataacaactttgttgtcctggcgagtctgaatttcctgaatgtttcctcttctttgtgccagatctgccaggacagggctgagataatctctagctactgtaacctcaagattcatcagaggctccaaaacttgcttatcagctttcttcagagccttttgcacgcatcttgagacacaggcagaaatcatagttgtggaggtgccaggatgaattgtcagggaatgtaaagtaattgctacatcctgaattggggatccaagcaatggtccttggagacatgcgctgtgaattccattttcaatggcctcttgggagaccttcaaaaggccttcattgatactttcagcatactcaaactcaatcacaggcataacagatgatgtttcaattggccttgcttccacttctacagtcacaagatgccttttgtctcctaaagttctatctaaggtatctgtggcacgaactgagtttaggatggtctctcgatatgccacctggagaggcccgagataggtctccagtccatattccctcttgattcgatcatgaataatctctatatgtaactcccccataccacacagaacagtttgtccagagtcaggatctagcctcactttcaaactgggatcttcacgctgaagacatttcaacgcatgttccaaatctggctgcttagacagtgatgggggttctatggtacagaagaaaacaggttctggaatctccactccagccaataaaagtctctctgcttcattgttttgtctgtgcttcttttctccctcccgttcgctctacgagctgcagctaatgcactggacttggatgagacaatggtgtctccagtggcagtatgtttaagcccaacagtcaaagcaatgttaccagcagtcaatgaagggatttctacatgttggtcagcaaacggcaaaagcagacgacttattctctccgtgcagtttccattaatattatgaatggccaactggggttttatagtgcctgagtaaatgcgcataaaaaccagtggtcctcgctgcttgtcatggagaactttaaatgccaatgcacataagtcatccttataccactgcagaaattcatagttacgctcttcaggtgaaggtaagtacatagtaacagcatctaacaagggctgtatccctttgtttttcagggcacttccacaaagcacaggcactgctgtctgagctagtgtcactctatgtattgcagtctgtagcttttcagctggtaacaaatcaaaattctcactaaattcttctaaaaccaagtcagcaaattcatcatccaaatctgcaacttgttcaattaaggcattccttgcttcagttgtttccttcagcaattcaggatcattcatttccaagaggggctttctctcaaagtcttttccatcatttgaattgcaattccaaagaagtttttctttcattactacatccaccactcctttgaaagttttggcttcaccaattggtaactgtaaaagcaaaggctttgcctttaacttctctctgatgctttcaactgcatacttaaagcttgctccagttttgtccatcttgtttaaaaaacagattcgaggtatattgtgtttatcagcttgcctccatactgtgagagtctgggcctctacaccagcagaggcatcaaatacagccactgcaccatccaacactcttaggcaccgctcaacctccaaggtaaagtccacatgacctggtgtatcaattagattgactctataacctttccaatcaaatgtaacagcagctgattgaatagtaatgcctctttctcgctcttgggccatgaaatctgtcactgtgtctccatcatcaacatctcccagtgatcttgtatatccggaatagtacaatattctttctgtggtggtagttttgcctgcatcaatatgagccataattccaatattcggattttagctatggaggattgatgatggaatgaagggatttgataycatttcctattaagcctggtagagaactgcaatttcttccaagcgncacatgtggctttaayctttttaaacttgctcttattttatagcagcatatattattaatatacacactgggtattgtctgatgactcattgcaaatatcctcaagttggtcaacatcttgatcctccaaactgttactgtctggcattaggccgcgtgccgcaggccagctctcaccgctgggctcttgaagcaggaggcgcgagccgcgccaaagtctgcaacggcctcaagtctcgacgccagcctaggcaaaaggcaatgtatctaaacgaaaagaaaataggctttctccgctctaccgcctcgggcagccacacctccacacttccggcggtgtaccggccaaatgccgcctgccagcaacttccgtcctcctagctaaaagcggaaaacagaggctcggaaccgctgcgtggttcttgctcttcactcggccgttttaaagggtgactctttcctgtcccggcctgcgtggtgtgggcttgtgggtctttgagacccgaaaattgagagcgttttcgcactccagcggctgctcctggcggctctgcggccgtcaccatgccacagaatgaatatattgaattacaccgtaaacgctatggataccgtttggattaccatgagaaaaagagaaagaaggaaagtcgagaggctcatgaacgttcaaagaaggcaaagaaaatgattggtctgaaggctaagctttaccataaacagcgtcatgctgagaaaatacaaatgaaaaagactatcaagatgcatgaaaagagaaacaccaaacaaaagaatgatgaaaagacaccacagggagcagtacctgcctatctgctggacagagagggacaatctcgagctaaagtactttccaatatgattaaacagaaaagaaaagagaaggcgggaaaatgggaagtccctctgcctaaagtacgtgcccagggagaaacagaagtattaaaagttattcgaacaggaaagagaaagaagaaggcatggaagagaatggttactaaagtgtgctttgttggagatggctttacaagaaaaccacctaaatatgaaagattcatcaggccaatgggcttgcgtttcaagaaagcccatgtaacacatcctgaactgaaagccaccttttgcctaccaatacttggtgtaaagaagaatccctcatccccactgtatacaactttgggtgttattaccaaaggtactgtcattgaagtaaatgtgagcgaattgggccttgtgacrcaaggaggcaaagttatttggggaaaatatgcccaggttaccaacaatcctgaaaatgatggatgtataaatgcagtcttactggtttgacagcaatttcatatataattattgaggactacacaccaattgaagaaactgccattactgtgatgtttctgaatactaccaaacagccatacatgtctgcaatgaagagatttattaaattgtaaacattaaagtggtccagttttataaatggtctttattttg

SEQ ID NO: 1190 - DNA, 1054 bp, Homo sapiens
  misc_feature (567)..(567): n equals a,t,g, or c
  misc_feature (1031)..(1031): n equals a,t,g, or c
  misc_feature (1051)..(1051): n equals a,t,g, or c
ggcacagcttcgccgagcgtgccagcctcacgaagcatagccgggtgcactcgggggagcgccccttccactgtaacgcatgtgggaaatcctttgtggtgtcgtcgagcctgaggaagcacgagcggacccatcgaagcagtgaggccgcgggtgtgccccctgcacaggagctggtggtggggttggcgctgcctgtgggcgtggcaggtgagagttcagccgccccggcagcaggggcggggctkggggaccctccagcagggctgctagggctgcccccggagtcaggtggtgtgatggccacacagtggcaggtggtgggcatgacggtggagcatgtggaatgccaagatgctggtgtccgggaggctcctggtcccttggaaggggcaggcgaggcggggggtgaggaggctgacgagaagcccccccagtttgtgtgccgagagtgcaaggagaccttctccacaatgacgctgctgcgtcggcacgagcgctcacacccggagctccggcccttcccctgcacccagtgcggcaagagcttctctgaccgggctgggntgcgcaaacacagccgcactcacagctcagtgcgcccctacacctgcccccattgtcccaaggccttcttgagtgccagcgacttgcgcaagcatgaacgcacccaccctgtgcccatggggacccccacacccctggagcccctggtggctttgctaggaatgcctgaagaggggccggcctgaagcccatgaccccccagcaccacactccgggagcccagcccccatcgggggcttcctgtacctccttttgcctggctctgctctttagactccagatccctacccctcagcaactagctcccctgtcggccagctaagagagctgggacagtggaggctggcagaagctgagacgtgactgtctaggagtaacactcattaaagctttcattttggcaccaaaaaaaaaaaaaaaaaaaaaaaactcgagggggggcccggtacccaattcgccctatngtaagggaatcgaatttcanaga

SEQ ID NO: 1191 - DNA, 2472 bp, Homo sapiens
gctggagccagggatgctgttaaggttctcccctttttccatgttaacaccattgcctcacgtttctcattgccctcacgtttgccccgcttccctttcagtcagccatcataatcatctttgtttttctccatgacatgaatctgccatcggttaatttgggtttccgttgtttttatttattcatagatttttgttttccctcatccatctttttttgtacagagttcacatgagactctgaatatagtggaggagaagaagcgggcagaggttgggaaagacgaaagagtaatcacagaagaaatgaatggtaaagagatatcacctgggagtggtcctggggagattcgtaaggtggagcctgtgacacaaaaagactccacctccctgtcttctgagagcagcagcagcagcagtgagagtgaggaggaagacgtgggagagtaccgtccccaccaccgagtgaccgagggcaccatcagggaggaacaggagtatgaagaagaggtggaggaagaaccccgcccggcagccaaggtagtagagagggaggaagcagtgcccgaagccagcccagtcacacaaacaggtgccagtgtaatcacagtagaaacagtgatccaggaaaatgtaggtgcccaaaagatacccggagagaagagtgtacacgaaggcgctcttaagcaagacatgggagaagaagcagaggaagagccacagaaagttaacggagaggtgtcccatgttgacattgatgttttgccacaaattatttgttgttcagagccaccagtggtaaaaacagagatggtaacaatttctgatgcctcacaaaggacagaaatctccaccaaggaagtccccattgtccaaactgagaccaaaaccatcacatatgagtctccacagattgatggcggggctggtggtgattcgggcacgttactgaccgcacaaaccatcacatctgagtccgtgtcaacaacgacaaccacacacatcaccaagactgtaaaaggtggaatttctgaaacaagaattgagaaacgcattgtgatcacaggagatggagatattgatcatgaccaggcactggctcaggcgatcagggaagccagagagcagcaccctgacatgtcggtcacaagagtggtggtacacaaagaaacagagttggctgaggaaggggaagattaagtaagaaagtcattttttaaacaacactcaactttgtgaacccctgaagattttttgaccgttccaagtcttaatgccacaccactattccagcgaatttatgctacaactggtaacaatgaccagaagcctgaagaattaaaatgccaacaccaaacctttccttaccagctctggtctatattgctcccatgcatttaatatattattttgttttataaccacttctaaatattctcagttctttctttttgttgttgttaattaaggggttttggttttgttttctgtttactttgtgtgcaactacctgcttttaatgactcactttgatcaaatgacagtgaacaaagccagcccaagctggtaaggtgctgttcacttgaacaggtgctgttgcgcagaaaggaaactctgtgactaatttagatagtggctttccttcttctggattcttttcattgaattctcacagtaaatatttacggagttttcaaattgcagcaaatatactgtatgagaaaatattaatacagattaaaagcctttcttacatcttgaaaattttctaatatttgagaatttcacagggatgttttttatattggacccttttgactttccagtcctgtgactttctacttttagtagagagtcagaatctctggactggagaataatgaagaagttcactgactgtgcactgtgcttagagaccctgccgcaccacagtgccaatgcttgtcagacacatgcccttcggcagcattccagaacaggagggaagagaaagagaaaactttcttcccttctactaaaagattcaggcagcttaaaaccttagtgctttctttcttaacatacccacatttcaattctttccattatttgaacacttgggtagaactcttgctttgtattaaacctctttgtctacacatgtaaaacttaccttttgttattgagcaggcctatctctttcagatagttttatgattcacacaggtttgaggatgctggggagagggggagggggctgtggtggtgttctgttggttacaagaaagttataccatttaaagctggcaccagagacccgatagggacttattaactatattgaacattttttcctttgcctttgaccctatgtatagttacgatgccagattagatttatagcagcctcaagttgtattaaatgatattttgcttcctgtaatactattataaaataaagtttgtttattctctaaaaaaaaaaaaaaaaaa

SEQ ID NO: 1192 - DNA, 1606 bp, Homo sapiens
  misc_feature (84)..(84): n equals a,t,g, or c
cttgatgccaaaaaggcggggggagctctccaccctgtttgacgtgggcggaatctttggtgggatcctggcaggtgatctcanaccgactgggagaaaagggcctccacctgcggcctgatgctgctgctcgcggcccccacgctctacatcttctccaccatcagcaagatggggcttgaggccaccatcgccatgctgctgctcagcggagccctggtcagtgggccctacacactcatcaccaccgccgtctccgccgacctggggactcataaaagtctgaaaggcaacgcgcacgccctctccaccgtgacggccatcattgacgggacgggctctgtaggagcagccctgggccccctgctggctgggctcctctccccgtccggctggagcaatgtgttttacatgctgatgtttgcagatgcctgtgccttactgttcctgatccgcctcatacacaaggagctgagctgcccagggtcagctacgggggaccaagttccatttaaggaacagtgacaccccaccccagtcccgtggagggggtctgggcccacccttcacaactgcctttcaaggacagttcagacaaagggccctgcatggaaagagtgacctccctttgccttttgcacacgcacctggaaaagacacagaagccaacctgagaacccctggtgctattttaaaggagacatattgctgaacagcagtgagaaaagtctgcaggaactgctgcctgagccaagccagagaaccgaagacccggccggccctggctcacaggcgtgtgcccatgcagccacccaaatgcacgcgtgacaacaaggccgggagggtggggggggtgcacaggtagccccgaccctctcaggcattccagccacagaacatcaaagtgagcgagtactgcgctggctgtggcttcagagaacctgtatgtgccacgtggaaaaacaggacaccagagcccaccagacagtgccggccagcagagaagcagaragccagcgccacacaacatcaagaaggccgacaaccaggttggaaaccaagacggagctcagacccaccacatcgccccagaggcttttccagcacccatgatgttccggactgacctaaaaactaattgtcgagaagccaagggtgaggaggcaggaagcacctccggttggaggcacccaggcttgccagccacagagcgccccgaagtcaccgtcatcccagcccctggccttcctgccgccctccggkgccatggcgctgctgttcagctcaggcacaggggcacagcagaggtttgggaagcggtctccccaccggcactgggattggcgggtccaagcccagcaaccggttcgctccacaacacacaccacacctgggactgtttttaatacatagcaacagactgggttatttatttaagatgtgtattgtgtcatatgaagtttaagagacataaatggcattttgttatttattaagacaamctccaattgttctctggctgtttttttcagttgtgtctagcaaaatacttatctgccctttgaaataaaatgtttttgtttaaaaaaaaaaaaaaaaaactcga

SEQ ID NO: 1193 - DNA, 2505 bp, Homo sapiens
cttatagtgatgaggtacctctttgccttcctcaatcatctatcacagtacagcgatgagaatatgatggaccctataacctggccatttgctttggcccaacattgatgcctgtcccagaaatacaggatcaagtgtcttgccaggcacatgtgaatgaaattatcaaaaccatcatcatccaccatgagactattttcccagatgctaaagagctggatggccctgtttatgagaaatgtatggctggagatgactattgcgacasccatacagtgagcacggtacattggaggaagtggaccaagatgctggtacagagccccacacaagtgaagatgaatgtgagccaatagaagcaatagccaagtttgactatgttgggcggtccgccagagaactatccttcaagaagggtgcctccctgctgctgtatcaccgtgcatctgaggactggtgggaaggcaggcacaacgggattgacgggctggtgcctcaccagtatatagtggtgcaggatatggatgatacgttttcagacactctgagccaaaaagccgacagtgaggccagcagtgggccagtcacggaagacaagtcctcatccaaggacatgaactccccgacagaccgtcatcctgacggctatttagccaggcaacgaaaaagaggagagccaccccctccagtaaggcgtcctggcaggaccagtgatggccattgcccgctccaccctccacatgccctttctaactcctcagttgacctagggtccccaagccttgccagtcacccccggggcctgctgcagaaccgtggcctcaacaatgacagtcctgagcggaggcgcaggcctggccatggcagcctgaccaacatcagccggcacgactccctcaagaagatcgacagccctcccattagaaggtccacgtcatcagggcaatacacgggcttcaatgaccacaagccactggacccagagacaattgctcaggatattgaagaaacgatgaacacagctttgaatgaactccgagaactggagagacagagcacagcaaagcatgcccctgatgtggtgctggataccctggagcaagtgaaaaactctcccacccctgccacttccacggaatctctcagccctttgcacaacgttgccctcaggagctccgagcctcagattcgacgtagcacgagctcctccagtgacacaatgagtactttcaagcctatggtggcacccagaatgggcgtgcagctgaagcctccagcccttaggccaaaacctgctgttcttccaaaaacaaatcctaccataggacctgccccacctccccagggtccaacagacaagtcatgcacaatgtaaaaaccagccaagcaaggccataaagggaggtgacttaaaaaagaaaatggattagtgacaaaagtcactgatccwtaactttccttagttttgtgcttataactggagatcttttggcttttctatgttgtcgaatgtaatgtctgagactagctaaattaacacgggcatttgtattttgtaatttttttaaataactggacatatgtcattttaaggacaatagaaacacttagacttacttgaaaatccaatgctgcaccacttgtaatgaaggcaacaccgctctccacattgtacagagcttcaggtttaatgtagcccagctgagtcagaaaggttgtgacctgaaggcagaagaacccgaatgccacacctcattggagtatagccagtgttggtctgtggcacttgggctgaaaggtgataatggcattgcgtggtagctgacaatgagcaccttcggttccatgtggagcggggtttagctcatgcaaaagacttgcaattgtctccatgggacgatcccagtgggactgtcagcccacagctcgagtgggttggatgcttgcctctttcctaacagttatttccccgggtccagcttaaagactcgatggaaggaggtagaacctctgctgttactgcttgaacttaacctgggaaaggagaggaagacaccatctccaaagctattaatgtcactccttttgcgagcatgattaggccccggagatttccaagtccccccatctacacttacaaacgattagaagggtttaattttaaagactttctggttacactactccacgaactcctccaaagatccgttattcaataactgcctagaaaatgtttccatctcctctaaatccctgtgttctcctctgtggaaatgaaggcagcaagaagcacctgaggccttggttcatgcagtgttctcttttgactaaatcacctaggttcctttaaacatgctacaaagcccaggcatggtggtgcacacctgtactcccagctactcgggtggtttacacaggaggatggctttgggcctagtagttcgagtccagcctgggcagcatagtgtgagaccctgtctcttaaaaaaaaaaaaaaaaactcga

SEQ ID NO: 1194 - DNA, 1271 bp, Homo sapiens
ggcacgagcaaaactaactcctccctaaggggtcattcttcataaattacaaaattttttgtgggatcttggatttttgtaaacatgagccacttccatgcttttggccacaccacctttgtggtcatgcataaaattcctctttcagctgacacttatgctctgcttcatgcttgctatatatttaggatttaggaaagtgataatactcatggcacagtatttctgagttcttgttttaacttggcaaatgttttcactaataattttgttggtaaaatatgatattcctaaagaaaatcattttaatttatcatcacttctgacaaaaaatacttggttgaaaaaatattcattgcatctttatgaacatctcccatataatataccagctataatttaaatgttttccctatgtccagtacttctaaatggtcaatagactatggttggccatttggcaaaactgacttctcaagaggaaacaagcatattttgataaaaataatcttgttactcaaggtcattaagtaattgatgaactatgtacaagtttattatatctctttttatcttgtagctacctgtcagtatcacgttttttttcctaaattgtaatccttcatgcacagaaatgttccatgtggcaacttcaaagacaacctgctgagaaaccaagagaatatttaataatgctcaagagcaatgaggcatgaatgatcaaatgaaggtctttccagttagttattgattattctatcatggcaggtaacttcaaacaccacacacaatcttttgaacattaccttcatctcctaatatttctatcactagaagaaattactttccttgaccttccatagcaggcaaatctgttttgcattatttattgatcttataatataatattcttggagggataaatgagactcatcaagttcaaataaattataattgtagaagtcttaaaggtaacccttatattctcatatacttaatgcagaagaaaactgttagttctcatagatggacttctagaacaccatccaggacttaaaagtttaaattgaaagtgaacttttattttagactttttaacaatatatgtcaaagtgccatttggcaactatcccttaacatccagaaaactaatgaagtgcaggtaggttacaccttagcttactagtccttatggttatctccttttctaaaatgacaaaagaacttgaagaattagctgtggaacaaaaaaaaaaaaaaaaaactcgtag

SEQ ID NO: 1195 - DNA, 1748 bp, Homo sapiens
ggcacgaggtagcgtgacagcaaatacgcacaggaaatgccgtggaccctggcaaatgtagtgggtaatttcatgcaagcctggagacacgtcgctctgctggcatgaacctctccatgtgtgttttcacgtcctgcctcaacacctggagcttcccatggaggcacaatcttgaattggggctgaatgaggaggccatgtccccagggatcccctcaatcaatgaaagatggaagcaggtcattgccccagctttccatctgttagaggcaacagtgcttgtggctgtcttgtgcgcttcttggagatcctggtgggatcaagtccccattgctcataccatgaatcaggaaatgtgcccttataatattcctccttctcctcctcctttctctcatcctcgttgccccttcaatcttgtacctaaaatcatctcccaaacaaaccacccaccctcatgttcttcaattagtttcccccwmayaaaaaaccccmaaataaccccaaattagacacacttaatgttgctagcttctytctttgctcctgacagtgtaataataaccttttaatttatatagtattggtgcttaaaatgtatgcttttccttaaattgttagagcttctatatacctcatccatgtgatagttataatagtctgagaagtaaaatggttgtttccagggactgtaagattgaggtgttggggagatcttggtcagaggctacaacatttcaatgagacaggaggagaaagtttaagagctccattgtacaacatggtagctgtagttgataacattatattgtattttttcaaaattgctaacagaagattttaagggttgtcactataaagaaatgataaggatgtaaagcaatgcatatgttaattagctcaatttagccattccacaatgcatccatattttaaaatattatatcgcacatcataaataggtataatttgtatttattaattaaaaatagcttttaaaaacagtaatatcacactcatgaattagaaaattctagtcagatttaatacattttaattgktatatacacaacttcttaccctggtgataaatattttccagtagcccatcctcagttattctactaatgctttttgtaccagtcagtgttctgaaaaaaaaaatcyccttttttgttagtttctgaataatgrgracmttgaaaattggataccccttgcaaaataaaaatgtctcttcaaaatgataactgggtagtaaamctgcttttgmytgtaatagtcatattgaagaaatgctcawmwtttctagctgattaagtcatgtattattgattgttggttttattcattattaagttggtggaatagaactcattggtccttccattatttctttaggaaagttgtacttttagataatggaaagcagtaagtatgtggaattgatgttaaaacacgttcatcgtttatcatgagcaagttcacagtcaagatctttgtccagcaaccaaatataatatatataaaataaagaaaatataagaagacaaactattcaaaacaacttctggagaaaatttccctgccaaagaagggtcacattcaaagtgtgtcacaaaacctaacgtctttcccctatttttcttgttctccctccctctcctgtatgcatcagtgcttccaaagtgctcttcagtcatttattaaagcctctgtcccacaaaaaaaaaaaaaaaaaactcgta

SEQ ID NO: 1196 - DNA, 3707 bp, Homo sapiens
aaagaagcaagccgctaacagctaccaagaagaggaggaagtgggagatgcgctgcttcctgtagaaagaacgttgattgaagwcaaagctgggtggggactagtccctgggmctgcagccgctgctaacacatactcacaacgctgccgccgcgctccgtgggcaactcctactactgctgggctgggctgggctgggctgggctgcgccggagctcgcctgcacagatcagctccggagaggggaaaaccacgctcctcggaccaagcctcgggagctaagccagatctgccagtgagcctcaggctttaggaactgaagagtgtttctgaaagatctatccagcactccgatggccagcaacaacaccgccagcatagcacaagccaggaagctggtagagcagcttaagatggaagccaatatcgacaggataaaggtgtccaaggcagctgcagatttgatggcctactgtgaagcacatgccaaggaagaccccctcctgacccctgttccggcttcagaaaacccgtttagggagaagaagtttttctgtgccatcctttaagtctttgagaggggcctgaagagcctccgggctcctgggacattgatgtagagtttttagtgaagtgggcacctttctagtccacggcatttgaagagagcgaggagaaccattctggaaactctaggctatgcatgtttaaagatctggtcccctttatgagaatgcaagccgatccacatcctgacttaagagatctgattctgacgaactgcctggaggaggggaatatataaaaataaaattggtgtcacttcttttctgctatcccccagccccccccccaaaatcctcatgtttctgcttcatattttgaaaaataacaattaaaacagacagctgtactgaggtaagatatgtgtgaccttcttggaatgaatattgtctttagaataccctttgataagctgagctgtcccgtgtagatgcaattcggtttaatggcattgatgtatagtcactgtgcctttctttttctttcttccttctcctctacccctccttccacccctccccattagagtagtgtggagataaggctggactggtctatcagattgaactccaagaatgatcacacaaaatgtttagggagatgttccccgtggtgtatcctcatggtaacaacgacaaaaaatgccggttgtctttgttctcttttcactattcctaacatgtgtacatgatagctttgattctgcaagtaaaagtaaatcctgtgttgtgactggtgctttcatatatttgtgacaatttttgagtaatattgcatgaaaatgtccctatgttacatccattcagaagttttgttgttttactctaaagctgggaaaggaaatgagagggaaaagaccccggagagggaagaaaatctcagtattttgaaaattgagattacttcagagccttagccacacctaaaatacctcctagttaatagtggtataaatgcctcttcaatacgttttccagaatccaaagcattttggtttatccaggacccagggcagcacagctgtcaccaagcaggagagttaaggattcaccatgagctgggaaatgcttttgccatgagtatgagcaaattccctctttccctgaatcatggacattctagattaaaagaacatttttttgtgctcttaacaagaaaaccatggccctcctttgttcaagtatcagaagaaataaacccacagctccagagaaggtgaccattctcagaactccagctattcactctccagggagaaggacctcaaatcgccactctttgggcggcaggtgcggtccccacggccggctctacgaggaagagttctggctcttttgtccactgagatggtcttggtttttcacttaacaaattttttaatggaatctttgtttttgttctccatcttgtttgttagagtctctcggcctttatttacaaattccttgcaactagagcgctccttccccaagatatggtagtgagagtaatttttcattgtagctgtagtctccatcagtaacagcaggccctggaagacttgatcacctttttctgtgtcattttcagtcaaagagggcctctcttacatcttgtttgctttcaaatccccaaatatcatctccatctcccaattaattttattstctctttcctctctattcgctttctcctgtttttttttttaaaaaaaagcatgaaaaaggaagagaaaaagtttgatatgccaaggacagattttgaaacagacttggtaaatgttttccttagctccttcatgggcatgctggtgaaagaataaatacatccaattaaagctcatgctggggtcggggagaagaggatactgaaacatttgtgaaatgtatgaatgcacttctgtaaccagatacttctgttcttctgttcaaattgtggggtttttgttacagttaggacgcccatgaagatttaggggtgaaaaaaacagcagagtatttattaaactacagcattgtacaattagcttagtaacactatggaataagctaaaacatatcacagtttttacatgggccaaaacatgaattgagtatgtggtcacatgaaaacacggatgaatgaataaaacactctttggtggtgactgaggcatcattagaaggcccagacgatttccactattcacagcatttccttttctcagaaggactctttatatttccatgtaaatctagatctttggagcaattaagatggaattacaatttctagggagcattttaaggaaaatgttttggctttttcataattttatgtcttacagtatggaattataatacgaaaatctttatatgagttttggcttcttggtatttgtacttattcaggggaaaaagtctttcgattacttatgcctctatagagcttaatttcttgagaaattcaacagtcattttcaccagcataattttatcttaaggaataactaataggaaaagtcagcttaattatttaaggccctagtttctacatataatatattcgatagaaatgaaaatctgccgtggaattaactaataagtagtaacaataaacttcatatttagaatgcaaagtctataaagaataattttacatgatcctcaatatcaactccagtttaaaaagtgttatttttaaaacatttgaaaccaagtactgtttaatttcaatcagaagatgcaaatacatactttgatctatgtttgattttgctaataatatttgaaggagattgcctaccaaggacaaaacaataaatttaaaaatcaaacgatttctccatacgctcatagtcacatatggaattttgagaaaataaagcatgctgtctttaggaatttttatacttctttgtctttcttccttaatatttgcttctagctgctcttggcaatgatgaattgttatgtatgcattaatgttttgcagcccaaaagttgttcacatttttcctatataagatctgtggagtgtgtgtttcaaagagagaactacagaaatgttaaagcaggaaaacctgaatgtgatgtgcacattttcatcccacatggacaatgtatgtgttttaataaatggaattttcagattcaaaaaaaaaaaaaaaaaaaaaaaaaaaaaaa

SEQ ID NO: 1197 - DNA, 1307 bp, Homo sapiens
ggcacgagtttcctggtggtggtatccaaaatcttcagtaactaggaaggaaaccagggtctcatggtttaaaagactttgaagcaggaatgttgcatttgacgcctttaaaactacctttttgctgttgggaggagtcgggggcgagccttagcagctgcaccgccatccccatgctggttggtgctgccctgcctctcgtgccgggtgttgcttcagcccagagccagagggctgggtcccgggtcctccacaggtgaccccggtggacacacgcgttcccatcctggcctccgtctctgcttttccacttctacctgcgtgtgggtttgccgccttgtcatcggttgtgtgagtgtcgcagacctttccagagctccggttcactctttccaaacaggcctccctgtcggtggcactgcactcctagaaccttcagtttctacgatggtttgtttggtccttttgaaccaccccaaagaactcaacatggcaaagcaaatggtaaaagcttcccgactgttctactttgggtccgcgcgaagcccactcacgtgtgatctgtgttgcccctctcggtggtcccaggcgatccagccatgccccctgcccctctgcccagatgcttcaggggcccggcttttcaggcttgccctcaccagcggccgtcagccgacactcagggatgtagctaacaccactccgccagtgctttcagtaggaagagctgaggctgcctgggaggcccggggcgaccggaaaagggctctctcaagttctgaaaagagaatctgccaccagatcgaatttcgacccctgagcttgttcggacgtatggtccaaattcagattaaggtggtcacccaacccgagatgtcaggaaaggccttctgcagagaaaatgtccccccacccgccatctgcagccaggtgtgtgccacacggcagccttcccgaaacatagtatggattttaaaaatgtgtttatttttgtttctcaaccactttataacgtattttttaatttattttgtaatgtcttgttttgaagtattgctgctatccttgttatccttcccactgtttttatcactgatttattttgtgaaagttgtacactaatgttctatgtcaaaatcaaaagtatttaatgaaatactagttctatttaatgtggttatggaaccagctggaaacacaaaacaaacagtgattgtacagcaggctgggcccaggaggtcaggttcattttgttacatatgcaataaactcacgactttacaaaaaaaaaaaaaaaaaaaaaaaaa

SEQ ID NO: 1198 - DNA, 2304 bp, Homo sapiens
aattcggcagagccctccctcatgggttgtatttccctaccttcccatacacttctctccctaaggtcttatctaaccatcattctcttcaagttgccatttccattccctacttcccagctatgcacctttctgttccatttggttgacttttatttttttcttctttccagcacatggctttcagttttcctgcctctgctggagttgtcagggttggagccaggagggctttactttttccttttcttctaccaggttagcccggttggtttatgacatctcctcattttcaactctcctcatctcttttcatgtggctttgttggggttggatggctgaggttggctggactgatggttacaaaagaatatgtgagagtattgagggagtgactaaatccctcagggataagagagggaacaggaccttccagaaggttgtgctcttattgtctcagactttgtatatacatgtttatttctgtaaattgctttctccatttggacaaactacaataaccagagtaaaaagctaccaggaatgagttctgttcaaaattacagagatggacattggagtctcagtgagtttgcttgagagttctcggaataatatgaaaatagctttaaaagggacaacaggagagtatgcagagtggagctgcttcttttttttttgatgccgaaattggtttagatagaatgaaactgtctctcttaagattcgaaaaataaaagccaaaacaacccactcatctctcaaatcccggttgagctaaagctacaaatcatattcatttgtaggatacggttgagagatgactctcgagtaatgaaggctcataagcctgggctgtagttagcgtaagaggtaaacaggggccttcttgttttcactcttttggaagctctaattcatttctaattactatctcctggaaaaacaccgtgttgtcattgccttttaaatttctttctcttttcagagaaaacacatattttaggtcattaagaaaaaccttgtcttaatttggatgatgtttttattctacaaaatagaattattatcttgttcgaggcacaatttggtaagaagaagaggctgcatgcattttaatttggcaatgaattaacaataataaagaggatatgacttttccactgktacacagttcagatctacatgcttatgtaggtcagagaagaagcatccttgctatttgaatttttacagggaattggtcaggaggaaaaaataatggcatgtgaaatatcaaaacctttccttaattttcaactcaataacgtgttttgcaattttaaaagtccatgaagaagaagaaaaagaaaaagaaggctttacaattagtaggtgtgaaaaagaaaaaccaatattgttttgtatagacaaggaagcagaatgtggcaaaaattagcttttgttgtttttcatattatgaaatattccccaacacatatgaaagtgtaagtaggcaaaaattttttycycactcataagctgaggttaycttggttattttttgaacaacttagtctgttcttatggtaatttggggaamcgtatgaattgatgggataaacttttccttgagattgtgaatgaaaatgggctcaatggagtgccatggtcttcctcagtgcatagcagattctgaagacatcacatmcacaaattgtccaccacttctagttccaagagaaggtgtgggaaaaaggggtgaagggaccagcattgcctggcaagatggttgggggagtaatcagctggggagaccaccttagtctggatacagacgagagaggggaccagagaggtctcagactttgccattttacttcttgatttactaatgggctccaagtgtgaactgtaatgtagagagtcaggaagaaggtaggtcttaaatcttgttaaaaaatggatacattcttaaatgcttcagcttgtagagaagagagaagaaattttgattattccttatgcctctattaaaatacctgggaaaaccatttactcaattgatttttaccagctgcatttttgtatgacataggtaaactatatttgttttaacaagtaaagaccaaaaatgctgatcgcaaaaagaaaaatacattattcacaattctacctctaatagacgggtactgttgtgtgtactcgtatacacacgtataatataaaatattatatttgtgtgtgtgtgtgtatgtgcgtgtgtgtgtgcgtgtgtgtattctttcatttggcaaaccaaaaaaaaaaaaaaaaaactcgag

SEQ ID NO: 1199 - DNA, 2719 bp, Homo sapiens
  misc_feature (2706)..(2708): n equals a,t,g, or c
  misc_feature (2710)..(2710): n equals a,t,g, or c
  misc_feature (2714)..(2714): n equals a,t,g, or c
gtgcaaaggaaatggtcacactcttggttgaccttagcttagtgggtaagcccaatgagcaaagagaacaaaaacctgaggagtgttggaaaaggggaaactcatcttccaaagtattttgcttctatgagaaagggaatccattacataacattcttggtttctctctgctccctctttcacttctaccagacagaaggagtgaattttctgactagaaatttaaaggacaggaactagcatctgtgctttggtcccttcctcctttttttctttgggatttgcctgtctgcagagagaacacagcctgttctgctccaccattgtataaacatcagagtggaagggtctgccccatgcagttggatgactggagttgtccaacactgtctgactatgtatataaataagtgcctaatttgggggctcagtattaagaagcttgcttgcccacwkyagtawgccatgttctgcaatatcatcttaattagcagtwaaggtgatatttcatctccatcygcttggccatttatcagctggctcttctagaaggtacacagcctcttagcaaatggtggatgtggccaggattaccatgaaaccaccttttggaaagttaccactaaatacactaagtccagtcagtcaggaggcagagtagacttgwttcacatagaactaaggctggacaaaataaagccagagagctgatagcttggatatcattgtgagctagttagacatagactttctgaaaaaccatcagtactagggtcttaacttgttgagtcccacaaacagccttgagaaagaattttagtgcttagtgcaggtcatttttttaagaggtaaacccggaatataccggttcaggaagtaggagagtgaaaaatgcaaaaamaaaaaamaaaaaccatgaaactgtatattaaggaagaagttgctggtatgggaactaggactcaacctcactgaggacctctgggagattgcacagaacactattcttacagttgccccacaacaccccccgccgccccctcactaccaccaccaaggggcaaaaaagctaggccattcacccactcccattggtcatgggttgagggctgttcccaggggcagtattaattccctggcacttccagcttgcctcacacattgatttagcatcctctgaaggtaggggaaggccctcacacaaagactgagaaactgttattgcaaaaaagaactggcagatcatgacagtgactgctacaaatctaggtgttgtgtcaccacagaagaaaacattttatgtaaggctcagtggtcctcacagcttttctatctcacttgacaatgaagatacaatcttacaaggtgtctagccaggaattttatcttcatcaagggtaaagagacgatgggaaacaggatcagagagatgaggacctgccaaaagaaaaaagcacaacaaagtgacatccaacaatataatatatgggaatttaaaatgagacaaagccaagtcctgagcttttttaatgaatggaggawaagcaattctttgagaggatggagtagaacatgcactcagaacaagaataaatgttttaatgtcagtactttgctgaatgtatatgcagaattgacagactccatccatttccatcaagggcatcaaatttcaactattgtttgcttagtctgcaaaaatagccaccctgcatccttgaagcttaattcaactccttcagtaagttttagatgatgggtagttaaaggattaaactgctgcagttgaactcttatgccttataattgatatattgaaaggctaaagcatgttcgattcctgatgatagcaatctgcagtggcatcataagcacattaaattcagactgaaacattcagcgaagttaatattgacttcacaatgttctaagatgtaagtgaagctatgctctttttgccttataaaattagactgcaaaaaaacaatttttgaggatattcccagtcaattgacttggttacagagtgagcaggaaatcaaactctagttaagttcatagatactggtgttttattcatttggaaacagaagagaaaaagagtatgctgtagtaaattgtttataaattctttttaattctaaaggagggggagaaagtgaaagtaaaaagcaaacattattaatctcttactgtcacaaaaaaaacaacccamtcttacacctccatcattgcctaaaagacaaaaactccaaagactggcatttgagactcctcacagtctgccaaaactgcctcctccctcgtcaggtcagtcaccaagtcctttcagttctatctccaaacacatctcagtccctgccaccatggtctgttatctgaactactataacagtttcctaactggcctccctccttcctctctggaccctccagtgtgttccttcgtaacagctagagtggatttttaaaagtcctcccatggagttggagaccagcctggccaacatggtgaaaccccgtctctaccaaaaataataaaattagctgggcatggtggtgcacacttgtaatcccagctacttgagaggcagaggtgggaggatcacttgaaccccggaggtggaggctgcagtgaattgagattgtgccactgcactccagcctgggtgacagagtgagactccatctcaaaaaaaaaaaaannnanaaantcgag

SEQ ID NO: 1200 - DNA, 2600 bp, Homo sapiens
aattcggcacgagctcgtgcgtttctatgctcaagattgttcaattgctgctgctgccgttgtgttttctttcaggatcgaggtgggtaccttcatataatatcttctttttaatttcttctctggcaattctttcctggattctttgctttgcataattatacctacaatgaaaccttagaagaaaagaatatgaataaattgttaatataaagtcctacagaaattaatttatgaaatttctctaaatcacacaaaacttaaatacagatgactactaccctgagactgaaaaatatgttctaatttatagtgctatttttgggcagttttggtgtcagaatacctatcaacacattctttttttattaggaaaaaaaggatgtctacataacaatttgtaaagtgataaaatccattagtttttaagtcttctgatagcattggctattataagaaacaagtatttgctctcgtttttaacgggataataatgctatgtctacataaaatgatttctaccaccttaaatagctcactgtagaaattcatgtataaatggaaccatatagtacatacatatactcttaggtctggcaaatatttgaggttcatccatattttatattcactcatcagtagttgtaaacacattcttaaagtagcattttcagttatgaataagcaaggatgaaataagtattagggtaagggaaatggttgaggctttcctaagtgaagtgtaaaaaccacagctttctttttaatgggatgtctaatatgcatttatctgttcaagcatgttaagatttccatgaaaatgtcctgaaaaatcaagattcttcattgagggtgaggatctcccaatgggagactgctctgaaaagagcatgtgctttttgaattagataacctactataatcatggatgttcttgaatacttagcaaacataccagcatcccaaagtcaccaagataaaccctcctactccaacatcacatgatcttctaattctacctgtcaaaaataagcataacaattaattagaatataattacgttatatacattactccacctagaaaaaaaaatagttcattatgtagagaaatgctttttttagtacatagagaaataaaaaacacagatactcactagtgaacaaaaaatgtccaaagccagccacaacagatcctaatgaaccatacaatattgaatgccgggcgcagggagtattttcaacatctaaaaatcctaggagcttaagggactagaatgaaaaaaaagaacctagattgagtaagaaagtatttcattttggggtgctttggcaaaaatgacaatacaccatttcttttcttgtagttgagggtttaaactagagtatgtgccacgtgacaacctaaatcagcttgcgttgtctttgtccagctttggtatgcagtctgaatctttaaatccgaaaaccttacaaattggaccggaaaacccttaagcagtagggtaacttggagctgtatcttaatttgctaatcaactgacttggaaataggataattcattttatgagctctttaaatgagtttatttgggaatatgcctatcattggaattgaaagcagcatagcttgcttcagtaactccaataatttgggaagcagaaatggaaaaagtaatttgagtcatgtttgcttatgtagtgccgtttaaaattcccctagtaattacctttcatattttattaactaggttaacatcaactgtggttgtaagagtaaatgtttcaccttaagataaacatgggcaatatattaaactctagtctgttttcttgcctgtgaagtgaggctgcacttgattatatttgattctttgttcgtaatacatgggaacgacagctaagtgtggtgaaaaacgcggggatccaaagagctggatttttatctcagatctgccgctaacttttgtatcctataggctacttttatttctatggtctcaatctataacatgaatgggttgggttaaatgactgaagttccttcaagtgctaaaattctttttctacagtcttcattggatttatgtatttcttattcctaatatgtttaactgggatgtctgtcactctagggcggcaagacagacatttaaaagtaacagtcacactgctgaactggcatttctgttaacacaaaagtttagaaaactcacggtaactgttacttgatttaagtgtatataaaattttcagtaaggctgcttttaaaaggaaccactgtccatttaaaggtttcatagttatcttcaatgggttagtattgtttggggcaggacattaaactagaagggattctataggatgaggtgatacctagaaggtaatatattgtaaggcaaaagagattagaagaaatggggcaaggatagtaaaaggcaagtcagattaaaggttgaaacatgaagatattctcaattgtatttctgcctatgtttgcttttttggctcaagcatctgttggaagagacaaaatgtgacttggttcataataaagcaagaattatttactctcggaataaaaaaaaaaaaaaaaaaaaa

SEQ ID NO: 1201 - DNA, 2721 bp, Homo sapiens
ggcacgagaaaaaacttcattggcttgtccgagtgtgaaatgcacatttaggaaggttacatgtcagaccctttgttaaggataacccttggactctggggcatgtggctcttttgtgggaggcaagcacatctgggcttcttgtggaggggaaggtagagtgaaagaaagagggcccactttctaacagggtggagcaaatgagaccaagaaatcattggtaagatgatggttagtctgaccagtttcatgttagtaaattcacttgttcttgggaagcagattaagtagcagaaagtccaggaaagaaagaccagaaggagtaatgagacaagtgatggtggggaagctgaatgttgagggaggtggaggaaggaggagatgagcagtgtcagtaaatactgtgcattcagtagaagttgaagaatcattgttagaagcatttccaaacaaaacactaagcaaaatgggaattaggcttattttgaatgcatctttaacttacgaaagatgtactaattgtgggggtgcctgagtcaggcggagctgacccaggggtgggaacgatggcagctgcccaggacccatgtgcttggcccaggctatgtcctcgtgagaggtactggggtccacggatatgtgttgtggggcagacagtcactgtgggatgtcttcaaagtcagcagttacagaattagtttactttgaattttgttgtctaaatagctcctgctttattttttaaattaaattttttgtttttactatcacaggctggcctaactaatacaaaataagtgatgaacctctggttttaccataatgcaatgtgccacggaaagtttgggggaggtttttaatgtaattgcactctggttaattggctcgtaccaagccctgccttatgacttgtggaaagcttcaaggagttccactgatgcaaaagggtcttttcctagcttcctggtctgatcagtgctatgagatggacagataagtgtgaatgttttatacagaaaatggaaatgatacatttctcttgttaggtgttttcataaaatgtagcattttttttcttatggaaataagagtttcaggtgtctccccacctagggcaaattcatgcacattgtcatgttataccaccattctggaaatgatttctgtggatttgaaattgcacttttaattttatatatgacagcatttaaatgcaaacactaccatgaatttaatgtataaaatgttgtcaaaccaagggaaaaaaccacagttcaccatgtggagtttacttttttttatatgaatgtttgttgtactgtgtctaagcataacttccctaatgtcattacttttacataccagatttgactgaccactaatgtagtactggggataacttaatatcctatgttgtgtcaagactctttgaagactttcttgaattgctttcgtaaaggtctgaacactgttaaggagaaagctgagtatcaacttgcctttctgatagaaatgtttcttgtgccagttttattgttgagatatactatttttttccttttttaattcagttttttaaaaaaacaaatgtattgtggcttccagttaccaggttgtctaggtaatgacagtaaactgactgtagaatgataattgtggtatagtgaccaatagatgccaaacagcttgtggcctcactaaaggtggggtcgcttagtccccgggagtaaaatgagtgacctcagaaacaagaattcctggaaaggcacatgccgaagaggaatatggtataattttaaattttaatgcaaaattttaatttgtctttattttttatcatttgaactgataagcactttttgtgtcaatataaaatatactaaaactgatgaaatgctaagacatgtcttgtgaaggaaggtttcttggagaccacttttatttactcatgagaagtggaagctcctagtatcagaagaagctgatacatagtgtcatgtgctcagtggttgccaaagtctaccaactttggggagctgcagggttctttttgggaggtgggaggaagggagatgagttttgttattttggggttttcaagcattggaaccaaaggccaaataataaacagcctttagtttttaaagtaaaattcattttatttgcagagtacacttgtatggtagactgttaaagacaattttatgactatttatgcacattataatggttacatctgctttttgtctttaaaataaaaaataaaatcagagaaaagcccacctttgaatacgtggctgaagataacagccaagaattggtctttcctaaaaatgcaacagataatgctgctagattgttattttgtttgcacttttttttgattggcattttaaaatcggtatttaaactgaagacattgtcatgttttattaatttaacaaagttgaaagtgactgctctgtacatcatgaccttaacaatgttaatgctgtaagtgaaagttcactgtcgtctgtatactaaatttattggtgtttctaacttaaaagtaagactgcagattatcccccaccagccttagtccaggggtgtggctctgtccgggtgcagtatgcagtcatgtggaaccttgctttctagtcctgggaaaaaagatgtctctaattactggcttcaataaacacgaatccagactgcttaaaaaaaaaaaaaaaaaaa

SEQ ID NO: 1202 - DNA, 2626 bp, Homo sapiens
aattcggcacgagaggcagcggcagctccactcagccagtacccaggatacgctggggaaccttcccccagccatggcttccctggggcagatcctcttctggagcataatttagcatcatcattattctggctgaagcaattgcactcatcattggctttggtatttcagggagacactccatcacagtcactactgtcgcctcagctgggaacattggggaggatggaatcctgagctgcacttttgaacctgacatcaaactttctgatatcgtgatacaatggctgaaggaaggtgttttaggcttggtccatgagttcaaagaaggccaaagatgagctgtcggagcaggatgaaatgttcagaggccgggacagcagtgtttgctgatcaagtgatagttggcaatgcctcttttgcggctgaaaaacgtgcaactcacagatgctggcacctacaaatgttatatcatcacttctaaaggcaaggggaatgctaaccttgagtataaaactggagccttcagcatgccggaagtgaatgtggactataatgccagctcagagaccttgcggtgtgaggctccccgatggttcccccagcccacagtggtctgggcatcccaagttgaccagggagccaacttctcggaagtctccaataccagctttgagctgaactctgagaatgtgaccatgaaggttgtgtctgtgctctacaatgttacgatcaacaacacatactcctgtatgattgaaaatgacattgccaaagcaacaggggatatcaaagtgacagaatcggagatcaaaaggcggagtcacctacagctgctaaactcaaaggcttctctgtgtgtctcttctttctttgccatcagctgggcacttctgcctctcagcccttacctgatgctaaaataatgtgccttggccacaaaaaagcatgcaaagtcattgttacaacagggatctacagaactatttcaccaccagatatgacctagttttatatttctgggaggaaatgaattcatatctagaagtctggagtgagcaaacaagagcaagaaacaaaaagaagccaaaagcagaaggctccaatatgaacaagataaatctatcttcaaagacatattagaagttgggaaaataattcatgtgaactagacaagtgtgttaagagtgataagtaaaatgcacgtggagacaagtgcatccccagatctcagggacctccccctgcctgtcacctggggatgagaggacaggatagtgcatgttctttgtctctgaatttttagttatatgtgctgtaatgttgctctgaggaagcccctggaaagtctatcccaacatatccacatcttatattccacaaattaagctgtagtatgtaccctaagacgctgctaatcgactgccacttcgcaactcaggggcggctgcattttagtaatgggtcaaatgattcactttttatgatgcttccaaaggtgccttggcttctcttcccaactgacaaatgccaaaagttgagaaaaatgatcataattttagcataaacagagcaagtcggcgacaccgattttataaataaactgagcaccttctttttaaacaaacaaatgcgggtttatttctcagatgatgttcatcccgtgaatggtccagggaaggacctttcaccttgactatatggcattatgtcatcacaagctctgaggcttctcctttccatcctgcgtggacagctaagacctcagttttcaatagcatctagagcagtgggactcagctggggtgatttcgccccccatctccgggggaatgtctgaagacaattttggttacctcaatgagggagtggaggaggatacagtgctactaccaactagtggataaaggccagggatgctgctcaaccctcctaccatgtacaggacgtctccccattacaactacccaatccgaagtgtcaaactgtgtcaggactaagaacccctggttttgagtagaaaagggcctggaaagaggggagccaacaaatctgtctgcttcctcacattagtcattggcaaataagcattctgtctctttggctgctgcctcagcacagagagccagaactctatcgggcaccaggataacatctctcagtgaacagagttgacaaggcctatgggaaatgcctgatgggattatcttcagcttgttgagcttctaagtttctttcccttcattctaccctgcaagccaagttctgtaagagaaatgcctgagttctagctcaggttttcttactctgaatttagatctccagacccttcctggccacaattcaaattaaggcaacaaacatataccttccatgaagcacacacagacttttgaaagcaaggacaatgactgcttgaattgaggccttgaggaatgaagctttgaaggaaaagaatactttgtttccagcccccttcccacactcttcatgtgttaaccactgccttcctggaccttggagccacggtgactgtattacatgttgttatagaaaactgattttagagttctgatcgttcaagagaatgattaaatatacatttcctaaaaaaaaaaaaaaaaaa

SEQ ID NO: 1203 - DNA, 1034 bp, Homo sapiens
  misc_feature (1)..(1): n equals a,t,g, or c
ngtgtatataacatatggatattaaaaatggggaattgcacattttaccttttggacagtaatttctatcacagttagaaggaaatgatagtcaaatacacgtttagattaaaactagtttaaaaaattataaatgaatctaatcaaaatgtgaatagtagtcaaaaggataatttaataagcattttacgttactaaatttgttcatttcaatattaactaaatttccctcatcaaagcaatctttgtgatattacttcgctattaaataaagaaaattggatgcaagacaatggagaaactttaaaactaaacaggaccaccctttattcttaaatttgtgtgtgtccaacagttgaattgaatgtctataaggtctaaaggtagaatgtgaatattgccacagagttcattgctctcagtataagattttactttattaatgcagaaggaatatggatatatttctttaagtctgcagatttttttattatggtgcagcttttttttaattatgtttttaaaattatacagttgaaaaatatgccatttcataaagtctgaggattttcgtcaaccttactgaaacacactggtgctttcatcatcagaggtcaaattattatgataactattccattaagtttgccaaacatttgtcgtggttaccagtgcagcctgtcaaattctgctatttgacacagctttggaaagatttagttcttggtttttccgttttgtattagaatgactgttacagttttatttggctgtttaaagccaaattcagctatttaattatggtttcatggacactgttgagcaatgtacagtgtatggtgtgcttacctgtccactctagagcattgcttacaggttttttgttttttaagatgctgtgctgtaaaatactgtcatacttgctatttcctggtacagtgtagtttttcccctttcatttgaataaaagcatggcaccaaatgactccttttctgtttcttgaataaaatgtagtttttggtaaaattatttg

SEQ ID NO: 1204 - DNA, 1589 bp, Homo sapiens
gtcatggggctgtcagctgcatcgcaaatctgtgggctctgcctcctctggctctctcctcattttgcctcacagatatgtcccccagtacacatcttgcccacatctaatcctggctcagtgtctgcgtctcagaggacgtggaccaaggcacttgccgtctcaggcttagttgacccttcaacctcctgagaactctgggcccaggcaaccctagagaactgactcctgtccatgttctcctttctctggaaaccacttagctgcctccgtcatgctctgggcaaaggcagggcaggttgggagaaggaatcagtgaggctgaggccccagcctagaggtcacagggccgcctggcccaggagaaatcccctgcaccaggcatttgcccacatggctacaagtgaacgttgggatacggagtgttcttttttgctatgaaactggagtcatggaggtcctggtcgacattcttccttccaaatacagtggcctggatgggggagggcagtggctatagaggcttcctgcaccgtgtcggggctcttgtccattgcaagctgggaccccaagctacccacatggtgtttggctcccgtctgatagggaaagactttgaagtccacatccaggcataatggatagccaggctgcctaagtggtttgatagatctcccagaaaattcccagatggactctggacgcacagccatgccacagctttcctcctcttgggaacagactaccagtgagaggctttactctgaagccaggtgcaccagggcccctgtgtcttttcctctaaaatctctgcaggtctgcactaagagaaaaatagaaagttcaacttgctaagagccccttttgcttaggaaacttcttttcatggtttttcacttcataaatggacttgattggaatgaacctttgggcaaatgacactgtcaatgggcatcacggccacactctgccttggaaagagtaacacagaggagggttacgcacttacgtcagaagagtagctctgttgagtctatagagatttggccccaggataagggtagcaccttctcttgtccactgtctatgatcaaggtggccagaccaaccctgggggctagaacatggtagaccctactggtgacatctgaaaatggtttggctttacgtagatgaaggaaaagtatgtgcaaagaccttgcccattctgtctcactttttaagagtcaatatgcaatctggaggcaaagatagacaaaccaactgatgtggtttggctgtgtccccacccaaatctcatcttgaattgtagctcccataattccgtgatgtgggagggacctggtgggagataattgaatcatgggggcagtttccccccatactgttcttgtggtagtgaataagtctcaagaggtctgatggtttagaaggggaaaccattttcacttggttctcattctctctcttgcctgccatcatgaagacgtgccttctgccatgattgtgaagttccagccacgtggaactgtgagtccattaaacctctttttctttataaattaaaaaaaaaaaaaaaaaaaactcga

SEQ ID NO: 1205 - DNA, 3161 bp, Homo sapiens
ggcacgagtttctctgttagtattgcacgacataagcaccagagagatgacttttttcctcctttggttcatttgtattttacttgtcctattccaaaagaacagtattgaaatgagacacaggtatcaataaggaaaatttccagagccagaagaaggaaggaactgtcagggaacaattagtgtgatgggaaactatgttatgcttcctcagaaagtatgacaaatatgttacatttacttgagtttctggaaactgcacatgagggatatagcattaatttcctttgtcttgttggtatctgttttaccattcatgaagaaagaaaaaaaatgagagaaaataaaaggtctcagaactcacagagtaaagatatttttctaattgaaagtcaaacttcagagttgtaattctctgttaaagtgggttttggttaaaaattattttctgtaaactaattttataggctattcctatctgtctgttcattagcacagttttggggtcagcaaattattccttatagtttaaaaatattttttataatctttgaaattaacaaacttttatttgatagctattttaagaagttgttacaggtgtaagactttttcttctctaacaaagatgtgcgctgatagagctgaaacacaatatctatgtaaaataaccatggtgcccttcaaggaaacctttgtgccctggcagataaagtgttgtggcatgtcacatatgggaaggggtagggaaaagattccatgtgagtattttgacgtaaagctggtgcatttgagaattcaacaggctgagacatagaaacattgtatcagagtagggtgaacgaatggcttaactcacggaaagcagaccatttggatagcttggggagaaaacagaagtagtgtgagaaatggtggaaaggacactagaaatacttgaggagtttctaactatattctattgagtaaaaacaagacaaaagccatccttgatttgtcaaaagtgataaaaatggtgtaacaagtaaataggattttcctgctgggtttggggtaaacttggaaaaaaaactgatcaatttgtctttttgagccatgtgtttaaaattaagtggaggatcagaagcaataaatatggattaattgactccattcagattgccacttcactgttttatgatagactactgggaatagcaaataataagaaacttaatgtagatttgtttaaaaaatttgttactactgttgtttcaatgtcaagtttattttgcttgttgatgaaactggtcttttatcacataactctaggtcataaaagtatagtttgaatttccaacatttctaatgtttctttttcttttgaaaaataatcaaagaaaaagttctgctatgttctggttacttctgtatgaatctcatagcaatcatgattttccattgtgtttacagaactttcattgtgttttatcgtaaaggaatgaaagaatggattattttttcttttttgtctcaatggagtggtctacattttaaaggtttattttacaaaaggatacttgttacatattaggtttcatcaaaagaagttcaatactaaagataaagagttttccttattgaaatatatattgtaagcttttaaaccaaatgaaagtatgagtggtcatatttatactgtagtaggttttcataatagattttccagattaaaaccatttgtgaaatcatcaaagagatgttaatcctgctttagcattgatgcaaagttaaaataactgacattaaaaaaatcatttgggaagctttattgaatatattgagataagggttaatggagtccttctcttcatgcatactgtggtaccaattccaggagggttcaaaatccatgtgaatgaccccattcacccttaaactgtccaattcctggcctaattcaccttcactctgctgtagctaccagttgcaggactagctgcattttggccagactgctcaccctggaaattttaaccactctctctcttctgattgccctctttttctggttccatctcagctttattccctctgcattgttctttatctttggagctctctaaatcccttaaattcattgggtataggattctgtcatcttcatctttgtaatatcagtgcctagactaagcctggcgtataataggcactcagagatttgaagaataaatggctaaatgactgtatcaaatacttgcccattgtttgctgtttctgaattgtacaaggccatcatgataattgatgatcttaataatgtgagatatgattctctttccttagtaagagagccatcagtttattggatgatagttatatggaaaaggaagaaatgctactgtgataaatatttataattttaaccaagtggtaagtagaattaatgataaataacttacttattgaaggttttcaaaaaattagatgcatcagggtcttacctacatgtcttatgtatttttattcaaaatttttagaaatgaggaaacaggttaagtaaccttttctttatctttaaacaggctaaggatattaagccagtactaacaaacttaaggaccaaactcgtcaatatgtaagatactagaaaaattaatcagaatatattttgaatatcttgtggaagcttctcaaaggatattacattgagcatcataggctggcatgttatttcatgttttaagtaaggcatttgtaagttgtccatttaaatatatttattttagaaagcaaatatatttgtcctgtgaagagcatccttattttgagggatagcttcttgctgttaataaacttcgtagataacatgttggaaagaataccacaggccgggctcagttgctcacgcctgtaatcccagcactttgggaggccgaggtgggcagatcacttgaggtcaggagttccaaaccagcctggccaacatggagaaaccccttctctactaaagtacaaaaattagccaggtgtggtggcatacaccctctggaggctgagacacgagaatcgcttgaacccatgaggtggaggttgctgttagcctagaatagggccactgcattccagcctgggcaatagagtgagactctgtatcaaaaaaaaaaaaaaaaaaaaaaaaa

SEQ ID NO: 1206 - DNA, 1409 bp, Homo sapiens
ggcaccaggacacccaggcctgcatgactcagtgagtttcgcgtgccagcgcacacctccacttgttatataacctgtttgtgtaagttcatacttggctctgagccactattgtctgtaaaaggtataactgtcctggtgatgctgtacagaggctcttggctcttggggctcagctttgcctcaacgtggcttcacgtggcgggcaccctggtgcccagagagagaaccagagctgtccgtcctgcagatggacacaggggagccacagcacggctcgcgctggtgcccagagagagaaagagtgaagctgctgaccctgaaggcaaggcagagtctgccatgcagctgcagatgtcggggtgacaggagccgcagagccggagcaaacggctgagataagagcggacagcgtgagagaagctgcccatgaaagcgctggtgtgaaaaagctgktaatgaaagcggctgctgaataaaaccatattcacctgcctagagctccccaagcgttctttccgctcatccacccactcccctcggaccgcagcatgggctggacctggaccccaggatctgaaaaatgtatttgttgaagaaatacaatttttgtcctgtagaacctgcaatttgctaattgcatttatgtggtatctttgaacatgtctctgtcctctgtatttctggtagttagatctcgggtccaatgtctttgtcaagaatacttcccagatggtgtgtgtacctcagctgcaggacccttatgcttggttgttgcccatcattaccataggttatttcatcagaggtggcaaaatggtgattttctaatttttaattcattttttcctttattttgtttgctggaatacttctataaagagaaactttccctcatcaactatttgatgatgtaaggtgcagtttatataaagccagatacatgctggattcttttcccttactgaccagtttttaaaacgagttggtttcctagtctcctgcaaccagtgattttgatacagaatggttgggctcctggctaaaccccacccttgggcctggagccgcagccctaagtgaaaacagctgaccccgttttccacccaaatgttgcctttttggcctgccatgcccctatcctgtgcccataaaaagacttcagctggcagagcaacacaagcggctgatgcaaggggtcggggatgcaagctgctgaacgtaggggatgcaagcggctgagcatcagagactacagatagacgcagctaacctcagacggtgcagcttcagggaaagatcaccttcttcccgcaccatcccctttccaattccccattctgctgagagccacatccatcgaccaataaaatcctctgcatacactaaaaaaaaaaaaaaaaaaactc

SEQ ID NO: 1207 - DNA, 1931 bp, Homo sapiens
  misc_feature (6)..(6): n equals a,t,g, or c
  misc_feature (184)..(184): n equals a,t,g, or c
ccaggngcaagctttggtgaatccagtgggctgagtggctctatggatgtggttgtttggatgtggtagggagtgcttagcagaatgtgtgtgtatctctgaggctgtcagggggtgggtgggtgtgtgtctctgttggacctgtctctcctcagtctattcctgtcatagatgtgggtgtccntkgtagggaagtgcctgtgtggtctgtttacagtgcagaaggcggctcagcagtgcaatgggctgacagccttggaccgggagtcagaagcctgggttctggttgtagctctggcccctccctgtgatcttcaacaagccacttgctttctctcgtcttcagtttcctcaactagaaaatgaacagcagctgaaattatgttgaagatccttttatacctgaaagagtttcttcatagaaatttctgtggtggggagggggcaatctckgkgtgtctcagtatacctaaaggttggggtgggrcggagttgtgtgtctctgtagaaaggcgaaggggcagttcctatcaggactgtgtatgtctgagcacatgtggctctgtttgggattacgtgtttgtctgtgaatgtgtgtgtgtgttggagggttgtctattgtgtgtggctgtatagggtgtctgtagatcaagatgtgtatacagctgcttctgctattgctggtttgggggaggggactggaaagctgagactgaaaatcaagagggaagaggtgaggaaggcccacccctggggctgggcagtgtagacctgccaccgtgtgaagaaaaatgaaagcacagatagcctaagactgcacaggcctgtgcccacataccttatagcacaggcccaggtggatcatctcatgctaacaccccacatgtgctggtggatccactcccatggatccactcacatgctgcaggcatgcagtagactcacccacagcccactctctggacaccaatcctgggaggtgggagctggaatggggagcaatgagaggagggagtgagactgttggcttaggaagggtggtacctctccctgcatcatacccaggaacttccagctccaaaatattggggtacagctcaccaccccccactccgccaacccattcctacctcctctagtgcagggacccaagttagatgatgagaaaatgccaaacaaagggaggcaaggacagagaaggtacctgcaggacccacaaggcccatactggcccccatctgaacccacctctcccacccagatcaacatccccccaacccctgtgcccccatcatctggaccccagagccagccctcccactaccaccaccaccaccccggggctccttggctcacctttctagaacatgggtacctcctctttttgggggctcatttagactgctgcctttgctgctgacttgcagtgtgactcgggcccattgttcaatctctgtggccctgagacaccagggaaaatctccccccccacaggacatactagttccctggcaggcaagggcttccaactgaggcagtgcatgtgtggcagagagaggcaggaagctggcagtggcagcttctgtgtctagggaggggtgtggctccctccttccctgtctgggaggttggagggaagaatctaggccttagcttgccctcctgccacccttccccttgtagatactgccttaacactccctcctctctcagctgtggctgccacccagccaggtttctccgtgctcactaatttatttccaggaaggtgtgtggaagacatgagccgtgtataatattttttttaacattttcattgcagtattgaccatcatccttggttgtgtatcgtgtaacacaaataatgatattaaaagcatcaaacaagccaaaaaaaaaaaaaaaaaaaaaaaaaaaaaaaaaaaactcga

SEQ ID NO: 1208 - DNA, 2128 bp, Homo sapiens
  misc_feature (2095)..(2095): n equals a,t,g, or c
  misc_feature (2121)..(2121): n equals a,t,g, or c
gggaaaccagggagcaaagtctccagggtgcttgggcaagaccccagatggtctgcagcaacgcacgggcaacacgggatgatcagcgctacgtggtgagaaacttacctccttttgcaggacaacattttccagtccttctgagtaaatcaaagagaagtctcagcttggtgattgcaggtctctaatgcttatttctctgtctctgtctctgtctcttttaacaaaagtctaccagcggcctcaggctcagggcctgtctcaggtaaaagcgggttagggtgtaataacagtgatcggtttcattgtgtttatttttatagctactttctaattatagcaagtgattctgagtttccatttaggatagtaataggaagtttctttttcaagtaaatgtgcataagtaaaaggagactgctcaaaggaaaacagctggtgattgatagaacaggctgtggcattgttgggccccagagggaagggctgtgtgagcatgcaggaaattctgggaaggcagctaaatgcagttgctgcatgggggccaggaagcatttggagacgtggctgggcacagcttggcttttgagcccaagagaggcctgctggggatgtgttgggagccaacctacccctaccagcaggtggaactggttttgccactccaaaacagagttccagctatggggacagccactagagagcagagctaagggcattctaggccaaggggtcacagtccaccctgaactgtgcctcccagcctgaagccagaaagctcagggaggctagcggccctgcccaggcctcagcactgaccctgcacccctaggcccagctggatgacccctaagagcttcctggaatttggatgcagggttattctgtgtgtgctgcctctcagagcatgtcactttgacgtggacatctcgggtctggttctggtgctgtccctgtctcgccacgtgaccctggataagtcatctctccaggccttgatttccccatctgtaaacagaggaacccaaggaacgagtgggctctaactgctgcagcatatgggagatgccaggaggagctggctgtggcaggccatcccagtccatcagacaacttgtagtggatgaagatgcagtgtccatggccagaagaaactcccgtggatgctcaggccaaggctgccagaagcacgaggaggggcagcattgagtgtcatcgggaaaaggcaaagtgatggtcctgaagctgccccatgtggccagtccctttttgggaagcctgaataaatccatttcctgtgcactgtgtgggaagccaacccctcttcagagcacctctgaactcaacaggatcctacacttcttataggcctggcttgatgctgacatccttcagccccagggaagacctaaagatctccaggtcttgaggcacctggaacacctccacctgagaccactttaacatgatttctctgcttgagggattttggaccatgctgtgtgtattcagccctaaaacatgggcgagtgcccgcttgcagttcaaattctcagaggaagttccctgtactccacccagtgccaagtttagtttgtgcaaatttccttaatgtcccctcctgtacaacaggcttatttggtgttaaccctcatatcgggggtctaactctttggttttccagcttttgtgctggaatatcccattaaactgtccatgttgggtattttttctttgttagtaaacatttgttgcatattgttgatagcattttagatttgaagaaataactgacaaaatcaatatcatctgtttcatcattacaaatagactcatagctctttaatttttccatttaacactttaattttccataggcctagattttcaagaagtccaatatctctcacttgaagtgtcttttccctggagtagattgggagatttgagggatatctgtccaaagatgagacagtctgtttctagtttcccatccagcctgatggggcgtctacagtttttaccacaaggtgtcgctgttgaacagattctggtgcagtctagtgcataagctgtccacttctaagaagtgatnacttgccgggccaaagttcctctccntaagtgg

SEQ ID NO: 1209 - DNA, 2283 bp, Homo sapiens
  misc_feature (29)..(29): n equals a,t,g, or c
aaccttaaggccaaaatcaggggcaaccngatagagaaggggaagaaaatttgagattccatttccagaagttgacaggacttggtgattaagcctaatcccaacagagaaaaggaaaagtcaaagatgccttcccatagtttcctagtttaggaaatcagtgatgacatcaattgagctaatgcaagaacaggtgaagtgagaagattaacaattcctgtgctgaagataatgaagttcaaatacctctggaggcagggcaagttacccaacaagaagtcaggctatttaagtttgaatttcaacaacagggtcgagaatgggagcacatgaacactattactcagaagagagaattttaaacctgtggacacagtcttaccctcgatgcaatttcactccatcttgaggcaactgtcaagagttgaccagttccatttactctcatagttgtaaaaattccacaaaattgttaaagtctctgtaagcgataactttaaacagtcagagcttttgtcttgttctgagtcatttttcccctttcctctttgtatgccattctttctgtcaaactatctagttaaggaagatatgtgaggtataaggatgcataatataaaaaaatttttgctattcttattaaacattttgtcttaattgtaaaggtaaagaaaagaacattcgactattctaactttaggaaaacctaagttaaataatgatttacctatgtgactcyccactaattttctctkgcaaatcatcaccccttaattaactgacayccccaaggcagtcaactcaagctgtagctttaaccacagaggttaaacaattcacagtcctgttgttgctgtcagaaacccaagttacactgtacctttgtctaatcaatggtgccctagtttggtgggagatggagaggaagggacctgttggcaaggaaacagctgcttccttcctgaacaagggaaaaccagtaaggtgacagatgggcagagcagaaaagtagccaaaaattgctgtggctcctgtttggcaataatttctggaactgaggcacaactgaatattttaaagtatatcaacaattgagagagtattgtttacctgagtgcgccaaagttcaacaagccttcccacacgtttcccacatttgaaaaacttttaagtttgcagtagtacaaagagcttagccttagcctatgtacagtgggcaaagactgcaaggcactgtcccatttcactttaggattacacccaagcaaatgcactttccggttaaaaaaaaaaaggaaaaaattttattttctctatagtagttatagttgtatgactgactagaattactattaaaatctcattaaaaakgtttttcttaaaagtttacttttatatacttaatttgaaaagatttgttcaaacttttataatttgttctttaatcattccccctccsatccacttcagtacccagaaaactaaatatccaagaattcctgggtaaaacagacaaccactagatagatataactaacgtatttttttaagctgtatagttcttcatcaaatggaaatcggcaaccactgaaaataacattaaaaattagtgtgggcatgaagtatggaattttaaacatcagtttactatgctgattaagtcaacatttatattttcatcagaacttaataatcccataaataaatagagctctcagttatttaaaaaaatcaagggataacatatgtatttagacatattagcagcgtaaagatgtatgcttcaacacacttattggggaaacgtctgaaaatattactacactgaattcaagggtatccaaaggaacctgacatagaagttctctagaataacatcatttcagggaatttcaaaaaagaaaaggggtcaaataggaaatagcctcaaattaattgacaaagttcagtgtttgccccaactagattattctctctctccactgcaaaaagaaagtctcaggatgagtgaatcacttagacgaaagttcatctagtggaataaatggagaagccgcttgggcaggtgacacaggagagtcggtggtagtgctgactttcgctggtgagttacaagaagatccggcactgctgctgtttccatcaagggtatccgaagatacacacacaccaggatctgacagctgtgcaacgtcagaagaaagcatgttggtgatgccctggaaaaatctctttggctgatattcagtttccatttcacattttcttttcactcgtgccgaa

SEQ ID NO: 1210 - DNA, 2742 bp, Homo sapiens
  misc_feature (778)..(778): n equals a,t,g, or c
  misc_feature (780)..(780): n equals a,t,g, or c
  misc_feature (863)..(863): n equals a,t,g, or c
ggcacgaggggaaattctatttttaaatacatgctactttaaataaatgttacttcatcatttgcaaatgactattcaatcaacatgtataaaagttgtggatttctttgcttttatgacaaaagtggtattgtatttttaaactgatcactttattaggtcagagagggtatagttcaaagtgtaattatttattgttaaattgtatatttacaaacattttagttttgaaccattagatatttatgtaatttaagtatgaaagtttaaaaatggttcatataataataggcatgtgataaaatgtcatgataaaagacagccaaataaatattatttcatcctacttagaaagaataattttccagagggaactttactcagttttagagagaaatccaagaatagtgttcttctttcatttttcaacatgatataatcagagaatttggaaaactggtaaatataacctatagtaaaatggtcaggaaaaatactcatttccatttatgataactgaagtgacaaaaagactcctagaagttacattttccctttgtggtatattaaagaacaatgaatataccacactttattctaaaaaggacttttggtgtgaatgtaaaggataatgatcagatttaagtttctttctacaaccacttctaattctattcacgtgatctatttaaaaattccttacttcaacatatttaaatgttgtagccattttgaaacattttagtccctcaagatacagaaatatacaaaaaacatncnagtttcagatccagaattcagtttctccctaaagggaaattcatcatccaatcttctggcgttctttaaactagacactaganccttttcatctagatattgcatatctcatatatattatacatgcatacatgttatgttgttatgcgttgttatttttaaaatccagtatcagtagtaacatatcaaaaaggaatttctaatattccaaggttctcatgttagaatagaaacatattcacaatagtgtttaccagtttcatatatttagagtagtttcacactaaaatgagtgattaggctaggcacggtggctcatacctgtaatcctcgtactttgggaggccaaacaggggggcttgcttgagctcaggagttccagaccagcctggggaacatagtgagaccctgtctctacaaaaaacatttttttttttaaattagctcctcacagtgacacgtgcacctataattccagctacaggggaaactgaagtgggagtatgacttgagctgaggagttagaggcttcagtgagccatggtggcaccactgcactctatcctgggtggcagagtgagagcctgttgcaaattaaaataagtgattaggacaaaaaagatatagggccaaataaatagaatgcttacccacctcaaataaaaagaaaataatatttgttaatatgaaggtgatactggataagtgaagtgcctaggacttttttcttaaataatctagtatattttatgtgaataagggactataaagtagggagatcagcaggactgtaaaagtgggtgtgggagaagaaagtttgctagtcaaacttggtttaaattgactgcctttgtaatagcatgtggctgaatgttttgatctatttataatgaatattttaaggatttgctaatttttgaaaattggcaagaaatactcatttttttcctgtcttgaggtatgccaaaaataaaacttgctagaataaaaaaaaatgaaagtgaaggaatgtcttgtgtgtgctaaaacacctccacttaaagagtttgatatccactagaaaatgttgtttctttaaaaaggggacaaagggcatttgatgcttctcacctttcacggttgtgacaattctcttagacatcttaaattctctaagtggagatttcttatattcttcacagtacacctgtttaaaaattgtagtccacagaaatctgaaactacaaaagaaacttttctcaagatgataactcacaaggagtgtaaattacagttacttcatttgtgggagttttcctatcacttttcaattaataagacaccctggttatgggaattttagtctcactgaaaaactcaatttttctatgcaaattaaatttgcgtatgcaagttacaatttgagtttaagcttgggcctacgctgatggaaggataacaggcaaactggaatgtggtacttgaccatacttagtcagtgcaggaaaaacaacaaaaaaatcttcagaaactttcttaccattgacaggggctagtgtcgatattccttgtggttttcccttattgactgtatctacgccatcacatagcaaaatgtacacaacagcagaaagtagacattttactcatagtttctgcaaaatctgaataaagataaagtttttctattataaataatgccaaagatgtggtcttatagatgtatgcattctaaggatcagggaaaggctgtgaaataaaactctaagttgaacaaaattcaagtagtttatcttttaacagaaatatctccataaaccatatcgatataaaggtgaacaggggttggacacagtggctgaaagcccataattccagtgttttgggaggccaaaatgggaggatggcttgagaataggagttggagaccagcctgggcaacatagaaagacctcatctctacaaaaaaaaaaaaaaaaaaaa

SEQ ID NO: 1211 - DNA, 1294 bp, Homo sapiens
caaatatgtattggtggccctttatatttccgatatttcttgcagcaacagaaatttgcccttcattcagtggagataacttcagtgtgttctccaagagtagtatataagaagacacagcacataaaagaaaagatgagtgtgctaaatgagttcataaattacagatattcaaatgattgaaactaaatcatctatatattgactctaaaattgtaggactatcagaatattttaataaataatatatgtgaaaatctatgtacaaaagatatccaataatttcatgtataagaacatttgtttatttaatctagcagggttttattcattttgataaaatatctctgtaacaattaattgatatacattagttttatacaagtatatgttagtttataagatacataatacatttggtcacaccatgtaactttcattttaaaatacttagcatcttctctttgttttgtctttgcataaaatgttcatgtaactatagttaatcatgtacattagttgagatatcttgtttctagttaaatcattctttagttcattaaagtaaaagagattttagttgtgcccaatggaaaaggaggaaagaaggatcttgtttagttacgttgcctaagaggaagtagtagcttctgtggctgctgctataactaagaatatcctagaatttaagttgttgccatagaaatttattgtttaaccatttttacatgcttacccaagaggagactgaaatagttaatataacattaacataacaagattctttgtcttaacagtatttatattatatgtacttagaattgtcagaaattttaatgtgttaaagttatattggtgattataaagacagtttgttaatttagctttttcggatttctaatgttatttagtaggtagagagaggtagatgaatttgcaagggtgaacatggaagttctgtttataatgtgttagtgtaatattgaaaatagtggtttctaattcagcagtcctgctaatttataaatcttatttttatttgtatacttatttaaagaaaaatggaaatataaaatgtgctaaatatttaattttagcatgtgttaacttttgatacattttctctattattgaaatctattcatttaatctaagagatgaactctgcatgatatcaacagatatagcacatgcatactgaagatttttaagttacatgatttgctttaacatggccctgaaccataaagagggctaaattaaatacctttcttataaaaaaaaaaaaaaaaaa

SEQ ID NO: 1212 - DNA, 930 bp, Homo sapiens
ggcacgaggttactcagcagtttgtgcctcctacacagtcaaagaaagagaaaaaagataaagtagaaaaagaaaaaagtgaaaaggaaacaactagcaaaaagaatagccataagaaaaccaggccaagattgaaaaatgtggatcggagtagtgctcagcatttggaagttactgttggagatctgacagtcattattacagactttaaggagaaaacaaagtcaccgcctgcatctagtgctgcttctgcagatcaacacagtcaaagcggctctagctctgataacacagagagaggaatgtccaggtcatcttcacccagaggagaagcctcatcattgaatggagaatctcattaaagtttattttctccaatttcttagtcacttctgtcctaccatgcaaatacacagattatgccaagaggtaccacattttcatgacagatacattcatgcacaatccataatttgagttttacataaaatagaaatttgttagaatttgttagattttattgcaatgatgcctaccaaacatttccagacttaacattttggtctctgcagttaagtgccatgaaaatgtggttgaattattcattatgcagtgttattggtaagtgtattttcacttttagtttagtgaattctaacacataattcttgaattctctactattggcatgtaacgaatttaaattttttataacatagtgcaagctgcctaaatatgtattatttgagaattgtgaaacagatagttatatgtatacaagtcaaagaacaacttaactattgctgcaacaggtttttcttaatggttatcctcttaaatacacctgctggtacttggtgtggttaaataggaaaattgttattaaataaagaatttgtatgaacttttaaaaaaaaaaaaaaaaaaaaa

SEQ ID NO: 1213 - DNA, 1393 bp, Homo sapiens
ggcacgagcaaccgtgggcgagctctgggtgtgcgggcggcctggcgcggcgctccgctgtgtcagcgtgttatgatgccgtcccgtaccaacctggctactggaatccccagtagtaaagtgaaatattcaaggctctccagcacagacgatggctacattgaccttcagtttaagaaaacccctccaaagatcccttataaggccatcgcgcttgccactgtgctgtttttgattggcgcctttctcattattataggctccctcctgctgtcaggctacatcagcaaagggggggcagaccgggccgttccagtgctgatcattggcattctggtgttcctacccggattttaccacctgcgcatcgcttactatgcatccaaaggctaccgtggttactcctatgatgacattccagactttgatgactagcacccaccccatagctgaggaggagtcacagtggaactgtcccagctttaagatatctagcaaaaactatagctgaggactaaggaattctgcagcttgcaaatgtttaaaaaaataatggccaaatttttggggtcctccccaaaaatgttaagtgaacctacagttagctaattaggacaagctctatttttcatccctgggccctgacaagtttttccacaggaatatgtatcatggaagaatagaggttatcctgtaatggaaaagtgttgcctgccaccaccctctgtagagctgagcatttcttttaaatagtcttcattgccaatttgttcttgtagcaaatggaacaatgtggtatggctaatttcttattattaagtaatttattttaaaaatatctgagtatattatcctgtacacttatccctaccttcatgttcccagtggaagaccttagtaaaatcaaagatcagtgagttcatctgtaatattttttttacttgctttcttactgacagcaaccaggaatttttttatcctgcagagcaagttttcaaaatgtaaatacttcctctgtttaacagtccttggaccattctgatccagttcaccagtaggttggacagcatataatttgcatcattttgtcccttgtaaatcaagatgttctgcagattattcctttaacggccggacttttggctgtttcctaatgaaacatgtagtggttattatttagagtttatagccgtattgctagcaccttgtagtatgtcatcattctgctcatgattccaaggatcagcctggatgcctagaggactagatcaccttagtttgattctattttttagcttgcaaaaagtgacttatattccaaagaaattaaaatgttgaaatccaaatcctagaaataaaatgagttaacttcaaaaaaaaaaaaaaaaaaaaa

SEQ ID NO: 1214 - DNA, 1913 bp, Homo sapiens
aaaaacttggagtcctttttgatttatctctgtctctcacaccccacatcccatccatcagcaaatatttgcatcatgtctcactggatactgcaaccatctccttgctgatctcactgcttttcagcctatttcacaacccagcggttgaaatagttcttttaaaacataggtcagatcatgtcatttctcaaacctaccaaatacttccatttcactcagagtaaaatacaaagtccttataatggccatacacaatctgccccctccccatctccttacccatctcacttcatgtcctgctattttctcctttgtttgtctctgctgcagccacactggccttcttactgttctataaatatgccaggcactttcctgcctcagggtctatgtacttcccatgctttctgctcttccagatttctgcagagctcatttcctacctcctttatgtctttacttgttcatcttctcatgcgactttcctaccatgtttaattgcaaactcctgcccccaacactccatgtctctctttctaccttatttttctccatcatgcttatcactcaccaacagacctcacttatttggtttattgtctgtctgcccctactgacagacagttcttttatctattttgctcattgctatatacttagcacctagatagtgcctggcacatacttggtgcttcaaatacacttgctgaataaagtatgggcatgctatgaaaaggcatagataggtaaggacttttgggtccagattgtgagaaagtcattggcaccaagatgttttcactcaattttctgagtcctattacagaatcctggccaaaagtataatacaccaaagaaccagaattatcataggtgaagtaaaccaggccaattgttttctagatcctcttaggtatttttgtgaattatacatgttatgggaaattttaaacttgtctatactaaagcaaattagaatgctttgataaagcttattttggatttctcagtgcttctccttggtcacaaaatatggcaaggggttctagaaatagatttagtgggggaaggaaagaaactaacatggaatcgagtgacttctaaatttctaaaccccttacatctcatttaaacttttgacaacttttgagtcaagaaacattattccagctatgaatatatacaaattgaggttcgggcctggtgaaatgactcatgctggtaatctcagcactttgggaggccaaggcaagaggacggcttgagcccaggattttgagaccagcataggcaacacagcaagactctctctctacaaaaaattaaaaatttatctgggcatggtgacacacacctgtaatctcagctactcaagacgctgatctgggaggatcacttgagcctaagaaatcaaggctgcagtgagtcatgattgtgccacagcactccagcctgggtgacagagcaagaccttgtctcaaaaaacaaaaaaaaatcaaactgaggttcagagagaaatattaatttctccaattttgcacagccagcaaatggcaggcttagaattccatccactagctaactgagtagtataggacctagaccaagcttgtccaacccacggcccacagactgcatgtggtccaggacatctttgaatatggcctagaacaaatctgtaaactttcttaaacattatgagattgttttgcgattttttttaagctcatcagctatcattggtgttagtgtattttatgtgtggcccaagacaatttttcttccaatgtggcccagggaagccttgaacaccctgacttagactttatagctaatagcttgacaaattaggtgacttaggagaaatcatttaatatttgtctcagttgtctgccaaaaaaaaaaaaaaa

SEQ ID NO: 1215 - DNA, 2502 bp, Homo sapiens
  misc_feature (52)..(52): n equals a,t,g, or c
ggcacagtgggccggggggccggcggcggggaggccggggcctgcaggcccnggtacgacaagatccggactccggcccggactacgaggcgctgccggctggagccactgtcaccacgcacatggtggcaggcgccgtggcagggatcctggagcactgcgtgatgtaccccatcgactgcgtcaagacccggatgcagagtctacagcctgacccagctgcccgctatcgcaatgtgttggaggccctctggaggattataagaacggagggcctatggaggcccatgagggggctgaacgtcacagcaacaggcgcagggcctgcccacgccctttattttgcctgctacgaaaagttaaaaaagacattgagtgatgtaatccaccctgggggcaatagccatattgccaatggtattgagccttcctgtgctggttcccccactttcccaactctttgggctttgctgctgtcagtgctttccagtctcagcatggtttggagctgaagctttgggctgggataggccagattataagggagggacttccaaacctgatgttctcagacaacgggccgcttcaaccctgccttttcctttggggcacctcaacaaagggttacagtatcctcccttacctaccagcttgacttgttcctctcatctccctggcatcaacttctaatgccctggtaatgtggagacacactgaactacccccagtctatgtttgacagttgggtggtgtcctgctccttagggcaggattggaggcgacccagccagccacccaaggaagatactaatgaagcccctgctttttgcctcaccttttcaggatcccaactcaccakaggcagtttgtgttgagaacatgacaaagcctcatgacaaaatgaatgggggtggggccaaggaactgcatgaagaaaccagaaggttgtgtggaagtaagagaaaggatagcagcctagggctttaggaccggctggaaaccaagttgagtgtggagaggatgaggggtagagtagttcaggacctgaacgaaagatctttgtagacaaatgttaggctctgcaaatgggttctgcggcaggactgaggtgggattctgtggtgaggttctgtgagatctgaccacctggcccccgtatctccctccactggtggcaggtgatgtgctggcatccctaggcagcagtgtatctgcttcctgtctggggtgtgagctgcatttattctcagaatgatctttattgataagacttgagctggccttcctatcatggatgtggaatacattagtgaccttacaaagttggtgggaacagatactttaccttcttaaacaggagtttaggagcagtgggtccccatcttttggactagctcttaacgttacttttccccgctgtagtgtagcacagccactccccttcactgggggacctcagtgagttggtcagctctcttggccttacatgtggcagttgttttcttgtttgcaggtgcggccgggtgtgtggcaacattacttcatgatgcagccatgaaccctgcggaagtggtcaagcagaggatgcagatgtacaactcaccataccaccgggtgacagactgtgtacgggcagtgtggcaaaatgaaggggccggggccttttaccgcagctacaccacccagctgaccatgaacgttcctttccaagccattcacttcatgacctatgaattcctgcaggagcactttaacccccagagacggtacaacccaagctcccacgtcctctctggagcttgcgcaggagctgtagctgccgcagccacaaccccactggacgtttgcaaaacactgctcaacacccaggagtccttggctttgaactcacacattacaggacatatcacaggcatggctagtgccttcaggacggtatatcaagtaggtggggtgaccgcctatttccgaggggtgcaggccagagtaatttaccagatcccctccacagccatcgcatggtctgtgtatgagttcttcaaatacctaatcactaaaaggcaagaagagtggagggctggcaagtgaagtagcactgaacgaagccaggggttcagatgacactgctgcatcctggtcacattctctgtctcctggaatgctcccacctcaagtggagttagaaggaaggtagaggggctctcccccaggattttggtgttttgactaacaccagttcctgccaacctctgttgccaccacctttccttccaggccctaagcacgtgcagcaaagcacaccacagcacctttgataacctctctccatcctgggcctgatgacctgctctagactgttatagagggataagcagctcattcccctggttcctaataaaaagcctttaaattaaaaaaaaaaaaaaaagggcggccgctctagaggatccaagcttacgtacgcgtgcatgcgacgtcatagctcttctatagtgtcaccta

SEQ ID NO: 1216 - DNA, 1276 bp, Homo sapiens
  misc_feature (788)..(788): n equals a,t,g, or c
ctgcaggaattcggcacgagtaaagacctgatctccaaataaggtcatattctaaggtgctgaggtttaggacttcaacatatgaatttgggagggaacacaattgagtagcagagtctgaaacagcactataaagaagatagaattatatgtatcattgccctcaaatttamcaagcactgctaacaatattattttttaggtttattgatataagtggaagatcaatttatgaccaatgattttcccacttcaagaatttagtctgtttggacaatggtggctgcaagtattcttagaaggtattatttttatccccactattttgttgtatgtgcatacctgtgttcctagcaactcacattccatctaattataacattcctgttacggctgataacaaatgtttctcagaagacttaaaattgtaacagtttaaattgtaagataaccttagaaagcatctggtctaaaccctccagttttctaagtttcttgcagaaatagaaatgtggatagctatgaggccaagtacatataaccagttatgtctcatgggagtgggatccaggttatctggtttactgtctagtgatgtttccattacatcatgttacataaacctaacctttctccctgggatgttttttgtgactacttcacctaacaattaacctagttgttgataattttgtttttatgctttttatacatctagctccaggaattggatttttggaaaaacaccttaagtaatgccttggtttgtttgttttcttttaatstanttggctgctwtrcatttggatcaagtgttagtaattgaaaagattgctgggattacaggcctgagsccaccacgcccggccagtctttatttttaacttaaagaacttcagaaaaacaaacctacctaaaaaaattaacactcctggttttgttttgttttttgttttgttttacttcagagacagacattttcactgtatacttgtgacttgcaccacaattcaagtctgagattacctaactgatgatgtttattaacacttcagtagaattcttcgcagcagtgaacagtagtgacaggtcattatgtttttcttgctgttttaaatcttcatcttacaatgagttattttgaaattccaaaacatttccctgtattccagaaattgaaaatggttgttcactaaaaagcctcttcttttcctgcttataaatttgccaattttgccattttaaatcacctttcttacgtttctctgaattgtat

SEQ ID NO: 1217 - DNA, 1279 bp, Homo sapiens
aagcacactgccacaaattttgtctatttcatatttgtcccctagagccagccctagcaaatgtgtgagttgggagtagttaatagtaaataagactctgactttacacaagctacacattttatacttttcataaaccacaaagtctctctagaattttttctgccttcactaaaattggactgtagccaagatataaagcaagtcatttggaacctgccgagtgagcactgaagctactttatcatgagatgtgtgttaagaaggctgcagcccacaggagtccagggaaggcggggaccacagaggcacagagtccagcacttggccgctcatgggccttctttctgcctcagaggacgggggcagagaagtgatgaagggaaatgttcttagaggaggaaatatcctttgtcctgttcagagagaccagggccctaccattaggcatactttcagaagcaacctggagaacagctatcaatcatattcaaaaccagtacaagaactgctgcctggtaccctgtgagtcatttctatgaaattccatataaagaatgatgataagtttacacactgtgcaatctcacaatctgaaaataaagttgagttggctgtgttttctctgctcttgtcagaacattgggacaattggtcgttcaaaaacattcatcctcttactgcaagtttatctgggtacttttacctgtgtgttcaaaggcatttcttttcagcagtgatcattataacttcacaaaaaaagatgctgacggatttacttacagggccttaatgttattttgtcccagccaacaccctctaggtcctaaaagtcaaggtacttcagtttatttggcaaacatgacaacattttttttggccctgggcccaacagtttgtacttcatgaaacatattgtacattttacatagtttaatttaaaaaataccttttaagctagttgatctttgactgtcttatttattataacctttcagcacattccaaggttttagttactcaggaaggagttaattaaaatgattttattttggtctgatggatgttttttaaaaggaaaattattattatgaaccttcagcctactttcttgagtgccgtaaaagtgcttgtaaatctttttttttttttaagaagaaagaaaaaaatggtgtttgacgttgatggaaattcaaaaatatatatggaactgaaacattaacttagctaaaataaaagcaatctgtgtttgaaaaaaaaaaaaaaaaaaaaactcgag

SEQ ID NO: 1218 - DNA, 1086 bp, Homo sapiens
agtttagctcttaattcccacagaagtcctttgagacactattattatccccagtttacatgtgaggaaactgaggttctgagaagttaaataacttgcctgaaatccacgtaactagcaaatgatggagccaggatttgaccttagtcattcctgctttggagtctgtcctcttaatacattatatggcgtctctaatttgtgagtgagtgaataagtgttttgagattttaagtatttataccacttgtactccacttttgctggagggtggattctaggcaggagtctgggatgcattgaggatgttaatgaatttagcaaatactcactgagcacctgctttatgtcagggatatgaaagtgcttgacagacaaggttcctgccttcaaagagcatatgttccaggggggaatctgacagtaaacaagtaaacagacatggtaatttcagattatcagtgctatggagaaagttaactgttacagtacattgcagagatgggttctgtaggcagtgtgtcacacaatgtttaatgtcatatagctttcatgatgttggatattatctccccctttttttttcttttcctttttttttttttttagacaggctctggctctgtcaaccaggctggagtgcagtggtgcaacctcagcttactacaaactctgcctctctggctcaaggtatccacttcagactccctagtagctgggactgcaggcacacaccaccacacctggttaatttttttccatattttgtagagacagggtctcactttgttgtccaggctggtcttgaattcctgagctcaagcaatctgcccaccttggcttcccaaagtgctggaattacaggtgtgagccactgtgcttggctcccaattttttttctaattaaccccacatctgctgaattaaaggagagtgttaaatacaaaaatgaatttattatgcaaatctgcagttatcgtgtatgttcttttggacttgtaataagggagtatgttctagtattgaagaaatagaaccagagaggaatactgctgtaaaaattaaaaaaaaaaaaaaaaaactcga

SEQ ID NO: 1219 - DNA, 1276 bp, Homo sapiens
gaacattctagcaggggtaagtgaccatagctgaattcttttcttatcaatcaggaaaatgaaaatccttccttaatcaatttctccaaagtctctgacacataacaacaactccaaaaatgcacctctctttccatcaaactccactgatatgaaaaatgggcaacctgtttttccttgccctgttagtgaacttgtgggtgtacccagtggccactctaaggatctctataatcaacaagacacagtaacaagtgttggcaagcaagtggagaaatcagaacactcacacattgccagtggggatgtaaagtggaaaacagtttggaagttcctcgaaaagttaaacatggaattaacatacaactcagtaattccacttactcctaggtaatatccaaaagaactgaaaacgtatgttaacacaaaaacctgtacacaaatgttcacagggcattattcataatagccaaagagtggaagcaacccaaatgtccaccatctgatgaataaatgagttatatctatataatactattcagccacaaaaatgaaattctgatacatgctacaatgcaaatgaagctttaaaatattatgttttgaggtkgggcatggtggctcatgcctgtaatcccagcactttgggaggctgaggcaggcagatcacttgaggtcacaagtttgagaccagtgtggccaacatggcgaaaccctgtctctgctaaaaatacaaaaattggtcaggtgtggtggcgcacacctgtagtaccagctactcgtgaagctgaggcaggagcattgcttgaacagggaaggtggaggttgcagtgagccaagatcttaccactccactccagcctgggcaccacagtgagactccatccccgccccctacccaaaaaaaagtatatgtgtatatatgttttgaagttagatgtgatttaaaaattagaaaaacaaaatatgtatattaagtgaaaaaagctggcaaaaaccacatattgtatgattccttttataatgaaatgtccagaatccacagagacagaaagtagaatggtgcttggtaagggctggagggaagagggaaaggagagtgactactaacaggtatggatttgtgctgtttttctgaggtgatgaaatgttctagaactagaattgcacaactctgtggatattccaataactactgaaaggggggactttaaggcatgtcaattatacttcaataaatatgttaagttcaaaaaaaaaaaaaaaaaaactcgag

SEQ ID NO: 1220 - DNA, 2757 bp, Homo sapiens
tataaagcctgtaaacacacctaagaaaataaacattttacaaatgaaaaaaaaaaaaaaaaaaaaaaaaaagcagagagggagcgcgccttggctcgctggccttggcggcggctcctcaggagagctggggcgcccacgagaggatccctcacccgggtctctcctcagggatgacatcatccgtccacctccttgtcttcaaggaccacctcctctccatgctgagctgctgccaaggggcctgctgcccatctacacctcacgagggcactaggagcacggtttcctggatcccaccaacatacaaagcagccactcactgacccccaggaccaggatggcaaaggatgaagaggaccggaactgaccagccagctgtccctcttacctaaagacttaaaccaatgccctagtgagggggcattgggcattaagccctgacctttgctatgctcatactttgactctatgagtactttcctataagtctttgcttgtgttcacctgctagcaaactggagtgtttccctccccaagggggtgtcagtctttgtcgactgactctgtcatcacccttatgatgtcctgaatggaaggatccctttgggaaattctcaggagggggacctgggccaagggcttggccagcatcctgctggmaactccaaggccctgggtgggcttctggaatgagcatgctactgaatcaccaaaggcacgccccacctctctgaagatcttcctatccttttctgggggaatggggtcgatgagagcaacctcctagggttgttgtgagaattaaatgagataaaagaggcctcaggcaggatctggcatagaggaggtgatcagcaaatgtttgttgaaaaggtttgacaggtcagtcccttcccacccctcttgcttgtcttacttgtcttatttattctccaacagcactccaggcagcccttgtccacgggctctccttgcatcagccaagcttcttgaaaggcctgtctacacttgctgtcttccttcctcacctccaatttcctcttcaacccactgcttcctgactcgctctactccgtggaagcacgctcacaaaggcacgtgggccgtggccggctgggtcggctgaagaactgcggatggaagctgcggaagaggccctgatggggcccaccatcccggacccaagtcttcttcctggcgggcctctcgtctccttcctggtttgggcggaagccatcacctggatgcctacgtgggaagggacctcgaatgtgggaccccagcccctctccagctcgaaatcggcagactaggatggaagtgccctgtgagctggggggcccttcaaagggccaaggagaaaacgcaggccgagggaccagccttccaaatgggcttcaagctccaatgacctccgctcgccccctcgaaatgtctggaaaacataatgggcagattttctgtcttcaaagtttccggctaaacctcttcaagttctttattgtttgggactgagacactcagccatgttaatgggtagtttcttttgtatttgccttgaaaggccaaaatatttttatattgccacagacaaagccacctatttaaaaatgaactccatgtccgtcgtttcccaccaggagactatgtaccatgtgtgtgtctctatgtattctggggtcttgaaacaggtttctcatggggatggtcattcaccacggtccagaggggcagaacaggcggcgcttgccttgcccagggggcctggggaacgtgggccctcatctcagatctgcccccagtatgtttaggacgcgagccccagaaggatctgggagtaaacttaacattcactgtgtctctgctctgcatccgccatttgtgtgtgtttctggactgtgggctgtgtgtaccttggttggtgactcagtgagaagaagcaggaatgccaaagatactgtgaatgttctgagttttgttgctgttgttgttgagaggttgtttcactggtatctattgcattgtataataaatgaccagatgaatgaatgagtgaagcaagagagaatgaataaacaagtaaataggtaaagaagtaagcaagccaggatgagagtgtgtgtacacaagaccatggttcatccgctttgatggctaggcaatcaatatataaatagaaaaaaaccagtgaatcactaagtaatagggcaacacacaaagcgatatcaggtgattatggactaaggggtatgtgtaactcaaatatatgcctctgacatttgacaatgaaaaagaacctaaatgaaagaaagaatggatgtatgagtagtgaagtgcagaatgagacatagattttgaggcccgtcaaaatgaaaagatgcaagttagggaacaagtgatcaaaagggagaagggaaaggttttttttaaaaaaccaaaacaacaaagaaaggttaaaaaaaaaaacagactagaggatgagtaatgagtaactctgtaaggaggaccatgtcagactattgtaagctaagcattaggactgatacaaataatatatgctcctggcatagaaaaataaaccacagagaacgagttcaaagaatagcaaagaaagaaagaggacccagtgggcgaaagatgagagtgtacttttaccaaaagttatctaagcctgagcacttgaagtctgcacataaataaataaatgacaaaaraaaraaaaaaaggccaaaaagtctacattgcgtgtgtgct

SEQ ID NO: 1221 - DNA, 1547 bp, Homo sapiens
  misc_feature (94)..(94): n equals a,t,g, or c
  misc_feature (1166)..(1166): n equals a,t,g, or c
ttcaaatgtcggaccccaaaagaatttcttctttttcactcttctaaatgaatggctctttcattattgagtctccctttggctcttgtgccgnaggcaggactaggatggaagtgccctgtgagctggggggcccttcaaagggccaaggagaaaacgcaggccgagggaccagccttccaaatgggcttcaagctccaatgacctccgctcgccccctcgaaatgtctggaaaacataatgggcagattttctgtcttcaaagtttccggctaaacctcttcaagttctttattgtttgggactgagacactcagccatgttaatgggtagtttcttttgtatttgccttgaaaggccaaaatatttttatattgccacagacaaagccacctatttaaaaatgaactccatgtccgtcgtttcccaccaggagactatgtaccatgtgtgtgtctctatgtattctggggtcttgaaacaggtttctcatggggatggtcattcaccacggtccagaggggcagaacaggcggcgcttgccttgcccagggggcctggggaacgtgggccctcatctcagatctgcccccagtatgtttaggacgcgagccccagaaggatctgggagtaaacttaacattcactgtgtctctgctctgcatccgccatttgtgtgtgtttctggactgtgggctgtgtgtaccttggttggtgactcagtgagaagaagcaggaatgccaaagatactgtgaatgttctgagttttgttgctgttgttgttgagaggttgtttcactggtatctattgcattgtataataaatgaccagatgaatgaatgagtgaagcaagagagaatgaataaacaagtaaataggtaaagaagtaagcaagccaggatgagagtgtgtgtacacaagaccatggttcatccgctttgatggctaggcaatcaatatataaatagaaaaaaaccagtgaatcactaagtaatagggcaacacacaaagcgatatcaggtgattatggactaaggggtatgtgtaactcaaatatatgcctctgacatttgacaatgaaaaagaacctaaatgaaagaaagaatggatgtatgagtagtgaagtgcagaatgagacatagattttgaggcccgtcaaaatgnaaagatgcaagttagggaacaagtgatcaaaagggagaagggaaaggttttttttaaaaaaccaaaacwacaaagaaaggttaaaaaaaaaaacagactagaggatgagtaatgagtaactctgtaaggaggaccatgtcagactattgtaagctaagcattaggactgatacaaataatatatgctcctggcatagaaaaataaaccacagagaacgagttcaaagaatagcaaagaaagaaagaggacccagtgggcgaaagatgagagtgtacttttaccaaaagttatctaagcctgagcacttgaagtctgcacataaataaataaatgacaaaaraaaraaaaaaaggccaaaaagtctacattgcgtgtgtgct

SEQ ID NO: 1222 - DNA, 1614 bp, Homo sapiens
ggcacgagcggactgacattacctcacacagaagcccacgggaaaagaagacacatcccccagacctcacctaagtgggagtccagagagcctccttgatttaagtggctgtggctttcaaaaagtgttaaggaattcaaaaaaaggagagatctcttagaactgtagagggaaaaacagggggaagtatatttttgtggaaggatttagagatgaggtgacactgtggcagggcctcagagaatggggagcatttgaacttgggaaagtcggggaaggaaaagcatgaactaaaggaagtctgaaggaaaatgtcaattatggggtattgcaacaaaaattagtttagttgctggactagttcaggagggagaagtggtaaaaataacaaacttttattgagcctttacaatgttccagggacaatggtgagcactttatatgaataatttcattaatcttcaaaacaatcctatgagacaggttctcttgtttcctccattttatacatgaggaaacaggaagcttagaaaggttaagcaatttgttcaaggtcacaagaggcagaatcaggtatttaacccagaatcaatgctcatcaccacaacactatcctaggattagattatgaggaaaactgtgctggagtgaaggcctgagactatcttcttcaagtagaagggagccactgaaggactttgaacaatgagaatgacataatcaatgtcattctttaggagggtcaaggtaataatacaatgatcaaggatcaagcatccaaaatacatgcaagaaagacccccaccaagacttcttacaaaagtttaaaaatataaaataaaagtgcagctttcaagcaccaaggtaatttccctgcttcagctaccattaaagaactgaggcagttaataagagaaagacagtcttcatctttccccacctgtatttcatgaattgcttcaggacgtcaggctatggggcaccagtacagaggaggctagagagacaaatgaagcaaatccccaatggtggctgttggaaggtgcaacacaaaagtttcttcatctttaaaacctgcatggaagtaaagatcaattacccatagaagtatggggactacctgtgacaaaatgattaatcccagtgggtggccctactgccaccttgctccttttctgcctgcagtggtatgagacccttagctctttggatataaagagatggatataaagtggatgatgcgctttttatagcaatgtaacacaacaaaatgtgacaagatatggagcagaaaaaacagatataaaaattacttcaagggtgcagtgctcactcttgtaatcccagctgcttgggagactgaggcagaggaatacttaagtacaggagtttgataccagcctgggcaacatagcgagctcccatctctaaaaaaattatttttaacttagctgggtgtggttgcatgcacctgtagtcccagctacctagagggctgagacaggaggatcccttaagcccaggagttcaaggctgcagtgagctatgatcatgccactgcactccagcctgagcgacagagccagactttgtcacaaaaaaaaaaaaaaaaaa

SEQ ID NO: 1223 - DNA, 937 bp, Homo sapiens
cggcacgacggaacgtctgtatttccctctcctgcacgaatcactcatcattcttggagggcttctctgcattcctccttttcttctctcccctcccctgccttttgtcttttctaaagagtctgaactccgatttccatgctctcctgctacattaataagcaaaacctgcttgtgtgtacggttctttactggaaacatgactttttgtttctgtattggttttactgtcatccagttttctagtttaatatctagcaaaactaaatctgaatgtactcgctttttccgttaagtatgccaagcacctcggttgaaaggcttgactcaaaccagaagtcttgctggaattcgtctctgaacacttgaaaaacagaaaccctgagccgcaacaaacatgcctctgtgtgtcgggattgcctttgtctctgcttccatgtggcttttccttttgtagctatgcttagtgacataatcttccctcttctagccttctcctttcaagcctgtctgttaattaaccatgtcagtattggcaagcatttatcttcccccaccctaacatgcaatcttctaagaattttgcaaaattctaaacaaatatagagatggtatatagaattcatatctagaaaactttgattttaatgtgagcttatcaaatttgttctggcttttttggcactaaggcaaaaacatgttaaccagaaataatttattcttcatgtatgtaaaatatttgagaatgtttagccttttattagaattttatttggaaaatatttatctttctacacattttacacttatgttcctttgcttataacccaatttcttaacttttttgttacttaagcaaatatcaattatgttttattatctaataaagtgtaagattcttactatctaaaaaaaaaaaaaaaaaaaaaaaaaaaaa

SEQ ID NO: 1224 - DNA, 1329 bp, Homo sapiens
aatacaggcgctgcacagcctggcccacctgttcattaatgcactcaatttagtactgaatggtctttctcccagcccattcccagcccttcctatttcctttcctattttttttttctccccacactttcttgggactcccaccttggaaggaggaagggctgacctgggttctctccagcccccaggtgcgccgggtcacccgtgccccttcattatggacctgggccctaccggaacccctgccccagttaccacaactcaggccggctggcccgggccatgggctgcgcaaatcaccagcccccaacccagggaggaactggcccctcctagggagcctcttcgacttttttagaaaaatgatctccatttctttccagccatgatgtttagtaaatatttttagtaccgcacttagcagacagctttccaagtgtgctttcttgccacaaaagtgtcctggcaagagccccttatttttaagacatcaggaagccagaccgctttgagttgggagaattttgtagctcaacatatcaagtcctcgatggtatctgagctgcccacacccccacctgccaaggccccacagagcccaaaacagaagggggctgccccagccagcagagcacagagtttctggagctcccatccacagatgcaggagggggtactgatggtaacccccatgtggatttgagggcagcagtccctggcctcaccctagccagcctgggtggctccctagccccaagaggccaggaagggctggaaggcagggcctgcaggtgctccccgccctgagacccaggccccaaatcagcaataatgaacaaacccttggcccagcctgggctggtgacctgggcaccagagaccttgcatccctcctcatcctaggaggcccctaggggtgccccatctcagtgtcccctgaactctttatttgcctaatttatatatatatatatgagatatataaatatatataaaatagctattttgcttaaatttctacagtatgtaaaagtgaaaaaatgatgaagacgggtgcacctgtctgagtttggccctcatgtgagctgtgcccttccctctcctcatgcccccttccagcggcttctgccaaccatggggggctggaccaccatggccactgacccagcccctcagaatcccacactccaatcctttccatttcagtttagtcctaaaagttcatcacagggtctttctttctactccaggactggttttgtttttatatatataaaaaaaaaaaaaaaaaactcgagggggggcccggtacgcaattcccaaggagtt

SEQ ID NO: 1225 - DNA, 2455 bp, Homo sapiens
  misc_feature (894)..(894): n equals a,t,g, or c
  misc_feature (1330)..(1330): n equals a,t,g, or c
  misc_feature (2418)..(2418): n equals a,t,g, or c
  misc_feature (2420)..(2420): n equals a,t,g, or c
  misc_feature (2445)..(2445): n equals a,t,g, or c
gaattcggcacgagttagattccatttttgaagaagaaattcagtggggattacataaatgacaaaatgtatagtttgactaagggtctaagttttactgtcctcagatgaagagcataatgggatgcagaattttatttgaattaaaatgctggtgcattttatgagggaaaaacatcaataaaagagcattaggggtaccttggctctgtgattaggagacatacttctaaataagaacattatttatcaaggctggtaacataacaagaagaatgctggaatatggtttattgctcttggttattttggtcctttttccctcatttccttaaacttatcttcaatttcaaacaaacaggaaaccttgttagagggcaatgtaatatgccacagattgaagcgtatacgagtacttgktactttcgtcacttaatcatatataacgtatgtatgtttgtatttacacctttattacatataggttgttattgggctatcctgtctaataataagctattaagtagaccaatttaaacaagagtatatttcaggagtttattttgtgttagaaaaaamcatgatatcctgatgattctactttagttattcatcttcctcttctttyttttttttcttgagatggattccaaaacctgcctcaggaaggagccatgctgctagtgtctctaaagtggtttcttatcccctgcagcatctgccaaggttctgtttggctgaggatctatgaggcatctgaagctcctatgktttgtctacaaaaatatataggtcagatcaaaatgtaaaatatgtatttttttaattggaaaaaaaaagagaggcttctgtaacatccgaaaggccatctgagccctatctctgagctttggntttctcatctgggtgagggcagtggccctgcaaggtcccccacctcacaggacagctgtgaggaccgcacagaagttctttgaaagctggaaggcaccaggataacatggggtgtgttcttggcagggagggtgtttctgcaaaagcatatttttaacatgcaatttatgaaaaaatttaatatgactgacagaaggacaattttatgaaagtaaatatccatacttctcaatagactattaaaactgtagcactgggttagaattttgtctcatttgattgtagggatgatgataccaaaatctatatgttgtaatattaactcaattctcaattatattctttggctgtcttgtgtggttcaagttcagctctctgcttccgtgtggaatgccaacattttataaaaatatacaactgtaacatttttaacacnaataaaaaatgaggtagtaatgktatggcattatacagtaaattgccttggctgattaaatattagccctactaaawtgtaagtgcttataaaacmccaattttttaagktaaaatatattctaatttaaatcgcaaccttggtgagtcaactctaggtcctgagaaactatgtttactatctgtaatttctgaaccttcattgcatcctaataattttgatttatatgktcatgtatatgtgaaattacagtgttaaagtgkgtgcttatgatagctgctcagagtaaaagtgataaaaacttattgaatattagtataaaaactcmcagaatcctgtagagrctmcatagattcatagatttacctgtttaaattttaaagctaaatctaattatattaagctcagaagaattagaaaatatatataaagcaaaaaatatttgtgaatctttaactttatttgtagtattttcttaccatcaagaaattacaatggtcacatacttagtaactgccacataaatactgtttgcttgtaaatacatgaacttccccctctgaatttttagcatagaaatacaacataaactacatgggttggccacatactcctggaatctggaaatgtgtgagaggaaaatttgataaattattttatgcaagcaaaacaaaagcgctggttgctccagaatactttagatgtcgcgaaaggagcaaagaatgttctttcaatttgtaggaccataattttgcaatcttttataaggaaaaatgttgcaatgagatataatgtttgtgtgaataaagtagtgaatgtttgtttatatttcgacagcataagaagtatataataacctaacacacagatacacatgaatgaaaggctcttttacgttatatttaagatggggaactcatagaagtagcttacagtgaatccttctgaaggctttattgagtactgtgtaaaaactcttgtaaaaatatagaaagattaactgtagaactacaatgagttttgccctttcgccttgcttatatggagatttatttgtcattgggattctatttctaaagctggcactntncgtactaaaatattatatattattnttaaactctt

SEQ ID NO: 1226 - DNA, 834 bp, Homo sapiens
ggcacgagctctcttgctgagagtccaggcctgcctgcctgccagccagaggtgccccttatgcacatccagtcctaccagcctgcttccaggagcctagagtgggaaaggcacctgggggagccctggtgaagggctggacctgacccatggaggcaggaggaagacctggctttcttggtttgtccggccctggggagcagccttccctactcactttccccttgcggcaccaaatggtcactccttccagagcaaaaactggcactcatagcaagccagaacccccatccccatcctcatgggtctgtggctgggtgcaggccatcaaaatggacaccacgagacagaagtggggactgcctggccacctagcgccttcccactccttaagcaagcacaaagaagatgaggcagagaattgtcagagctgaaagttcctttggttgctcacaactcaggtatgcacccatgtggcagccaggcagcggagccctactagactgccagtctcatgcacccagacctgtggccagattgtggcctctggctgcctcaggcattttcctctttgcattgggttttcctgcattagtaactacagctgcaacagacatcctccacattgtgcacactggttttgcctttgtcctcaagagttgatacttggcattagcatgaaacttgtgggtgtgggaggatggagagagaactctaacacaaaacatcttattaaaattgtacttgagagacaaaaaaaaaaactctgttgtattttgacagaattatttttattaaaatacacatccatgagcaaaaaaaaaaaaaaaaaaa

SEQ ID NO: 1227 - DNA, 3371 bp, Homo sapiens
aattcggcagagtgacaggaacaaccggggtacagagccatttkttactggagtacggggccaggtgccacccttagtcactaccaacttcctggtgaaagaccaagggaatgcaagtccccgatacatccgatgtacatcctataatatcccttgcacatctgacatggctaagcaggctcaggtgcccctggcagcagtcatcaaaccgctggcaaggctgcccccagaggaggcttcaccgtatgttgtggaccatggggaatctggccctttgcgctgcaaccgctgcaaagcatacatgtgtcccttcatgcagttcattgaaggagggaggcgtttccagtgctgtttttgcagctgtatcaatgatgttcccccccagtattttcagcacctggatcataccggcaaacgtgtggatgcttatgaccgccctgagctatccctgggctcttatgaattcttggccactgtagattactgcaagaacaataagttccccagccctcctgcctttatcttcatgattgacgtctcctacaatgccatcaggactggtcttgttaggctcctctgtgaggagctcaagtcactgttagactttctacctagggagggtggggcagaagagtcagcaatccgcgttggctttgtcacctacaataaggtgctccacttctataatgtgaagagctcattggcccagccacagatgatggttgtgtctgatgtggctgacatgtttgtgccactgctggatggcttcctggtcaacgtcaatgagtctcgggcagttatcaccagcttattggatcagattccagaaatgtttgcagacacaagggaaacagagacagtatttgtaccagttatccaggctggaatggaggctctgaaggctgctgagtgtgcagggaagctctttctattccatacatccctgcccattgcagaggccccagggaaactgaagaacagagatgacaggaagctgatcaatacagacaaggagaagactctgttccagcctcagacaggtgcctatcagaccctggccaaagagtgtgtggcccaaggctgctgtgtagatctctttctcttccctaaccagtatgtggatgtggccacactctctgttgtgccccagctcactggtggctctgtctacaaatatgcttcctttcaggtggagaacgaccaggagcggttcctgagtgacctgcgtcgtgatgtccagaaggttgttggctttgatgctgtgatgcgggtccggacaagcactggtatccgtgctgtagatttctttggagctttctacatgagcaacacgacagatgtggagctggctgggctagatggggacaaaacagtgactgtggagttcaagcatgacgatcggctcaatgaagagagcggactctyctgcagtgtgccctgctttayaccagctgtgcagggcagcgtcggctccgcatccataatctggccctgaactgctgcacccagctggctgatctatatcgaaactgtgagactgacacgctcatcaactacatggccaagtttgcatatcggggagtcctgaatagccctgtgaaggctgttcgtgacacgctcatcacccagtgtgcccagatcctggcctgttacagaaagaactgtgctagccccttcctgagtgcatgaagctactcccagtttacctgaactgtgtgttgaagagtgatgtcctgcagcctggagctgaagtcactactgatgaccgtgcctatgtccgacagctagttacctccatggatgtgactgagaccaatgtcttcttctaccctcggctcttacctttgacaaagtctcccgttgagagtactaccgaaccaccagcagttcgagcctctgaagagcgtctaagcaatggggatatatatttactggagaatgggctcaacctcttcctctgggtgggagcaagcgtccaacagggtgttgtccagagccttttcagcgtctcctccttcagtcagatcaccagtggtttgagtgttctgccagttctggataatccactgtccaagaaggttcgaggcctcattgatagcttacgggcacagagatcccggtacatgaagcttaccgtggtgaaacaggaagacaagatggagatgctgttcaagcacttcctggtggaagacaagagtctgagtgggggagcatcttatgtggactttctctgtcatatgcacaaggagattcggcagctactgagctaaagcaagtgggtaaatggcatagggcccaggctagcttccagaaagcaccccaggatgtcagagaaattgggacagtaacatatcttatgtaagctgacctcagtctctctggggggagggggagatataaggagacaccttctttctgggctcaagtatcctgccactctgtcatgtcctgctgatggaaggtgcccctgttccctcattctaccctctttttcctgctaatcctgtcataatgaatgtagcttctcagttcactgtatatgattcggtattgggggtttggaggcacccagaccctggcaatattatgtgtccctttggaccagtctcccaagaggagaggggcaggcaggaaagagtggggatcctaaggttactacagggggctcagtgtcatccacaacttcctatattagggataaaacatataggtgcacaagagctggggtatagcccataggtggtggagagaaaagtggtcagtccttcttgggcctggaggttagcagtcaagtttctctgctttcactgctcgctcgctctctcctgcaatgattgatgatcactccgtggatagagaggcacactgtcagaggtgaccggagaactgagttgcaaaatatattaagatctggtagaggtaccagcttcctttccagctggagaggccccaacactggatggttctgtagggagcctagggagcctggtcatcaacttgcaatacctcacagagccagttcacatcccactctgagctcccacgagaaacactgcttctccaggcccggggttgttggggagagaggcagaggcagctggagcgccgttctctcctgctgggacaccgcttgggctttggtattgactgagtggctgacagttatcttccaaccccaactggcttgggggcaggacaagggctaggcttgatggtggccaggcttgcctgctccccacctgggatgcccctgctctggacctctcatttctcttcattggtttatttttcaatgcatctttaatttgtaaagaaataaaataaattaagatgtaaaaaaaaaaaaaaaaaaaaaaaaaaaaaaaaaaaaa

SEQ ID NO: 1228 - DNA, 1094 bp, Homo sapiens
ggcacgaggttcttcctactttcaaattttaattattctagtttcttttaaagactcgttctctgaaatgttttatattttgtttatttgtttaggttccagagttctaaatctggaaagatctacctccatagagacgtacggctcctgttctctagaaagtcaatggaggttgatagcggtgctgcatatgaactcaaatcttacactgaatcaccaacaaaccctcagttttcaccaagatgttgataaggagtgatgatttaaagtatttactcagtacccaagtttgcaagtaaaaattagcatagaatggagtgtaccaaattaacaatcaggagagtggattctctcctgttatcctggaccagtttttatgaaaggattcctgaaatgaaatccatatattccatgtagactggaaaaactcatgtcctaatcctttttgtactgttgaaaccacttcattggacatgttgcaatagcaaaacccccagttagattagtgtttacacattttctcagttatttaatatttaatgttttccttaatactcaagtgatgtttgtctctagtgttctaatgtagcacaaatcctatgtaaaatcatactatgtatttttgacattaatgttgaaatcaaatatatgcacaagtctttaattttgtgtaatgtgttaagtgctgttcatttaagttattgaaaatgagaataaaatgttgagcttctttaaaagtaacacactatgcaagcatgtgtactttttatatctctcatgtttagtttttataacaccatatccaggttgctatctcacatagtagtcctttaacatattgtattagcagtgcaatgtggactaagctgcttcactttccctttgcaagttcagatcatcatgcccattcatagccaggattccttatccccaaaacagttctatttttccttaatcactactatagagtctttacattaaattactgtcgtatgctagataattttctcaaattgttaaaagaatatgtactttggaaacaaattagtatttatattgtaaatatattcaaaaaaaaaaaaaaaaaaaaaaaa

SEQ ID NO: 1229 - DNA, 1243 bp, Homo sapiens
ggcacgagagaacgaggaaaaaaaggaagggagaggaaaagaaaaaaacctaataaaggagaaagtaaagaagcaatacctgacagcaaaagtctggaatccagcaaagaaatcccagagcaacgagaaaacaaacagcagcagaagaagcgaaaagtccaagataaacagaaatcggtatcagtcagcactgtacactagagggttccatgagattattgtagactcatgatgctgctatctcaaccagatgcccaggacaggtgctctagccattaggaccacaaatggacatgtcagttattgctctgtctaaacaacattcccagtagttgctatattcttcatacaagcatagttaacaacaaagagccaaaagatcaaagaagggatactttcagatggttgtcttgtgtgcttctctgcatttttaaaagacaagacattcttgtacatattatcaataggctataagatgtaacaacgaaatgatgacatctggagaagaacatctttcctataaaaatgtgttttcaagctgttgttttaagaacaaaagatagttctgcaaattcaaagatacagtatcccttcaaaacaaataggagttcagggaagagaaacatccttcaaaggacagtgttgttttgaccgggagatctagagagtgctcagaattagggcctggcatttggaatcacaggatttatcatcacagaaacaactgttttaagattagttccatcactctcatcctgtattttttaagaaacacaagagtgcataccagaattgaatataccatatgggattggagaaagacaatgtggaagaatcatagagctggagactacttttgtgctttacaaaactgtgaaggattgtggtccacctggaacaggtctccaatctatgttagcactatgtggctcagcctctgttaccccttggattatatatcaacctgtaaacatgtgcctgtaacttacttccaaaaacaaaatcatacttattagaagaaaattctgattttatagaaaaaaaatagagcaaggagaatataacatgtttgcaaagtcatgtgttttctttctcaatgagggaaaaacaattttattacctgcttaatggtccacctggaactaaaagggatactattttctaacaaggtatatctagtaggggagaaagccaccacaataaatatatttgttaatagtttttcaaaaaaaaaaaaaaaaaa

SEQ ID NO: 1230 - DNA, 818 bp, Homo sapiens
gattttcttacctcaaagctgaagtttttcttcctattataattccactctctgttataactgactcttttctatttctgacccaaagcctaaaactcacatcaaaatatgctgtgaagaaaagtgataagttttcttaaaaatcattaaatgctacctcataaaataaatatatatatgaaacttgaagcatttatagatttctgttgttttcttgtagtgttaacctggatacaggtggttttgatacatcttttctgtttgaagtagcaggcttcccctgcagtgtaggtgatggccacctggtggcacatcacactaatgcatggagcttctcatttgtcttcaggattctgaaagtaaagccaatgtttggatgttatgggagctatgcatttcattgtattgtttcttgttaatagttttagaaaatactcttcacattatagttcagccatcaaaaaaaattcacccagaaatgaaggtactagtattctccatattgcagaaatcgtatttagaatttgctttaataagcagtgagttatagagaacaggattatgtagttagaaaagctaagaaaaatgggaaacgaaaagagttaaggttggacttaatggacatatggtatgggcatatatatgtatttttaaatagtattgctgctgttttaactattttaataaatatattacaaaatttatggcaatttttaaatctttagaattattacctgcgaatatctcttaatgaatttcgttagcttctctttgaaaatggctttttgtggtttttcttaaaaaaaaaaaaaaaaaaa

SEQ ID NO: 1231 - DNA, 847 bp, Homo sapiens
tttttaacaaagtggtccaagggaaaaataatgttttaagtttttatgtgcggattccagacaagcattctttctttttgttcttcctgcactctcctacatttctatgttgttactagacagtgatgtctggttctgacttatttatgtattttttttctatttgtttctggcaatgcacataataagaaatacacatagcaatattcttgctgttgttgttcataaccactgagaaaaaaaagcagcaacaagtaggaataaaagaagcctcagccacagaatggcaagaaacgttatatgttttttagggccactctttgcactcgttttacagacaggttactacttatcagcttactgaccttgggaagacccaacctctgagctamcamttyctcatctgtaacctraggatccagtgaagtcatgtaagacaatgtagcattgtacgcttatgactagaccccagtcatgacatgagctgcttctgtctagaaaatagagggctggcagggcacgttggctcacgactgtaatctcagcactttgggaggccgaggcaggcggatcatgaggtcaggagttcaagaccggcctggccgacatggtgaaccctgtctctactaaaatacaaaawttagctgtgtgtgatggtgcgcgcctgtaatcccagctactgaggaggctgagccaggagaatcgcttgaacctaggaggcggagattgcagtgagccaagatcgcatcactgcgctccagcctggagacagagcgagactccatctaaaaaaaaaaaaaagaaaaaagaaaaaaaaaaaaaaaaaaaaaaaaaaaaaaaactcgag

SEQ ID NO: 1232 - DNA, 662 bp, Homo sapiens
ggcacgagaaagccagctagctttaagatacagtgttgggcatcacattttgacacagagcaggcactcttttctttgcccccaggtgggactaagccaccacaagcctttcctggtgtgtgcagtgggtgatgaatgcttgcctgctcagcacccactccctggtggactgggtcacattactctgactcccccttgagcttcagtccacgtctggttcaagatgtattgactcaacccgaggatccagaggtgggatgtagctctggcctggccagaggactgaggatgctgaatgccatggctacagcaactggtcagctttgggctcatgtcctagtcagagccaatgagatgtaatgttgggatatctgctgggctgttgggaaggggaaaggctgccctgctcatccccattcctgatgctgagggatctgagaaaattacttgtaaaatttgggggtgtctggaaaaaggggagactgatgtctctttctctctacagacatctgatcagctacagagcttgactaacctacccagaggcagaatgatatggtggttaaaagtgggctctgggacgagtttttgccactgtactccagcctggacgacagagtgagactccatctcaaaaaaaaaaaaaaaaaaaaaaactcgag

SEQ ID NO: 1233 - DNA, 2254 bp, Homo sapiens
ctggttcttaaaatgccctttttctcctgcttttaggagctctgtgatcatatcgagctcatctgggttaatttatttatattcacaatatccatggagtacatatggcatcttgtgggcctttagtctgccttctatgaatataagacattatttccccagaatgaaaatgtatatgaagaaagagaaatatgccactggaaagtagttcaaataatgaaagtcttttgcttgttatagccttcctttttttctgttctttttcctttccttccataaaagatttattatatgcttttaggaaaataacaaaagcagaatgtttgctaaccatctatgggtgaaagagtagcaaatttggtttaaggagatgttgtaaataatggtatgacaattcctgggattctgggagtcacttaataaggaaacagaaatagattccaatgccagtgtgccccctaatgagaaaagggaattccttttactgaggcctataatcttgggaatatgctttttaattaaaattataagtctaaaacttttactattactatgactgtttatagctcccaatttaactcacgtaacagaggagtgagtggatgggtgggctagacttaagataataagggagtaaggagtgaaagaaaaccccacctatctcctcacctgaaggccctggacacgtccagcctgctttgggagtaaggcaacaggagattgaaatcaagttggcagttgagttttgaactgtattagactccacagttcaatttccaagagttgtatgaaaataaaactagtaggataaaagacagacatccagtacactcattccttcttcaatgttctattttatcattatagccagtgcctgtggcaggcacactctgagatgggccacagtgttctgtctcccggaatccatacccttgtgtaatcgttaccacttcagtgtaggctggatctagtgactctttactgaaaaatacaaaatggcagaaatgctgggatgccactgattttgttaggttatcaaaacgctgtggcttttgccttgaatttctctccatgctcattttcttactttctgtaataccttacaaaaggagaagcaagctggcataatgagagcaactttatggagaagtccgtgtgagaaggaattggtatctctagccaacagctagggagggtctgagcctgtcagaaaccaatgaatgagtttggaagcagatctgtcagcccctttcaagacttcagatggctgaaactccaactgacaccttgtctggaatctcattaagccatgaagcacgtagctaaacacattctttaccaatatgaactattaagtaataataatctattgttttaatccatgttttcaggttattatagcaatagataacaaatatgcatagtgctcaagtttaaaagggattatatgccattaaatgcacattgcaaatatgattatatggattcatttttccttataggcaatattataagcaaaagtcagattcctggacagcctagcagaatgggattacttttataaaaagatgaccaaagtgtttgcataaaatattcttcacatttcataacaccaaagcaaaagagtacttcacagctcaggggagattgtaaaatactcagatcgcttacagaaccatggggtcgtttcatctctttgacttgtggtatttatttccaccaagttctttttaataaagtctgcggaagtttcccgggtaagttcaaggtgttgttctttctgtagtgcgtatttcaaaaaaaaaaaaaaaaaaaaaagctgacattctaagcctttcaaaagaattcttcttctctttttttgttttatagagataagaaaaatcaaatattgtatttcaattaaagatacaaatcatttaaaagatcagccatttattaatgaacaaatacgttgtcaaagaggtgacaagcaatggtttcagtgattttattttattttcacttcaaattgcttattccagctctaaccacctacattattattatgagctgctgttaactgaacctctattttattcctctttgtccaagagctctacaaacactctctataatccttaaaataactccacaaatggaagacattatttccatttcacagatgaggaaacaaactcggagttatcaggtagttgtctgcctatgaaatggaagaaaaggcatttgaattcaagtttacctagtcctaaaa

SEQ ID NO: 1234 - DNA, 1079 bp, Homo sapiens
ggcacgagtaagtccttgcacaagtgggatatattttgaatattgaccatctagcttgatgtctcatacaaaaagatattttttacacagtttttaatatttccatagtttattttcaaagggactgtaatgcatattacttattaaaagcattttttcccccaactttgatggggaaaagcatatcaacagatacctacttttgtagatggctataaaaattgttacccaaaaggctttcttagagcaaattgtctcttatgattattcctgcctgcctccatgggatctgtctttatattgttggagagaatagcaaacatccataatacatttttttttttttgtggatataacattcaggatagaattgtttgtcatttattgcttagattgatattttgtatacttagggattatgaaaaaagtttgtgttaatattgcattattaaagcacatgtttaaagataattattagattttaagttcacaatgcttcatgtattggtttattctggtgattttatttttactttaggaatttattcttcattgcctgttgaagtccctttgaatcacaaacggtttgtttgtgatctaactcaagctgatcgtcttgccctctatgatttcgtagttgaggagacaaagaaaaagcgctctgattctcraattattgaaaatgacagcgatctctttgtagacttggctgccaaaatcaatcaagacaatagtcgaaaaagtccaaaatcctaccttgaaatcctggcagaagtacgagattataaaagaagacgccagtcctatagagccaagaatgttcacataaccaagaaatcatatactgaggtgattcgagatgtgataaatgtgcacatggaagaactcagcaatcattggcaagaagagcaagagaaggcagaggatgatgccgaaaagaatgaagaaaggcgatcagcttcagtagattcacggcagtctggtggaagctatttggatgctgagtgttcacgacatagaagggataggagtagaagcccacataaaaaaaaaaaaaaaaaaaaaaaaaaaaaaaaaaa

SEQ ID NO: 1235 - DNA, 2166 bp, Homo sapiens
gctcgaaattaaccctcactaaagggaacaaaagctggagctccaccgcggtggcggccgctctagaactagtggatcccccgggctgcaggaattcggcacgagctgcacccagccttgttcttcctttttgaatgatattttcaatgagtatttttgaatgacattttcaagtctgggctgacagttttttctttcatcacttttaagatgtcagtggttaaatgttgtctttttgcttccatggtttctgatgagaagtttgatataattcttacctttgttcatctctatgtaatgtttcttgtttgactgccttcaagatcttctcttcgtcttttgttttcagcagtttgaatatgactgggtattgaatatgactcagggtattatttttctggtatgtattcttgatgttctctgaggttttggatttgtggtttggtatctgtcaagaattttggaaaattcttggctattatttcttcaaatatttcttttgccttgtctttttcccttcttctaggattccagttacacacatgttaaactatttgatagtgtcccaaaactcttggatgctctgttctggtttgtttgcttttaaaaactcttatttcgttgcggttcagtttggatggtatctactgatgtgtcttcaagttctttactcactgtatagagtataccaatgagcctattggaagcatcgtttatctctctaattgtgtttttaatttctggcttttctatttgattattatagttttcatgtctctgatgaaataactttcttttaaattatttatttatttagagatagagtcttgctctctaatccaggctagagtgcagtgatgtgatcacagctcactacagcctcaaactcctgggctcaagcgatccacgtgcttcagcctccccggaagctaggtctacaggtgtgtgccaccacacctggcttttaaatttttttttatagagaaggggtcttactgtgttgcccaggctggtcctgaactcccggcctcaagtcatcctcctgccttggcctcccaaagtgttgggattaccaatgtgagccaccgtgcctgacctgaaataactttctatcttgcatgttgtctctcctttaactccttcaagatattaattatagttattttgaatttcctgtctggtagtttcaaaacctacatcatattcgggtctggttctggtgatttccttgtcttttaagactacttagttattaagtatatatatatatatatatatatatatatatatatatatatatatagacacacacacacatatacacatatatatacatatatatatatatatgtatattttaagtccttgaacacataatagctgctttaaagtatttatctgctgtgtccaacatttggttcatcttggccagtttctattgactgccttttttcttaactgtgcgtcacattttcctgtttctttgcatctacaagtttttgattgtgtactggacattatggatgatatattgtaaaaactctagattctgttatctttccttgaagagtatttttgtcctgtggaactcaaatcataaattttgaaaatcaaacagcaacgatagactataacagccacaaaacctaaaataattcatccaaaaatccagactggaagatgaaatgacactcttcggaaagcaactgcttttattcaagagctctgacagttgagaatcaagatcaaatcaataagatacagaagtgtagtaatcatgcatgctgtttaaacacccagaagatagctcttgattttctgtgaaaattaaggagaggtgggccagtccacctgttagtaaaaaatgttatttaagtatttctgaagatcttttatcccaagtgcctctgcttctgcctcaactctgtgccttaaatgttcccaaaacggacagccaggcgcggtgctcacgcctgtaatcccagcactttgggaggccaaagcaggcagctcacgaggtcaggagttcaagaccagtctggccaacacagtgaaaccccgtcactactaaaaatacaaaaaaagttagccgggcatggtggtgtgtgcctgtaatcccagctactcgagggggggcccggtacccaattcgccctatagtgagtc

SEQ ID NO: 1236 - DNA, 632 bp, Homo sapiens
ggcacgagttactcttcagttctcaccatttttacccttctgcaaagtctcttgtaattcctaagtaatgaaatgaaaagtacaaatttcttaaaacaagctctgttctttttcttctggaaaacttgtgtagtttgtcctgtgtatctgtttctcatgaggagaccggctttctgtggcccacgtgaacactgagtaagaaacaaaagactgtggtctccaggacacagtgtgtgtttgtcctctgccatggttattcaccaagtggagtccagcagtttaggaatcgggaggtctcccatgatgagttgtcatcttctgaattgctgcaagtgacaccaaaggggcccccctaccagtttctcacttcccagtctcactactggatcagctcttaggagccaggagagttcactgctgtggctaggatagaaaagggcagctagtgccccagggtagatcttggaaaatattttttgggaaaaatgtaattaaggccacccctaaaatagatactgtatctggctgtactatactaacagtgatttgcctgcatgtgtttgatagagatttctaccatgtactgcttggtgctggatagtctatcacagcaaaaaaaaaaaaaaaaaaaa

SEQ ID NO: 1237 - DNA, 1104 bp, Homo sapiens
  misc_feature (453)..(453): n equals a,t,g, or c
  misc_feature (781)..(781): n equals a,t,g, or c
ctgcaggaattcggcacgaggtgagactctgtctcaaaaaacaaacaaacaaacaaaaaattaccaatcttcaactattatcaagtcatgattatgaacattaatccttagtttgtgcttttttagaagtagtaaatataggagtttgggttggcatgcactaatccaagcatttaagtggagatttggaatgtgatgggcagttctacatttattctctttttttcctttcttttatttagtcctttcctttctccctcccccacaacctccttatatttcttcttcatctactctcgcttgatattttctgcaaagcgctgcctgggccccttgacctcacaagaagctctctgacgaaacgcttaagaaaaacaaggtattatgcattatcctacacattctgcaatcgccctagcaatttagtaactacagtccaatttaaaccaggcntcaaggcaacaaaattgcaccaaatgccaactaatttaccaaacttatagaaggaatatttgggagtctattcccttcaacccatctgattcatattattgactcatttagaaaacagaaagtgaacagagacaagtttttaaggagtttggtttcatgcaaatgacttgcaattgcagcccmttatttttataccacgacttccattagtccatatcccctgtcagactgtgaccagtgtcaatgttttcaaaagcacaccaggacaggcatggaactcatcagcctgtgtcaaaggtcgctctcattaaggagtcaaaatgaaaanttcagtgtctctaacacatcgcatagctctccctggtactcccacccccagtcctgaaatccagggccagctaagcacctccagctccccagacattcaaataagatcaagatgacagggcaagaaaatgaatagagttcttacccggctggacctcataatctggtactgattgaaacaaccagaaagctgtttgccaggtcttatagcaccatttcctgaggttaaacataacatctcaaaatgaagcaattaggggtttctccaaaacaagagtcttcagtaattaaaaaaaaaaaaaaaaaaaaaaaaaaaaaactcga

SEQ ID NO: 1238 - DNA, 924 bp, Homo sapiens
ggcacgaggtcaggttgggtaggagagaggagagtcttggaggggctgctccatgggggtcacacctctctcctgtgggttttcgctggtgattgagttctgaggcatttgctgcattgactgttgtagctttaactcgtgtgcacgtgtgacacataaagccccaagagaagggctgcctggctcagatgcacttccatgctgattatatgcatgggtgttgaaagcagtgctggctgagcagcgatcccagtgcagtttgactttattctttgctcaaataggtgaaggcccacggtcccggcctcgaaggtggtctcgtgggcaagcctgccgagttcaccatcgataccaaaggagctggtactggaggtctgggcttaacggtggaaggtccgtgcgaggccaaaatcgagtgctccgacaatggtgatgggacctgctccgtctcttaccttcccacaaaacccggggagtacttcgtcaacatcctctttgaagaagtccacatacctgggtctcccttcaaagctgacattgaaatgccctttgacccctctaaagtcgtggcatcggggccaggtctcgagcacgggaaggtgggtgaagctggcctccttagcgtcgactgctcggaagcgggaccgggggccctgggcctggaagctgtctcggactcgggaacaaaagccgaagtcagtattcagaacaacaaagatggcacctacgcggtgacctacgtgcccctgacggccggcatgtacacgttgaccatgaagtatggtggcgaactcgtgccacacttccccgcccgggtcaaggtggagcccgccgtggacaccagcaggatcaaagtctttggaccaggaatagaagggaaaggtgggtttcatttaaaaaaaaaaaaaaaaaaaaaaaaaaaaa

SEQ ID NO: 1239 - DNA, 1492 bp, Homo sapiens
agtttctaaaactctgtcatttcaataatgttataaattgaatcatacagtatgtaattttatgggattcgctttttttctgttgatctctttttttctgagtcatctcagctgttgtgtgtatcaatagttcatttccttttactgttttgtttggtttaactcattgacctattgaaggatatctgggctcattccagtctgtgaataatgctgctgtggacattcatgtgcaagtttttgtgtgaacattaagttttcatttctttaagataaatgcccaggagtgaaactgatgggttgtatgtagttacaaactgccaagctgttttccagagttggcggtaccattctaatttcccatgacaattttttgaagagtccaagctagttgctttagagtgcctcacctacattttttaattgtctgactttttcctaatgacatcacttaatttgttcctcaatctcctgaatttcctatagactggaggttaggtctggtggtttgattagattttttaaaaaaatatgacttcatctgtgatgctgtgtactttatgttgcataacatgaaccctaagaacagagtgagctgctggacagcaagtttcatggggtgcagtaattaacacaccacatagtataaatctgaaataatgacaaatgtgttaagggccttgggatattgggccatgtactctgaggagacaaggtgaggtgcaggttcctgcccctaaagaactctatcttttgagattagcaactaacagtgtgagcccactaataggatgtgaaagttgtcaaaatcaagttctggtcattgtgttaaaaatcctaacaaatagagctggggaaggccgtgaaaggacgattttcatgcacagatgtctgataatgaggactatcattaaaagactgcacaaaaccacaccttgcacaaaggccatcacaacctgacacacacaaaaaatacttctatgaggacatttgcccagcaactccctgtccaatgtccaactggcaacatccttgttattgatccttgtagccaaggataattctctcaaaacaatcatttttgctttaaaaaccgttgtcttccttgacctccctgtatatgcacatagtttactgtggcacttgtattcttattgcaatgcctactcctgaataaacatcattttctttcagagagtctccctctctgttatttaggctgacaaggatatgccaagaagtagcttggatatagcagttaactctgcctttaggatatgtgtatggggatataagagttaactaaaagctgacctttgagttggtccttgaataaaagaagaatagattccaaaaataagaggaataaataatgatcctgagctaggagagtacattttgcagacctttggtttccatattaagaaattcagatttttatgtacaataaagaagttctggaattctcaaaaaaaaaaaaaaaaaactcgag

SEQ ID NO: 1240 - DNA, 638 bp, Homo sapiens
ggcacgagggaccccaaaacccaatgatcctgcagcagcccttgcagcgaggcccccagggaggggcccagcgcctcccgcgggccgccttgggggtgacttggggcctggacgccagggagcctctgcgcaagcagtttctgtctgaggagaacatggccacccacttctctcaactcagcctgcacaatgaccacccctactgcagcccccccatgaccttctccccagccctgcccccactcaggagcccttgctctgagctgcttctctggcgctatcctggcagcctcatccctgaggccctccgtctgctgaggctgggggacacccccagtcccccctaccctgcaaccccagctggggacataatggagctctgagtgctggtggacagtgcccctcccaccttccttcttccccacaacagaagagaccagcgactcccgcaaagggacaaggttcctccctctcctgcagagtaggcatctgggcaccaagaccttccctcaacagaggacactgagcccaacggagttctgggatgggaggggtgggtgcatgggaagggaggcatcccacccccaagaagaactgaataaagattgctgagcaaaaaaaaaaaaaaaaaaaaaaaa

SEQ ID NO: 1241 - DNA, 944 bp, Homo sapiens
  misc_feature (864)..(864): n equals a,t,g, or c
  misc_feature (939)..(939): n equals a,t,g, or c
  misc_feature (944)..(944): n equals a,t,g, or c
ctttcgcgtgggcggacgcgtgggcggacgcgtgggcggacrsgtrggggaaaggggacttgtggtagtggaccatacctggggaccaaaagagacccactgtaattgatgcattgtggcccctgatcttccctgtctcacacttcttttctcccatcccggttgcaatctcactcagacatcacagtaccaccccaggggtggcagtagacaacaacccagaaatttagacagggatctcttacctttggaaaataggggttaggcatgaaggtggttgtgattaagaagatggttttgttattaaatagcattaaactggaattgacaagagtgttgagcatccctgtctaacctgctctttctctttggtgccccttatctcaccccttccttggaatttaataagtctcaggcatttccaattgtagactaaaaccactcttagcatctcctctagtattttccatgtatcaggamagaggtgtcttatgtagggagggggcaagtatgaagtaaggtaattatatactactctcattcaggattcttgctcccatgctgctgtcccttcaggctcacatgcacaggaatgctacatgatggccagctgcttccctccttggttatcatccactgcagctgctagttagaaaggtttggagggatgacttttagtaaatcatggggattttattgatttattttcacttttgggattttgtggggtgggagtggggagcaggaattgcactcagacatgacatttcaattcatctctgctaatgaaaagggttctttctcttgggggaaatgtgtgtgtcagttctgtcagctgcaagttcttgtataatgaagtcaatnccatcaggccaaggaaataaaataattgcttaccttaaaaaaaaaaaaaaaaaaaaaaaaaaactcgaggggggncccgn

SEQ ID NO: 1242 - DNA, 408 bp, Homo sapiens
ggcacgagtgaatctttccttttttcccccctcctccaaatatataaatctgtgctctcacatgtaatgtatttaatttttggaaaatttaatgctatatagtaaatcaagtgtgtgatttaaagtaatcagatcactttgattcttttaagttttcagaatttcttttttccacaggtaattttggagaaaataattaccaattaactgataataagcacgctgtcctctgctgtaaaaagtctgaatagatactgtgtatgtttttatgtccatgaacttgagctactcgtgtgcaattatgtgtatgggaatggagtagtgttcatgatttgtatctacatcatcatatggatgtatatttattaataaagtcattactttaaaaccaaaaaaaaaaaaaaaaaa

SEQ ID NO: 1243 - DNA, 1687 bp, Homo sapiens
ggcacgaggtttcatggggacagagtgggcagatggagagttctgtggagggagggaggtgatggtcccgcattgctgtgactgcttaatgccagtgacctgcgcacctgcaatggtcaatctctgccctccagcgggtgcccccatggtgccaggcccccgtcatcttggggtgcacagcgcacgatgtctcaccaggatgggatccgctgagggttggagcctcagctcaggccagggctgcacctgcccccaccacaccatacacaccttccccactctgttccccattggccccctcctcactccacccatgctgtctggccccttctcccccaggttctgcaagagcgggtgtggtgggcccacttgcagtcccagctcctggggaaattgcaggggctgctggaacccaggaaatcccagctcgctgggcatcttgaactaccaaaaaacaccctcagcagaaaatgagagggcaggaaggatgtcagcagagcctctgtggactcttcatgggaggagactctcatgctgacttgccaggaggcaccccggaagcccccagtccaggagtgacatgggaagggtagttcagaggcaggtttctgacccctctggcctccatcagagccaccgcaaaaattccacctgttaaataaaaacggactgaggccgtggtgcactcctgtaatcccagccctttgggagccaaggtgggaggatcgcttgaacccaggagctcaagaccagcttgggcaacatagcaagactccacctctacaaaaaaattagccgggtgtggtggcgtgtgcccttggtcccagctacccaggaggccgaggcgggaggattgctttggcccactggaatgttctgccaggagggggtagtttagagcctatgaaccacggcaatgagcactgcgagcacggacaatggggggctggggttggggtgggctccacaacgctgaaagctgagctatcccaggacctgggaggtgaccctgtggctgccgagtttctctctggatgcacaccatgtctatcaaccctaaggaagggtccccactttgctgggagcctcgcaggctgggggcacatccccaatccctcggggcaggctcagatcctggcacactgacattgccagccactcctgggcacttgctgtgtgccgacccaggactaggagctgcacctgggccccaggatgtcccctagtttgcaaatgtggaaacttgagtctcagagacttagggacattggcctctgtgaatctcagggctgcttctcctgaggcctgaaccaggcctggcactgtctgctgggtgcgggcccagccctgggaggacccagcaggggtgctcagacctcccatcccatggctaacccaccgctggggaggaaacctgtggacacttgcactgaaaaatgtcactctctacaagtatgcaagggagtcggaccatctcccatcagacctggacacccgccggacaccacagcccctaacactccggccaggtcgctccaggctggcacaggtggcacccagccagtcacacttaaagcagggtttccctggccttaccatattatcactccccaaggaaggaaatgcgaatttttaattaagtgaattaaatgctaatttaattaagtgaaaaaaaaaaaaaaaaaaa

SEQ ID NO: 1244 - DNA, 1266 bp, Homo sapiens
  misc_feature (641)..(641): n equals a,t,g, or c
gggagagagaaaaagagggaggaagaaagggaggaaaatagttaaacaagcaagatgaacagaaacaaatatctgctatactctgaatgtcaaaatggaaatagcctgtgtaaagttctgcaaaaccataaatgtaatagatttattttaacaaggtaccaaagtactgtatgtttaagaaatttatcatttttcaacttcctaatttatttctggatggtgacattttaatttaaataaacagcagctgacagtatgacactggagttgttaatccaactattcttgtgcctcatgtgggtgttaggaattaaacttactatttgctaagcagcttacctgacaagagtcagattttttccccctaaagaaaggactggcactgtagctgtatgctttattataaatgatcaatttgttaccctcctataaaacagtgggcatttctccgtagactactctcatgtatctggagaattagcattgtttccatctwccagaataagacacaccacaccacacacrcacacacgcacacacacacacacgttaaagctaaaattctaataataaaactgattaacttttaaacatctagccatgttctcatcaaagcattcagctttagtagagatataggnttatttttataatattctaacattagcttaaatgtttcctaattttatcatgtggaattaccccctatcaatcacacgttttgagcatcttcatttgtgatcctttgagaagggagtgtgtatatgtttatatatacmcatatcaatacatatcatttacctaaattggtagattgagttgtcagagagagtttgatcaaaatatggcaggttgtttcaaagatatggttgttgtgtggaccagatcattgctgagataatgtagccaaatcacagactggtaagctagactttttcaatcacatagagtctgtaaaatacttcagaatttaaataaaactccattgctcatgcaaaactcatcagataagttcaaggagtcaatgacattgatatttcaaaaactcaacattggcttcacttgcgttattgacaagcatgtttcttggatctctgggaatttgtaggtttgccctgtggattttgactgttttcaaagttctaatgatttctcagtcgttcttcttaacttcagaaaaaaaaatgcattgttttctcatctttcctatgcaaaaccaaaataaaaaattgattctttgttttaaaaaaaaaaaaaaaaactcga

SEQ ID NO: 1245 - DNA, 2902 bp, Homo sapiens
  misc_feature (1059)..(1059): n equals a,t,g, or c
  misc_feature (1064)..(1064): n equals a,t,g, or c
  misc_feature (2902)..(2902): n equals a,t,g, or c
caggcttctaatggtgatgcttctactttaggggaggagacaaaaagtgcttctaatgtgccatcagggaagagcactgatgaagaagaggaggcacagaccccacaggctcctcggacactgggtccatcacctcctgccccatcatccactccaacaccaacagcccctattgccactctgaaccagcctccaccacttcttcgtscaacactgcctgctgccccggctcttcaccggcagcctcctccactccagcagcaggctcggttcatccagccccggccaactttaaatcagcctccaccacctcttattcgccctgctaattccatgccaccccgtctaaacccaagaccggtgttgtccacggttggtggtcaacagccaccatcacttattggaattcagacagattcacagtcctcactgcactaaaaattaaattggacacagctgcagtaacttttcaccccatcattataccagtgctcatctgactgatgaaaaagaggaaagaataatcatttctagatactgaggctgcgaactagttctgtggcagtggactagcataagtggatgtctaagaaatttttcagttcactagactaaaatgttttacaacaaaaagcctccagttagcctcctttctagagtatatgttcagcaatgtgatctcataaaaggaaaaacaaaagatttaagtattctatataccaagtttttgttttgtttttactgtatttattttattgaggttctttatattcctgcctcttcatagtcaaggctcttagtacaggaatattgacttaggaattgtgaaaactccttaagtttcttaagttaaggatgtttggcttttttctttaattttttaaaaaccatttycctatgttaggagtgcaagaatagccagcatttccgattttgacatatgttcattttatgcatatttaagaaattatagctgcatatcccttctttcaaaaaatgtgcttttttttttaaaggaattttaatatatycctttaaargaaagcaatttaatcaatngcaangcaattatataaaaccacaaagaatgtactgaacctactaaccctttaacatacagtttagggtcctagcgcagagtccttgtttaaaggtcattgactcatcatctgtcagtaatgagaggattggaagaataattttgcatacaaatgaggacttaatttgttgaaatataatctctttaagttccttgaaaatggagttggttttttttgtttctaaatgctatctgcttttaactagtagttgcctacatctggggacttcagagaagaattatattttgttagttaagtagacacagtggttatggaagcatttctttacagtaccctttacgtgtttggtttctgaacttaaaattgccctcatacttaataatatggtctgcatttaatatgaaaggtgttttattgataaatctattgtactatttggatacatttgtgtattccttgcagccaacctgtattcgtgggattggtgtagggttaaatcatcaacattatttcataaaataagaatttgttctgtgttatctaaagatgtatcagtatattgtcacagttgtgctgttaactaaaaatgctgagacccctttttatagaaaaacaaaaagacatcaagtcttcttaattcaacccataatcattaagtacttaacaaagaatattttacaagtgatagtatttcaacaatgtgtaattaatatttttgatacagtgatttcatattggaatcattatttgtgcaaagggacagacagatcacttagattgctatactagtggacataggctaaatgtttgcacattcacattcttatcacgtgtagaatacttcacaaaatagtcaacatctaaggccctaatttatgttttgaaagatcatgtgttcccaaagtattccctattgttggctccacagccttaaagtgctatagatttaaattcattgattagttttaatttttaattttagactgtgtatttccataaataccctacgtactggcatatttgaaactctttttccaggttaggtccttttctttctcattgaatcatcttaaatagttcttggccctgaatttagctgatttaaaattcttaatattcaagaatttatacttattttttccttaaaagccacaggggacagttaaatatcttaaaatatctaaaacattttttaaagcacttagattgtcttacgtatgtgcatactatacctttacagcgtttattgtcttgtctcttgtcagtagaccttcagtacacagtatgtgggatatgtcagtcaagttggtcagcaccagcatctgtccagctgttcagtatattgtgattcattaaaaaatctcttctatcccagacatgggccaaggtgctgtatctgagggatgtgctgtaatttgatttacatgcattagagcacacagtagaaaaacgttagcttcattagtaatatgacacatgtatatagtgagatgtctttattgtgtgctttgcatattttgtaaatattttgcacgtcattatttttcttttttgtttaagcagtgtttggcctggaagagtgatatgcttgctgcttaatcaaaggattaaagatttaaagatgtctatgtcttctatttttatataatttcatgttctatgaggaatttagtacctcttcactgtgaaattcgaaataatgatttttataaaagcaaaactagaaatcttttaatgacaattttcattaatttcagggttatcatttttgagaaatctacaccaaagtggttttttaaaattacmtaactaaaaataaaccacaccgtggggttacctcn

SEQ ID NO: 1246 - DNA, 1328 bp, Homo sapiens
tcgagttttttttttttttttttgctttttaaatttatttttaactgtttctcatatgtagcaacccctcctcccctcctgggcatgtttacacaggctctgctctgggggctggcctggctgtgaggtttctggggaggcagagaggcagggactttggggccttagtcaccatccatggtatcacctcatctcacttcctgtgagggacagggcctggctgatgtgatcccagctccccccagttcaggactgtctttcagctcctttgcccctggaggtgggggctgctggctgaggaggggtcaaggtgagttcaagaaagctacctgtggaaaatggaccaggttgggggggtgattgcaaagtctccccaaagcctggctcctcatgctcagtgccaggggcagaacactggggagccaggtatagagagccttcctgtcataactgccagtcctcttcctccaaggcctctgcatattctcatgttcccctcacccatcatgccagccacccctatccctcttctagcagggccaagatggggacagcagcagccctctggccttgggatgtgatgataaagcaagcctagggccagggtttggggagcagagagagccaagaagttgaccacgtgtgatttccagcccttcccactgggacttgacttcccaggtcaaggagtccgtctcattctggctggtcgagtgaccagaggcctgtgtgaatgtgtgcacctgcttttcctgcctggaatgttttctggctcagctgcagcaacatctgtgagcccagtgtctgccctgtgtccctgggctcgctccaagtgcaggaacatacatgcagggcccaacatgatgatggtgtgaagggcaggaaacagtcctctgaaggagtggggaggtgggcagtctgcccccgccaggtaccatcgcctcctgccagcttccttagaccaggcagggctgccatggtgctagctgcaagtccatcagtattgaccgtctcgctccatcttggtcctccggagtcccaagtttccttttcatcaaatctgacaagagagaagaaacatgggtgtgcttggcccacagggcctggtggtgatggacctccccgctccctcaagctctggatggctgcagtgttgtactagactttgttcaggctgttctcatctcagtattgccccttcctttcactttcacacttcatctcattcctgttgtcactttccccgaaacgaataaagtctccccagctcctgctgtgtaggctgggcagaaaccacaaaaaaaaaaaaaaaaaaaaaaaaaaaaaaa

SEQ ID NO: 1247 - DNA, 590 bp, Homo sapiens
  misc_feature (27)..(27): n equals a,t,g, or c
  misc_feature (37)..(37): n equals a,t,g, or c
  misc_feature (58)..(58): n equals a,t,g, or c
cctaaggggaccaaaagctggagctcnaccgcgttgncggccgctctagaactagtgnaccccccgggctgcggaattcggcacgagtccaggtcttattcagatttcaccagttcgtgtgtgtgtgtgtgtatgtgtgtagttgtgcactttaaccaccaccataatatacagaattgttccgttgccacaaaggaacccttgtactacccacttattgtcacaccttatcacccatcctttcaccaccttccctaacccctggaaatcactaatcttcactgtaattttgtcatttcaagaagttatgaatggcataatatatgtgatacaaacatagcatatgttaactttttgagaatgggtttcccctccacagtatgatgctcttgaattccatccaagttttattatatgtaccgatagtttttcgttttttaacagattgctgtggatgtaccagtttgtctgactgctcactcatctattgtaggacattgggttgtttctagttttgggctattaaaaataaagctgctatgaacatttgtgtataaaaaaaaaaaaaaaaaaaaaaaaaaaaactcgag

SEQ ID NO: 1248 - DNA, 752 bp, Homo sapiens
ccggccgctctagaactagtggatccccccgggctgcaggaattcggcacagcttcttccatggagctagaaagatggcatttggcctcctctgcaaatcccagctcacaattctacctccagggaaagactgaatgtactgcctcagctccattcaaaaacagttctgggaaagattcggggtggcctgctttgattatatgtgcatcctcttctgcacccccatctccttatttctctgctggcttcctggaccatcgcttgagccatgggtggagagactcctgaaagaccatcacaggcagccctaactagactacctgattgaaataagcagcagcttttcttggccgcaaaggggaatgctgctcacagaataagagagcagggcagagcttccaagtgtctacacagcctttctttcccttatgtaaataaattaattcattattaacatatctcaacracacgaatctgacctcttttaaatttgggtggtggaaagagacttagatgcaaattgtggttttattcattctgtgactttgggcaaataatttaccttctctggaagcaaatatgttaatttcccttttctataaaatgacaatggaactagcatcttaataattttattgtgaatattgcattatgtagcatatttcaatgcccagctcagggtcagacacaagatagacactcaataaatgctgattttcctttcaaaaaaaaaaaaaaaaaaaaaactcgag

SEQ ID NO: 1249 - DNA, 419 bp, Homo sapiens
cggcacgagcctccaagcccctgtacataacctggagcgtgtgaccttcagagcttttcactttatgcaaaatggctcctgtgagggctgcaagctggagggtggtgcaggccttgggccacagggaggcgcctgtggaatagggggagttcatgcaccccttttttccccagaggggctggactcaggttagtttgggggtgggggctcctgcactttgccacaggcacggggagggttttctcctcaccccctctgccctcccaacttgggttgtactttctaagaaggtgattccccctgcccttgcccccttccccagaacaaaacatgttgatcatgtgcaatatttcttactgtgccgagaagccgcaatgagcgagattaaagctgtttaacacaaaaaaaaaaaaaaaaaa

SEQ ID NO: 1250 - DNA, 949 bp, Homo sapiens
  misc_feature (2)..(2): n equals a,t,g, or c
  misc_feature (940)..(940): n equals a,t,g, or c
  misc_feature (947)..(947): n equals a,t,g, or c
cnacaagtacaggttatcaagtttgcacttaactatgccaaaaaaagtttgaagcgctctattctcagacatgctgtattattacttctcattcaagattgaaaaatataaaggtatccaaactctgtcttaatgtaaatgtaactatttttccttcaagtgttgactagggagtcggtttctctcttaaagacactcactgtacaactgaaagcagctgtcatatttctggcaaaatgtgtttacgtatctgacaagttgtacatttgtgtatgaactgacataaaatgtgaaagcctgtaagtgtacatgtagtggtgtggtgttctgtctagaggatacaactgaatgtttttaatttgctgacttacagacacaggctgtttacaaaatgctagctggaaagtctgtaatgttcatgtcataacttttagttaattgccattgagcacctgttctgaggaggtgagatgtggacttgtgcttataaactggagagtttagtcataatccctcctggctttgtgtgaatagcttgctcactttgctggcctttgaaatgtgttctccgtgataagctatccatgtgtttgtgataagagtgcttgtcaaccatgaccatctttgagccttcctagtcctccacctggcacagtatttgaaatggcaaaggatgtgcttcatcctctaacagtgtacactcccagagctgatattctggattttgactgtgcacatttcctctagttcatgtctgtagtccctatagaatgatctgtaataaaatagtatactggactgtgcatcaaagggatgtaaaattacagtattccaaaggttgaagttctgctgttttgttataatgcctgatacacatcttgaataaagtcttaacatttttcttttaaaaaaaaaaaaaaaaaaaaacycgagggggggncccgtancc

SEQ ID NO: 1251 - DNA, 440 bp, Homo sapiens
ggcacgagtgacttcgcctgtgatggacttccagtgtgagcactggccagagtgaccaggctgaccagcaccagccctgatccagatgcagaggccaggatgtgggcccagccctgtgccaggaggctggctggaataaagggatgggcaggctggcatgggggcagccgctgcccctgcctgggtgttgctgtgtattcctgccggccaggggccactgccaggaccacgcctcccttttcatatcccgattcttaagttctgctattgtggtattctggtggagaaaaaagaaccgcgtggctgtttttgaactgcctggaacctaagaccctgaattcttttcccccccaaggggaaaatctatatggaaaacatttattttaaaatacaggatgaagtgaattaaaagatttaaatgcaaaaaaaaaaaaaaaaaa

SEQ ID NO: 1252 - DNA, 1504 bp, Homo sapiens
  misc_feature (3)..(3): n equals a,t,g, or c
  misc_feature (283)..(283): n equals a,t,g, or c
  misc_feature (1396)..(1396): n equals a,t,g, or c
cgnattgcaggacatcgtggtggccatgacggcggtgggcggctccatctgcgtcatgctggtggtcatctgcctgctggtggcctacatcaccgagaacctcatgcgcccggccctcgcgcgccccggcctgcgcagacacccctgaagcgcgaggccgcccgcccatctttgcgccacctgcctgagggcgcctgagctcccaggtcctccgcccgctctcctctcctcattcctgctgcctccttaagatccccgcggaggaggacctgccggcgacggnttccggcactttggsatcatcacacgccctttccagccgggcgtcagaytcccagaytctggccccggattggcccctgggyttgcgytgctgtgccagccgcatccaagggytytccccgctctccgcagcctttatagaggcggccagggcatggagccccttccagcaagagccatgggcactccggctyaccccgcacctccatcctgtgccgaattgtcccagacagaccgtcgccattgctcggtcactgtgctttgcaggcctggggcgcakctctccaagcctgtcctgccccgccccaccccactgggcttaggttagcttcgtgccttagtatctcgggcccactgcaggagccaacaccctctgctgtccagggggggtctgtggccctaagattggccggcctctccatgcatctggccagcgtccccttggagacaccttcaccctcaagcgctgcagaagcatgaggtgagggcctgcagcgctctgtaccgtttagggtgttggaccagccgggagcctggcaggcctggcccagcggccagggtgagtgttctcagaccccgggcagctggtggttctccagggccaggtaccccttttgtgtgtgcgacctctgactaggtccctgtgggaatggggcagatggcggccatcaccactgggtcccagggcagaagcttagataccggccttgagcagcccgaccttccaccgctgcctggatcccaagcctcagccgacccaggggaccttggtggcaacggtgtgactgacagcaccacccctagcctttgcatgcccaggggtcgagagccagtatccggcccagacaatgccacccgccatggaagaaaagctgaccctgcccacctgctgcagacccgggccccgggccgaggttgctttctgtgacgaccgcctggtgacgctggacaccaggagggttatggcactgccctcccctcctggagcccctggcactgaccacctggacttgacctgactcctggtcactggccaaacacccatcctcaccccagccaccccgggccctggctggtgccgtgtgacacctgtagcccacctgtgtgtctttsntccgcccacccctgcgtgcgccggtcagcgcaaacctggcgccagtgtctaaatgtccatcattctcagaccaaaaaaaaaaaaaaaaaaaaaaaaaaaaaactcgta

SEQ ID NO: 1253 - DNA, 1635 bp, Homo sapiens
  misc_feature (6)..(6): n equals a,t,g, or c
  misc_feature (24)..(24): n equals a,t,g, or c
  misc_feature (34)..(34): n equals a,t,g, or c
  misc_feature (1615)..(1615): n equals a,t,g, or c
  misc_feature (1630)..(1630): n equals a,t,g, or c
gtggangcgctctagaactatggntcccccgggntgcagattcggcacgagctcgtgccscttctgtgtctcagggtaatactattcagagtcgcccctttgctcattttctcccgtatttgttaccttcctgaggcctcagtattagtcgtgagcacaaagttttgagacctttggcgttgtttcttgatgtgggaggggaggtgttagtgcatgcaagggttgaactagatagaccctgccttagtagagggtgggactataaccttagaggccagaacttgatccagaagttgctgtccacagaagtgctttctatttcatcatttttgtttctagggctctttttctgtagccaggtcttcccaaggattttagtatttgcattggagttgaggtttactctaatgatggtggcccagctgtgcccagaggacagccaggcaggcccygggagggagtttagaaagacagtcctggtgaatgggcttcaagtggtcacaaagagggtggctgtgaggtgaccccagacactgcagaacgatgtgcaccctctgcgttttggatgtccttggaatgtgggagcctagaaataaccctgtggatggaattggggcagcggctgctggagatctgtgtgccttgccttccttcagcaggaccgtctaggtgcgcagccacctatggatgcgtcccagccagccccgtcgctctcgtccatcctcagagacaaagaagagggcagggagtttgggcttggttttgaactttcctttcaatgtagcaaagcattcctagttaaccagagccttggaatctactgcctgctggccaggctttaaaatgaaaagtgttttaatgctgccataaaagggaggcgggggggaggaagggaaaataaaggcatctttccaagtactcatctaatttaattgtcaaaagattgataggccatgaattacttctccatctcactaagggttaaaggcgtgcaaccccccactggctgtgtcccctgccaccgaagtgagtgacctgccctacaaccaggtgggaccacctgtgctgcagtccggaggggcttctgcaggaagcactcaccccccacacsttccccggcctgagcttcccctacctttcgtcaccacctgagggcatgagcacaggccatggggcgtgcctggtgagtctgcctgtggttcaggcttagcctgtggtctcctgtgtgctgctgcccgcatgggatgcgcaggggaggcgtggggatccgcaggagggtggttgggatacaccggatacctctgctctcattgcttgtttscaaatgctctatggacatttgtgtgctaaatcctattaaataaaaaagacgggttaaaacccagatgctgtatattcatttgtaattatgtataaagtgaagcagttttaaactgtaaagatttttttcagtgtgttttctcgaattttgccacaacatactggcttcgtattttatttatctttctttctagttaccagcttcagacccttgtaaagtctccctcagccctttcaaaaaataataaatttcctgtgaagttaaaaaaaaaaaaaaaaaaaaaaaaaaaaaaanaaaaaaaaaaaaaanaaaaa

SEQ ID NO: 1254 - DNA, 2141 bp, Homo sapiens
gaattcggcacgaggctgcatggcattctgtcaagagatgaggacactcctgttccttagcctggcattcaaggcttgccataatctggtcacacctcttattccagtctcatcttccatatttccagccacacaccgattcccagtattcaccatttcttgagttttcacactcatacccacccccaaacattggctcattgttcctcccacatggaaggctccttcccagagctctgggtcttaattccacccattctacagtgtctttgaagtcttcgttcctcctttcatttgaaagttgacggctccttcctctaagcaaccagtacctctcttcaaatactcggtattatgtggstaaacacacacaaagcaaaattttactagactctgagcttcttgctggcaggggacgttttttatacattgcggcccccagtgcctggcctgtggtgaatgcccagttaacgtgcgcatgaacaaccaaacgtgctcaaagctgcctttctcctgccatgtttgatagaagcactttgtggaattctttcagtctgcggatggaagactacgctgttgcccagttcactgctgctttcctttcttacaggaattacagaaaggagaaagcactaactgaagaaatggtgatgctctcagtttctctgccttccctatcagcagaaaggctcggggaaggccctcagcctcccagtctggtgaagcttcctgtatggtccatgaccgtattccaccccaggctctgggaggctccctgagatgtgctgtccactaagcactgcacaaacaagcaatcaaattatgaataaacataataaatatcagccgtgcgtgactgagtgatggctgcagtttctcagtatccctaggttctagttggtgcagttgtctctgctgtcctttatttatgggagaaacataggcccaggctatccaggctgcagtggagcctggtgaactattctgggggccctgggaactattttcattgtttacaaaagcccaacagaaactgtgcattttcccttaagaaagcttcatgggctaactaaagcctcatgccattctgtgttcagtgccagtcatgacagctctgcttgttagcatactacttaaatataactagaatgattcaaaactcgggttctgtgatatgaggatatagataggttttcatctatttcctggcttataactcccaaaacccttgttttaggcttttgttataatgttgggcacttcgggcctcagaaaacagcaggctgtttctcagatcttctcctgacctcctttcacctgctgctttttctccccaaggcaggccatagaaactaaaagtataatcttcctttgcccgtcttccagttggccataaaaagaatcctctgacctaccttgtctgattttaggtcatgagacccccatttcagaagggattctgccccatacctgagaggaagaaatgtagacaggccttgttggacttccccactccatctgtattagattatgcctcttttgtccaatcccatttctccagtgttgtccatgcttcaatcatccctatccaatgaggtctccataaaaggcccaagaagacaggtttagagagctttcggagaacagaacacttggctttgcaaagtggcacgcctggagagaacttggaagctccacgccccttctatacctcaccctatgcatctcttcagctgtatcttttgtgatatcctttataataaaccagtaaacggacctaagtgttcctctgagttctgcaagctgctccagcaaattaaaaagaaggggtcagccaggtgcggtggctcacacctgtaaccccagcactttgggaggccaaggcgggcagatcacaaggtcaggagagcgagaccatcctggctaacacagtgaaactctgtctctattaaaaaatagaagaaattagccgggtgtggtggcgggcacctgtagtcccagctactcgggaggctgaggcaggagaagaatggcgtgaacccgcgaggcagagcttgcagtgagccgagatggcaccactgcaccccagcctgggcgacagagtgagactccatctcaaaaaaaaaaaaaaaaaaactcga

SEQ ID NO: 1255 - DNA, 2414 bp, Homo sapiens
ggcacgaggtaaactggtttttggtgaaattcggctcggcctcatgcgaacctatctaggtccgtctctggagtggcctgtcatcgatcgcgccctccatcgctgagcgacacaagtggaaccccccaggactgcattctgcgaaactaccctgcttttcccccagttttggtctgtgaacacatttgggaaattcttctgatcctaccgctactctcttgaggtacagtaaattgtctttgacttccatcaccttttgtaatattacaattgccatctactgagttcctatgatctgcctggcattgtactaagtgctttatattttcttgttcatttttttatgccaacataaatgagtttgactcaattcttattataacctgccaaaataagtattcctcttcctttttacagagagagaaacaagggaaaaaaaagttaattgcctgaggatatactgctagtgttgcgggacaaatagagacgggagaggccaaacagaattcaggacaaccctttattattaaggtgatcactggctcagtcggactggggtccagaaagtctgagcccggaacaaagggatcaatcaccttttaagcaatttgtggcgggagtttggtgctacaggaagcctacttgcagaagcaagaacaaaggcagttaattattcttttacatttgttacaccacatgtcttacatccttgggaatgcatgcttttgttagcaattgcttatcaaccttgtgactttacagcgcgctagggagggaagcaggaactcgtggtgcctcaaggaacgtgaaacggtggaacacagataagcctctccgtgcgtagaggagaaataagcggttaatattctctcttaacccaggcctccggagggtggggggctatatttcattctacctctaaggaaaagaataaacttcttgactaatatacttataaaattcattaattcccccttcactagtaaataataaatacctgacttaggattccaaaataggtcttgaatttttctgcaggagctcctcaaagtctctgaattcccacaaccttttattagatcacttatcccattgtattataattatctgtttaacaatttttcctcacccctaaaggaccctgagcttctggaaggtagggactgtatcttaaaatcttggcatttctgatgtctagaatatttcatttaagagaagggcttagtaactgttgtgtgggtgggttgatgagttaactgtcaggcaggtgaactaataggctgaagataaagtttttcactgttggaagtgaatttgggattagtcatcctaatcccctcacttttagagatggggcaactgagtcatgcgcggtggctcacgcctgtaattctagcactttgggaggccaaggtgagcggatcacctgaagtcagggatttgagaccagcctggccaacatggcgaaaccccatctctactaaaaatacaaaaattagccaggcatggtagcaggagcctgtaatcccagctgttcgggaggctgaggcaggagaatcacttgaacctgggaggcggaggttgcagtgagttgagatcgcgcaattgcgctccagcctgggcgacaagagcaaaactccacctcaaagaaaaaacaaaacaagacatggggcagctgaggccttttgtataccaggcatttatcgagttattcatgtgggccagtttctgtgataaatgatttgcaaataatacccaacttaatctgtattgttatttttatttttacagatgaagaaacagctcagatttgaccaagatcacacaagtaggagttgaggaattggaacccactatgactgactccaaattaatatagtgtttatagccacttacataataatggtaaaggttttatttttttcactatacaatatgtagtagataaatttactgaggaaatgagacagcacgtgacaaatccttaaaggatacacacatgacaggaaggattagaagaggaaacagaaacaggtaacagagaagcagaaaaagtaaaatctcccaaaataaaaatagaaggaattaaaaataaaagcagactccgggtgcagtggctcatgcccagcactttgggaggccgaggcaggtgaatcacttgaggtcaggagtttgagaccagcctcgccaacatgatgaaaccctgtttctactagaaataaaaaaattagccaggtgtagtggcgtgcacctgtaattctggttacttgggaagctaaggcagaagaatcacttgaacccgagaggcagaggttgcagtgagccaagatcatgccattgcactccagcctgggtgacagagcaagattataaagtcttctcaataaaatcgtctcaaaaaaaaaaaaaaaaaa

SEQ ID NO: 1256 - DNA, 929 bp, Homo sapiens
gggacagctggcctctgtgcagtgggtggcgggggggtgctggacggctggcctctatgtagtcggggaggctggatgactggcctctgtgcagtgggggcaggcgctggatgactggcctctatgcagtgggtcggggggcctggacagctggcctctgtgcggtgggttgggggggcctggacgtctggcttctgtgcggtgcgggggccggcctcgggccgktgggcaggctggaaggtcagccaggccctgtggtgtctttagtgagaaacaggaaataaatcaaggggatgttgtagaagttttaccgctgctggtttagaagtgtttgtttttattatttgtatataatgtgttgttttcagtcttgcactggtgtttttaactatcgtgtaaagatgcaaacagcaggccagaaaactgccttgatatatcacattggcaaagaccaagcgcaccccggatcctagtgggtgagccggacccattggcagtggcctttgtggtgcctccagggagcctcacgatgctcacgcctctgaccagtggttctgcgctcagggcatgaccggagatgtggtctgggagttggttgtgtggatgtttgcgttgccagcgtttacaacaacagaggggaacagcccacagcccagcagtacaatgaggatggtccttgtgataaatgggatgctgtgattagattgtttctgaataagctaaaatgctcaaaatgtgatctttcttttataaaaaggccaggtatggtgatacgtgcctgtaaccccagcactttgggaggctgaggtgggaggatcccttgagcccaggagttggagaatgcagtgagctgtgatcacaccctctagcctaggcagcagagcgagaccttgttctaagaaataaaaaaaaaaaaaaaaaaactcgag

SEQ ID NO: 1257 - DNA, 3940 bp, Homo sapiens
  misc_feature (11)..(11): n equals a,t,g, or c
  misc_feature (17)..(17): n equals a,t,g, or c
  misc_feature (1584)..(1584): n equals a,t,g, or c
ggcacaggganaacganctcaggaaaaggaaactcctctgatcatgaagggtgttggaatgaagaaagctggacatttagtcagagtgggaccagtgggagcaagaagttcaagaagacaaagccaaaagaagactgtctccttggctccgcaaagctggatgaagaatttgaaaaaaaattcaacagcctccctcaatatagtcctgttacatttgaccggaaatgtgtacctgtcccaagaaaaaagaagaagactggaaatgtgtcctcagaaccgactaaaaccagcaaaggtcctttccakkctcagaaaaagaacttrttccrcaaaattgtcagcaaatrtaagcacaaaaaggagaagcccaatgttccggaaaaaggaagtggggrtaaatggtcmaacaagcaactcttcttggatgccattcaccctacagaagccatattttcagaagacagaaacaccatggagcctgttcataaggttaaaaatatcccatccattttcaacactccagagccaacaacaacgcaagaacctttggtgggcagccaaaagagaaaagcaaggaaaaccaagattacacaccttgtcaggacagcagatggccgggtatcaccagcaggaggtactttggatgacaaaccaaaggaacaactgcagaggagtctccctaaagcaactgagacagactgcaatgacaaatgctcacacaacaccgaggtcggggagacgcggagcagwactccagaaatgcctgccgtgtctgcgttctttagcctcgctgcgctggctgaagtggcagccatggaaaatgtgcacagaggtcagaggtcaactccgctcacccatgatggacagccaaaagaaatgccgcagctgcctgtacttatttcctgcgctgaccagtgaagcgccctttcattgtaaaacattgtgctttacctactaccctagccttgtctttaccgagggatgctagtgagtccaagtggtggaaaatatagactgcaaacaagtgcttgttgccccacacggcccagattcacttgaagcagaagttagcatcctgggccagtttgttctctcagaacccagaatctttgagggtaaggttatctgtctgatactgagcagaaacagaatgatcctggagctttgctttctattgaaggcttttgacggtaataggtggtaacttggtaaaaggctgcctttactgtagctcacccagcatctcttttaccaaccagagagtgtgaaactagtttcatatattacctagttattctttcaaaacaaaacaaaaaaaaaaaaaactgacgcactgcactagttattattagatattcttagtcttttttgtacatggagatttaagtttaagatggtttatataataggttatacctacatttatattgtagaataaatattaaaaagcctgttccagagactcccaagcagcctgggcaggcagatgtaccattgttagtggtgtatgctcggcctcgtggtccatatattctgcacttttatatttgccaccagaatggtagtttgctggcaaaaaaaaanaaaaagagagagagaaaaaattacaactcttacaatctgaatttttttcttagccttgagtgaccaagaagaatttgcttgaggcaaattgtggcaaatattttcccagacaggggaagagtcctgcagattacagattactggtgttttcatgccttgaggattcttttatttttacataggggtctaagtgaccaatggattgttcatacaaacaaaaaaaaagacaaaaatattattcagaagtgaccttagtattacttcactattctaaacacattgaagacactcacttcatgtggacttggagctacagaccttttacatccatcacagattggctggacgggttgcaattgctatgcacagcctgattggcactgcaggtttttagagccattttgagtttgtgttgtttaggaggtactgagtcaatgatgagggaggtatgcctgaccagagtgggactctcagtcatagatccacctgcaagtctctgtttcctttttgtgttttgktgcttttgaacataaaaccaaccatacataagcagcgccaagtggattaactggcttagaacattcaacatattgacttaaccacctgacattcacagtgtcttgtttcctagcaacagatgcaaagtgataaatcaaaattagtctgaggctacagattttacagggtatttgttctatagcacaaagtatttccccactcttgcgtcacagcacaaactaccaaattttaattattggattccagcaataatttttaatggktttcaaactggcggaattttgacagtgctagttcgagkttgaagcttttgaattagatctctwaatggkgacagkttacatggktttawctagctttcttawttatacttgactgaattgtaatgattttttttctaattgtaatttgacgtaatagccatacaaaaaatgactctattcatactaggtttagcttctcatggttgtagatattacttcagttccggtgctggaaaatatgtacaacatactaacaggattrarrraaaaatagaggtttttcttcttgtttttttttccaaagcaggtaaagagggtagcaaagcatcggaatgatgtgctcaaaaatgcatattcctggtggggatggaggaagaaggcattagtaaaaggttaatcaaacgttacaacttaaccccattcatgyaggaataaatcaagtgagcagttccagacttttgcataatatttttactatgatgctgttttattaatattttctaaatttcaaaacaaaaagtgaatgtttgaaattgctgggtcccgatgttggtggctgttggagttttggaccactcgctagcagtgatttgaagattataattagctaaaatccaaaacaaaaaaccaacaacaaaaattgtatggtgcggaacatgcaccttgacaatggtactaacttgttattctatagaacacgttagaatagatctatttttgccagagcaccctccttcagtcctccgattacatttcactagagttccttacgagattgctgtatattcctgggaccttttttaaaaaaaaaaaaagcaaaacaaaagattactttttttctatgtgattaatatcttacttgatctgcttttcctaaacctcagtggcttttcccttaggcagggttgggggtgggagggcaacttactggagatgactgttttcagatactttaaaacaaacctttttgtagaaatgcttaatttttaagcggttaggcactgagagtagcagaaatcctgcaaagctttatagttccttagactcaccttgtcgattctctgagtaaagtcttgatttcaataattgtgcttctcatgccctgaatctgctggagaggagtgttgttattttcaggtaacaacattcgttagcacaaatatttcagaccaatattagtgctctccaccccaccttttgttatcattttcatttcatttctctcattcttttttattttggaaaatcatattgctatagtgtgtactttaatctgccagcagataccatctacactaacatttgtcccacagcatcctcaagagaaaaagttgttgcaccttatatatatctcaagcaaaccaaaatatgatgctcttctgctttgttttattctaaattgttgtatcatatctttctgaaaccattctgaatttagttgaaattatcaatatttatgcttttaaccttaatttctggattcaagcctgtatataaatcttttgaaaaaaattgtcctagcccttctctgcgatgctggaagtagaagattgcgtctcagattggagacgcag

SEQ ID NO: 1258 - DNA, 979 bp, Homo sapiens
ggcacgaggagattggtttcatagtaaggattctttctttaaggtgatatggagcaactgctttcacaggggcaccaggttggtaaaaactcaaagctaacaccattcagaacttacctaatgatgtttgaaaaagaggcggtaggctgataactgcttcctaggaagacctaccaacttcaccagcatgctcattactctcatcattgttgttggaacattttgttcttgggtacaagcttactttacacacatctggttactatgtttgttctggaagacggcagcctcatggagtgactagagaacacttgatactgagctctggaaatcgttttttaacagctttattgatattgtataatttacagatcatcaagataagccctttaaagtatacaattcattggttttttgaatatctacagagttgtgtgaccataactatagtccattttttaaacatttcatcactccaaaaggagactttgtacccatcctccctacctctctcttttcctcccctagctctaggcagctttctttctttttctttttctttttctctttctttctttctttctttctttcttttctttcttttctttctttctttccttccttccttccttccttcctttccttccttccttccttccttccttccttccttccttccttcctttctttctttctttctttctttctttctttctttctttctttttctttctttctttcttgatttgcccattttgaacatctcatatgaatggaatcatgcaatatgtgagaatcctgaaaattttgatttgattttcaaagaccgtgtagacaaacatgacctggttactctgcaggccccatcttcccaacagtgtcctgagtgtgagattaagaccaaatgaactctgtcagtgctgccaactgttttattggattaaatgacttgtttttggccaaaaaaaaaaaaaaaaaa

SEQ ID NO: 1259 - DNA, 2105 bp, Homo sapiens
ggcagagtcagtacagagcagcgtttctaaagcacaaatgtgatcattccctcttgcttaaaattacacaatggctttctcttagttattggccaaaatctaaactcgttggctaaactgttcatgatctgactatgcttgccctttctaccagtctcccttatcacacttactttctagaaaactgaactgtttgctgttttctgagtaagtcatgaaatttgtgcttttctacctttgcacaggttatccccttttttgggaatgtttctttattttgtaactgtgattcattcttaaacatgtcatctccagatatctctgactctccatctttttaccctagagtttggcccatcattttgtgctcaaataagacattaattgcatccttcatagtatttaggacaaagtattatatttgtgtgtccaccatgccaaatagatgacagctcctttctttagagtaatatttctataggagtagaatacagtgttaaagagtacaaactttttactcagttctgattttggctctactttttaaagtagactatactagagatataattgcctcatactaaaaatsagatgataatactatctgaggatgacttgtattaagtgagataatgcatctaaactagtgttgtctggcacatggaaatctcttagtagatggaagtcacattagtatcttcagcacagattcattattcagcaaatatctgttgaataaatgatcacatatcaggtactcaggatatatgcactgttaactggtagtatctaactcggtaattggktatctacttagtatctggtaaggatatataaaagaaatcttatttctgtagaagcctycacaccactaatamcagtaataggaaatggctaagaaacatacaggatattatgtggttacacacttttataaaaggggagaattcactgtaaattctcaaatgatcagtcttacatgatcaaaagttctaaattcaacatttggattttattctgtaggttgagtaatggcaattcatggaggttataaagcagaggacaagcatgatcgaattggtcctttaagaaggataaacaggtgatggtttagacagtgatagggttggagggaaggagtagggtgatgacacctgaaggaggtggataagtgggaatggagttgggcctatgaatgaaattcatttgaagaaagacatatggttttgagtatagagaataagagacagataggagtcaaagattattctggccatgagcctggatgactgagagaatgataatatcattggaggaattagagatgtggaagagggatcttgtttggggaaaagtggtctagggaaaatgagtttacttggggcttattatttgagttgttcaagtgaaaaattcttgtaggctcttgtagatacagaattggagtaaagatgagagactggtgctgaatgtgagtactagtactgtttactaagggaatacttttaaatgtttgtttttttaatgtgttgtttttttctttaaaatcaagaccagttgttacaaagaartaacatgtttkartgtcattgtcgtttaaaaaatatttttacttcttaaagtagactagccaaaaggtcccgaacttggtatctaaaatgaatatggggaataaggattttgaaaaatagctgttgctctcattcttttttttttttttcaatatgagacagggtcttgctgtgtcacccaggttggattgcagtggtgtgatcatggcttactgcagcctcaacctcccaggactcaagcaatcctcacagctcagcctcctgagtagctgggactatagatctgcatcaccacatctggcaaattttttgtattttttgttgagacaggatctcactttgttgtccaggctggtcttgaactcctgggctcaagcgatcctgtcaccttcgcctcccaaagtgctgagattacaggtgtcagccatagcagccggcctattctctcattcttgaagaatgaaagctccatgttatgtttgaagttttacgagttgactgctttgtaagaaaaaaaaaaaaaaaaaactcgag

SEQ ID NO: 1260 - DNA, 1491 bp, Homo sapiens
ggcagaggggaggtcgtctagggaatcgaggtgccggctgctccttcctcacaatttggtttgtgctgcaaggggagggtccccatcatctggccccagtggtgtaaggagctgactgggattcagtcactgacttggagccgctcgggggaagtcccgggcaggagcgcttcacctctatgacacgattgtattatcgggatgcctctgcctgtgttattatgtttgacgttaccaatgccactaccttcagcaacagccagaggtggaaacaggacctagacagcaagctcacactacccaatggagagccggtgccctgcctgctcttggccaacaagtgtgatctgtccccttgggcagtgagccgggaccagattgaccggttcagtaaagagaacggtttcacaggttggacagaaacatcagtcaaggagaacaaaaatattaatgaggctatgagagtcctcattgaaaagatgatgagaaattccacagaagatatcatgtctttgtccacccaaggggactacatcaatctacaaaccaagtcctccagctggtcctgctgctagtagtgtttggcttattttccatcccagttctgggaggtcttttaagtctcttccctttggttgcccacctgaccattttattaagtacatttgaattgtctcctgactactgtccagtaaggaggcccattgtcacttagaaaagacacctggaacccatgtgcatttctgcatctcctggattagcctttcacatgttgctgactcacattagtgccagttagtgccttcggtgtaagatcttctcatcagccctcaatttgtgatccggaattttgtgagaaggattagaaatcagcacctgcgttttagagatcataattctcacctacttctgagcttatttttccatttgatattcattgatatcatgacttccaattgagaggaaaatgagatcaaatgtcatttcccaaatttcttgtaggccgttgtttcagattctttctgtcttggaatgtaaacatctgattctggaatgcagaaggaggggtctgggcatctgtggatttttggctactagaagtgtcccagaagtcactgtatttttgaaacttctaacgtcataattaagtttctcttgtcttggcatcaagaatagtcaagttttttggccgggcatggtggctcatgcctgtaatcccagcacttggggaggccaaggcaggcggatcacatgaggccaggaattcgagaccaacctggtcagcatggcaaaaccccgtctctactaaaagtacaaaaattagccaggcgtgatggcacgtgtctgtaatcccagctactctggagactgaggtgggagaatcgcttgagactgggaggcagaggttgcagtgaaccgagatcatgccaccgcacttcagcctgggtgacagagaaggctccgtctcaaaaaaaaaaaaaaaaaactcga

SEQ ID NO: 1261 - DNA, 1460 bp, Homo sapiens
atgttcgtatgttcttccacttcagtgaaattctggatgggaaccagctccatattgcagatgaagtagagtttactgtggttcctgatatgctctctgctcaaagaaatcatgctattaggattaaaaaacttcccaagggcacggtttcatttcattcccattcagatcaccgttttctgggcacggtagaaaaagaagccactttttccaatcctaaaaccactagcccaaataaaggcacagagaaggaggctgaggatggcattattgcttatgatgactgtggggtgaaactgactattgcttttcaagccaaggatgtggaaggatctacttctcctcaaataggagataaggttgaatttagtattagtgacaaacagaggcctggacagcaggttgcaacttgtgtgcgacttttaggtcgtaattctaactccaagaggctcttgggttatgtggcaactctgaaggataattttggatttattgaaacagccaatcatgataaggaaatctttttccattacagtgagttctctggtgatgttgatagcctggaactgggggacatggtcgagtatagcttgtccaaaggcaaaggcaacaaagtcagtgcagaaaaagtgaacaaaacacactcagtgaatggcattactgaggaagctgatcccaccatttactctggcaaagtaattcgccccctgaggagtgttgatccaacacagactgagtaccaaggaatgattgagattgtggaggagggcgatatgaaaggtgaggtctatccatttggcatcgttgggatggccaacaaaggggattgcctgcagaaaggggagagcgtcaagttccaattgtgtgtcctgggccaaaatgcacaaactatggcttacaacatcacacccctgcgcagggccacagtggaatgtgtgaaagatcagtttggcttcattaactatgaagtaggagatagcaagaagctctttttccatgtgaaagaagttcaggatggcattgagctacaggcaggagatgaggtggagttctcagtgattcttaatcagcgcactggcaagtgcagcgcctgtaatgtttggcgagtctgtgagggccccaaggctgttgcagctcctcgacctgatcggttggtcaatcgcttgaagaatatcactctggatgatgccagtgctcctcgcctaatggttcttcgtcagccaaggggaccagataactcaatggggtttggtgcagaaagaaagatccgtcaagctggtgtcattgactaaccacatccacaaagcacaccattaatccactatgatcaagttggggggaatctggtgaagggttctgaatatctccctcttcatccctcccgaaatctggaatacttattctattgagctattacaccagttttaacaccttcctcgtgttatgtttaaaaaaataaa

SEQ ID NO: 1262 - DNA, 2653 bp, Homo sapiens
  misc_feature (23)..(23): n equals a,t,g, or c
  misc_feature (2630)..(2630): n equals a,t,g, or c
  misc_feature (2636)..(2636): n equals a,t,g, or c
ccacccaaaaaggtcaacttccnctccaaactcggtcctgaaggaaaaacctggattaatcctttcctatgcagacgtttctggtttacaaaaggacgcagcccyggactacaagtctggaactgacaagttccttatgacccttgacaaatcaccttaacccatctgagccttaaattctcatttatttcctgcataaggagatttggctaaatgctttctgaggtcctttggagtcctgtggctccatggtaatgtgctcctttccttgaagattgggggttttgtaatgttgagatactttgcctctatgcttgtcagctcatgaccagtcctagaagaggagtcgagacataagccaccttcagaggttcaatggaaactttaaaaccataccaaactcttttttaaaattagaattaacaagaaaaaaaaaaagggtggggtttatgagccttagttcttggaggattataagagtacttccccagttttgaggctggacagttaatatactttatatcaattatacatttaatataatttaatttaaaataatttaaagattcttaggagatagtctgactttcctgacctagatgggaatgatcagatagggattttttttgtggcacaggctaaatttgatggtgacatttatattgttgagaatgttacatcttattttaccacaacttttaaaaaatgttacatcttttgcagtaggatcagttgtgaggcacatagtagctgaggctccatggagccacctttcatttctttcagtcagagaggaggacagtctctgtctctgcatttctggtgtcttgcttgtcggtggcagagccatgcttgccggcatttgcttaggyggccatagtagttgctaagtgtacaggtgactgggcagggatgggaggtggccacaggtcagagacaagtgctcagtcagtccctggtgccaggactgtgtgcctcggtgccttgggaaatggaagctccctggtgcagctgcagctgtgggtggaggtagagaagccagcaagaccttggtcttaaccccgtgttcattttcttgctagctgtgtgacgttgggctacctcgcttctctgagtacaaatggtgtgtggtgaatgggtcccaggtatgctacgagctttgagggctgctctttttctcttcatagcgataagtgttaaactgtctttcttaggaaacgttcacagacttgcaacagctgatgtcctctgagtactgtctgactccctcaggcaagttcctgaattcagtaccatcattattatttttgtgtaagactttgacaaagtatagcccctgccaccagagcagcctgtacagtgggtctctaaggtgggacctgccccgggcctgccatgcacgtgtgtgaaacagcgtgaaaagtgtcgcggtaaggtgaccctgggttacccaggcaaggctcggtgtttgtttcagaaagcagagaagtatgtaattgattttaaaagtttctgtttaaaatatttggctatgttttagactatgaaggaatgaactttgcttctctggataagaaagtcacatacattgttccagctccaagtttgttcggccctcgccacaagtggatgtagcgtttggccctttgtgtgccttgctggtgactctggttttgggagctcggatatgtcccagaagcaggcttatggcacttctgtagctcccttgctacccttcctttgtgtctagataagtgactgacatgcttttctttggtctcaggaaagtgggggctcagcaagaactgattaccgagccattcaactagccaaggaaaaaaagcagagaggagcggggagcaatgcaggtgaggccgtgtgtgctgcagccggacgagcaagggcctgagggttctctgtcactgttactggcagaagaaacacagcaggtgtttctgtgctcttggttttacktttctgttcagaatacccttttatcaactccttagttttatttgaacttaagggaaaaaattagtaacaaaattcccagcatcagtatgaacatattttatttgcctaaacaagctttgtgaaagttaagcgttcaaacaccagtgtcagttacctggaaggctactaaggtaaataagcaaagcaggccagttgtcaggaaagcagagattgtgcctggtgctgaatggccttggggcctgatcttggcatggcagagacctggggactgccactgtccccaggtacgtgtacatggagccaaactgtgtgtcctgtggcattgtcagagttatgttgaaatcttatttgaaaatgttagcaacttacttgcatttttaaagaccaaacaagagctggtaacctatggcctcaagcatctgtccttcctaaaaatggaatagtgggatgtagtgcttaatggaaactgctaaatctttttctaaaaactaacagtggatttttaaaatatattgttttttgtgtatttcatttgtcctttgtatttatctaaaagggttgatatgattttatatcttgctctctattcctaatagtattatgacttcttatttaaaataaataacaattgccggtttctgtttaatcagttttcntaaagnccagggtttcaccatag

SEQ ID NO: 1263 - DNA, 896 bp, Homo sapiens
ggcacgagctaatttggggtatcactgagctgaagacaaagagaagggggagaaaacctagcagaccaccatgtgctatgggaagtgtgcacgatgcatcggacattctctggtggggctcgccctcctgtgcatcgcggctaatattttgctttactttcccaatggggaaacaaagtatgcctccgaaaaccacctcagccgcttcgtgtggttcttttctggcatcgtaggaggtggcctgctgatgctcctgccagcatttgtcttcattgggctggaacaggatgactgctgtggctgctgtggccatgaaaactgtggcaaacgatgtgcgatgctttcttctgtattggctgctctcattggattgcaggatctggctactgtgtcattgtggcagcccttggcttagcagaaggaccactatgtcttgattccctcggccagtggaactacacctttgcccagcaccgagggccagtaccttctggatacctccacatggtccgagtgcactgaacccaagcacattgtggaatggaatgtatctctgttttctatcctcttggctcttggtggaattgaattcatcttgtgtcttattcaagtaataaatggagtgcttggaggcatatgtggcttttgctgctctcaccaacagcaatatgactgctaaaagaaccaacccaggacagagccacaatcttcctctatttcattgtaatttatatatttcacttgtattcatttgtaaaactttgtattagtgtaacatactccccacagtctacttttacaaacgcctgtaaagactggcatcttcacaggatgtcagtgtttaaatttagtaaacttcttttttgtttgtttaaaaaaaaaaaaaaaaaaaaaaa

SEQ ID NO: 1264 - DNA, 2070 bp, Homo sapiens
agaagactaagggggcgtctccccggcttcctgcggcgtcggtggcgagctgaggtggaggcaggctgcggcagacggcgacagtggcggcggcgcatggcagggcttgcaggatccctgctgccttggtgatcccgggctgacagccagagagcacagcggctcagctcctggagagtgagggttgaagaaagcggagggcagccgcctgcgcccgctggctcccattaggtcggttcctgcagcggtgcccggcagccttggtgaaggccctgcccggcagagatcatgtattgcctccagtggctgctgcccgtcctcctcatccccaagcccctcaaccccgccctgtggttcagccactccatgttcatgggcttctacctgctcagcttcctcctggaacggaagccttgcacaatttgtgccttggttttcctggcagccctgttccttatctgctatagctgctggggaaactgtttcctgtaccactgctccgattccccgcttccagaatcggcgcatgatcccggcgttgtgggcacctaacggcctgccctgttagctttccaaggaagcagaagacgggaggggaggcattgacataggtcataaagcattggagtttcaaatcccgcagcctcgcgggtgtcacattcctgacggcgcctttttggcctgtgatgttttatccttacaatgtgaataatggcactgaccggtgcttttattgtaaagtcctatagtcgtgggtggtcttgtggttgtgtgtgttctgtccccatctaggtcctggctggccgcatgaccacccctctcgcctcattactgtgaggagtctgggtccatcctggtcagctgccccaatgtgacctggggcagataaaatgccagtctcattgtcacctctgtgacccctccttgtcagggtctccttccttcccagaatgttactgactcctcagtccctcttctggtttccctttatttctcttctacccttttccttttttggggagtacctgtccaagacagggctcatttttgcacttatctcgaatttgaagagattgctgacgcccgagagcctcgctttttcatccttctttccttgttcagcaggctagacagaaacatgtcttgactgttagttgtccacaaatcttcagtattttctccacttcatttttaagaaaggaagcaacagatagatgttgctctttcacctgggtgtctgggctcaagctttcccgcccagcctcacttcctttgcccttcctcctgcctttctcaactgtcccaaggagggggcctcattgtgtctcccgtgcatgctctgcagcattgaagtatggtgtgttcacgtagttctagcagtccccagctgagtgagtgggagagtacctgtgtgtttcgtaacggccttgatccccttgatagatgtttggatattttttggtgtgccctgtgtgtgtgtgtgtacaaatacatgtgtatattccttttaaagaagctttatcgaacgtggtctgattttgaggtttagcaatagctagctatatatggtaggtgccgctacagtttttatttagcatggggattgcagagtgaccagcacactggactccgaggtggttcagacaagacagaggggagcagtggccatcatcctcccgccaggagcttcttcgttcctgcgcatatagactgtacgttatgaagaatacccaggaagactttgtgactgtcacttgctgctttttctgcgcttcagtaacaagtgttggcaaacgagactttctcctggcccctgcctgctggagatcagcatgcctgtcctttcagtctgatccatccatctctctcttgcctgaggggaaagagagatgggccaggcagagaacagaactggaggcagtccatctagggaatgggactgtgaggccatacttgtgaaacgtctggactgctattctagagcttttatttggtgtgttcgttgcacagctgtttgaaatgtttaataaagctttataaactttaaaaaaaaaaaaaaaaaaaaaaaaa

SEQ ID NO: 1265 - DNA, 569 bp, Homo sapiens
cgagaagaaaatagtgaatcactgtagcaatggctttgattcagaccttaaaatcacataagaagaattacaacatgttatggatttttaagtggcaggtattgtaactgttttttgtgtgcaaaatactgagtaaccactgggaaaatatttcagatgaaagggatgacaaaagcatgttgcgctttgcatcagcaaggcattgacttctgaaaaaatgatctgaaaaaagtttcaccgtttgtcttcttacctcattttaagaagcatgtgaaaatgggatactatagactactgagaatttcagaaattgagaacaatttcataataaaacggctatatttgaagagagaatacattttatataaacaggaaaatacatttgacactttatggaattttatgagactttttgtgggaacagaaggtcttcaaattgtaaaatgtaaagattgctctttttattaagtctttaacagggatgtatttcattgtatgttttgggtatggctttggaataaatcattttatattttaaaaaaaaaaaaaaaaaaactcgaggggggggc

SEQ ID NO: 1266 - DNA, 1123 bp, Homo sapiens
  misc_feature (1067)..(1067): n equals a,t,g, or c
ggcacgaggcgcgatgcagcacaggctagaggctgcgcaaggcggggcccgcccctgggaccctccgggccgggcggtttggccccttagcgcccgggcgtcggggcggtaaaaggccggcagaagggaggcacttgagaatttcggacccaagtttcttcaccatggggatgtggtccattggtgcaggagccctgggggctgctgccttggcattgctgcttgccaacacagacgtgtttctgtccaagccccagaaagcggccctggagtacctggaggatatagacctgaaaacactggagaaggaaccaaggactttcaaagcaaaggagctatgggaaaaaaatggagctgtgattatggccgtgcggaggccaggctgtttcctctgtcgagaggaagctgcggatctgtcctccctgaaaagcatgttggaccagctgggcgtccccctctatgcagtggtaaaggagcacatcaggactgaagtgaaggatttccagccttatttcaaaggagaaatcttcctggatgaaaagaaaaagttctatggtccacaaaggcggaagatgatgtttatgggatttatccgtctgggagtgtggtacaacttcttccgagcctggaacggaggcttctctggaaacctggaaggagaaggcttcatccttgggggagttttcgtggtgggatcaggaaagcagggcattcttcttgagcaccgagaaaaagaatttggagacaaagtaaacctactttctgttctggaagctgctaagatgatcaaaccacagactttggcctcagagaaaaaatgattgtgtgaaactgcccagctcagggataaccagggacattcacctgtgttcatgggatgtattgtttccactcgtgtccctaaggagtgagaaacccatttatactctactctcagtatggattattaatgtattttaatattctgtttaggcccactaaggcaaaatagccccaaaacaagactgacaaaaatctgaaaaactaatgaggattattaagctaaaacctgggaaataggaggcttnaaatgactgcccrgcccacatcatacagtttgaaatgaaactttgccacaaccagc

SEQ ID NO: 1267 - DNA, 1255 bp, Homo sapiens
gagatgaaatgtctttcctccaggacccaagtttcttcaccatggggatgtggtccattggtgcaggagccctgggggctgctgccttggcattgctgcttgccaacacagacgtgtttctgtccaagccccagaaagcggccctggagtacctggaggatatagacctgaaaacactggagaaggaaccaaggactttcaaagcaaaggagctatgggaaaaaaatggagctgtgattatggccgtgcggaggccaggctgtttcctctgtcgagaggaagctgcggatctgtcctccctgaaaagcatgttggaccagctgggcgtccccctctatgcagtggtaaaggagcacatcaggactgaagtgaaggatttccagccttatttcaaaggagaaatcttcctggatgaaaagaaaaagttctatggtccacaaaggcggaagatgatgtttatgggatttatccgtctgggagtgtggtacaacttcttccgagcctggaacggaggcttctctggaaacctggaaggagaaggctcatccttgggggagttttcgtggtgggatcaggaaagcagggcattcttcttgagcaccgagaaaaagaatttggggacaaagtaaacctactttctgttctggaagctgctaagatgatcaaaccacagactttggcctcagagtaaaaatgattgtgtgaaactgcccagctcagggataaccagggacattcacctgtgttcatgggatgtattgtttccactcgtgtccctaaggagtgagaaacccatttatactctactctcagtatggattattaatgttttttaatattctgtttaggcccactaaggcaaaatagccccaaaacaagactgacaaaaatctgaaaaactaatgaggattattaagctaaaacctgggaaataggaggcttaaaattgactgccaggctgggtgcagtggctcacacctgtaatcccagcactttgggaggccaaggtgagcaagtcacttgaggtcgggagttcgagaccagcctgagcaacatggcgaaaccccgtctctactaaaaatacaaaaatcacccgggtgtggtggcaggcacctgtagtcccagctacccgggagggtgaggcaggagaatcacttgagcctgggaggtggaggttgcggtgagctgagatcacaccactgtattccagcctgggtgactgagactcttaactaaaaaaaaaaaaaaaaaaaaa

SEQ ID NO: 1268 - DNA, 1965 bp, Homo sapiens
ggcacgaggagaaacccagaaacatcagtaactcagagttcctctgctcaggatgaacctgctacaaagaaaaagaaagatgagctggatcctcttcttactcgcactggtggagcatatattccccctgcaaagctcaggatgatgcaggaacagattacagataaaaacagcttagcataccagaggatgagttgggaggccctgaagaagtcaattaatggccttatcaacaaagtcaacatttccaacataagtattattattcaagagcttcttcaagaaaatatagttagaggaagaggactgctgtccaggtctgttttgcaagcacagagtgcttctccaatcttcacccatgtttatgcagcattagtggcaattatcaactcaaaatttccacaaattggagaattaatcctcaaaaggttaattcttaattttcgaaaaggctatcgaagaaatgacaagcaactttgcctgactgcttcaaaatttgtggcgcatcttattaaccaaaatgtggcacacgaagttttatgcttagagatgctcactttgctcctggaaagaccaacagatgatagcgttgaagtagctattggttttcttaaggaatgtggcctcaaattaacacaagtgtcaccaagaggaatcaatgctatatttgaacgccttcgaaacattctgcatgagtctgaaattgacaaaagagttcaatatatgattgaagtgatgtttgctgtacggaaagatggattcaaggaccaccccattatcctagaaggtcttgatttggtggaagaagatgatcaattcactcatatgctccctctggaggatgactataatccagaagatgttcttaatgttttcaagatggatcctaattttatggagaatgaagagaagtacaaagctattaagaaagaaattcttgatgagggagatactgactcgaacacagaccaggatgctgggagtagtgaagaggacgaggaagaagaagaggaagagggagaagaagatgaagaaggacaaaaagtaactattcatgacaaaacagaaattaacctggtctcatttcgtcgtacaatttatcttgctattcagtcaagtttagattttgaagaatgtgctcacaaattgctgaaaatggagtttcctgaaagccaaacaaaagaactctgcaacatgatacttgattgctgtgcccaacagaggacatacgaaaaattttttggcttattagctgggcgattttgcatgctaaagaaagagtacatggaatcctttgaaggtatattcaaagaacagtatgataccatccatcgcttggaaacaaacaagttgcgaaatgttgctaagatgtttgctcaccttttatacactgattcacttccatggagtgttcttgtatgtatcatactgagtggagtaaccattacctcatccagtagaatttttgtcaaaatatttttccaggaactgtgtgaatacatgggtcttcctaaacttaatgcaagattaaaggatgaaactctgcagccattctttggaggattattaccccgagatgatccaaggaacactcggtttgccatcaacttctttacttctataggtcttggaggtttaacggatgaactgcgggagcatctcaaaaatacaccaaaggtcattgtggcgcagaaaccagatgttgagcaaaataaatcctccccatcctcttcctcttcagcgtcctcctcttcagagtctgactcatccgactctgattctgacagcagtgatagcagttcagagtcttccagtgaagagagcgactcttcatccatcagtagtcatagctctgcctcagctaatgatgtaagaaagaagggacatgggaagaccagaagtaaagaggtagataaattgatcagaaaccagcaaacaaatgataggaaaaaaaaagaaaaaaaa

SEQ ID NO: 1269 - DNA, 1901 bp, Homo sapiens
  misc_feature (1425)..(1425): n equals a,t,g, or c
  misc_feature (1447)..(1447): n equals a,t,g, or c
  misc_feature (1497)..(1497): n equals a,t,g, or c
  misc_feature (1504)..(1504): n equals a,t,g, or c
  misc_feature (1515)..(1515): n equals a,t,g, or c
ggcacgagttaggctcgtcagacaccgagtgtcccgagcaaaaacaagtgtttgcaaacccaagtccaacccagaaatcccccgtgcagcctgtagaggacctagctgggaacttatgggagaagttacgtaaaaaatcaggtcttttgtggcatattctatcgcaatcgatgagatcacggatataaataataccacccagttggccatattcatccgtggtgtcgatgagaatttcgatgtgtccgaagaacttctggacacggtgcccatgacgggtacaaaatctggcaacgagatctttttgcgtgttgagaagagcctgaaaaagttctgtatcaactggtcgagattagtaagcgtggcctccactggcaccccagcgatggtgatgccaataacgggcttgtcacaaaactgaagtccagggtggcgacgttctgcaagggtgcggaactgaagtccatctgttgtataattcatccggaatcactctgtgctcagaagttgaagatggaccacgtcatggacgtggtagtgaagtccgtgaactggatatgctcccggggactgaaccacagcgagttcacaaccttgctctatgasctggacagccagtatggtagcctcctgtactacacggagattaagtggctcagtcgcgggctcgtgctaaagagatttttcgaatccttggaagaaatcgactccttcatgtcatccagagggaaacccctgcctcaactgagctccatagattggatccgagacctggccttcttggttgacatgacgatgcatctgaacgctttgaacatctctctccaaggacactcccaaatcgtcacgcagatgtatgacctgatccgggcgttcctagcaaaactgtgcctctgggagactcatttgacgaggaataatctggcccactttcccaccctgaaattggtttccagaaatgaaagcgatggcctgaactacattcccaaaatcgcggaactcaagaccgaattccagaaaaggctgtctgatttcaaactctacgaaagcgaactgactctgttcagctccccgttctccacgaagatcgacagtgtgcacgaggagctccagatggaggttatcgacctgcaatgcaacacggtcctgaagacgaaatacgacaaggtgggaataccagaattctacaagtacctctggggtagctacccgaaatacaagcaccattgcgcaaagattctttccatgttcgggagcacctacatctgcgaacagctgttctccattatgaaactgagcaaaacaaaatactgctcccagttaaaggattcccagtgggattctgtactccacatcgcaacgtgatggagagaaaactcctggcagggccgctatggtgggaaaggctggagtcttctagtcccnagggattgggagatgcccaatnaattttttttttcttttttaagatggagtcttgctctgtcgcccaggttngagtgcngtggcgtgatntcggcttactgcaacttccagctcctgggttcgaacgattctcctgccttagcctcccgagcagctgggactacaggcatgcgccaccatgcccggctaatttttgtattagtagagatgaggtttcaccatgttggccaggctggtctccaactcctgacctcaggtgatccacctgcctcgacctcacaaagtgctgggattacaggcatgaaccactgtgcccagctgacaaaatgagttcttaaacttttttttttttcagttttttttccactttgaatcagaaatataatctgcagtatcatacttgtttatattacattgtatgcctcactattcattaaaaatcaagaaagttttattgtaaaaaaaaaaaaaaaaaa

SEQ ID NO: 1270 - DNA, 2354 bp, Homo sapiens
aaaaagtcaccttgtaactcatctctttttattgtaagtttattaaaaatgaagaggacaacaatgagaaggaacataaagggttagctagcactgtctcctggtgcatggggctgtgcagatgtcccggccacttcttccttcatacttcccttagagaacttgctctgctacaagcagtgggcttggactaaaagtgattaaaataccacaggcataaggagaaaaggagtatatgtagtagtaataattactagtataaattattttcttcacatgctatgagtaataatattaaaaaactcattttaccattaagattccttatgctgaagctcttccatttagaatactgtcaatgtcatttactggtatgaactaaaggtcccccttcttttccacttcactgggaaccttagtaaaacaccagcatatcttacctctctttctgactggccgatgcttccagagactgaatgttgggaaaacctagtagccaaacaattytaggacagaataacatttttatatttggttccaccatcttattacatttagttatagttttaaaaaagaaattcaagcccattaaaatatgtctggtcaatgaaatgcttccttttattgtgttgtgctattgtactttgtttttcaaaacattgtaaaaatagtatctttggtttagtattttggattatatattataatctgaggagtgttttgcttatgtagaatccagatatatttctgttacctaggagatgttacttacatatgtaatactgtatcctgcacgtggaaatattcagaattgtagatagcataactctccctgctcctattcttttgagcctaggtataattttttttttttttttttagaaaaagacatatttagctttaatttctatttatgctaaacatatttataagtagtctgtcaatataataccaactatttttatttttacataattcaattatttcatttgacatgtctggcagactcaagacattaagtaaaaaattggaactatgatttttctttgtcattttttaaaaaagaattattttattaacctgctggcatataatctggagttcttttcacaaccttactttttctgatttgctttattgaatgattgaatactcatttctttctaaaaatatgttgtaaattctcccttggcaagatttctccctatgagggtagttattatttgagtctgccaagtggttaccatggggcaaggtgccatgatgtattcttgggtgcattggttttttgcgcattgtaaatttaagacacttatagtaagtggactcattcatagatgagtttcagaaccttttacgttctcggtagaggcttctgtcggacaggcagaagagtgtattcctcacttttttttttgtcttcaaattccagtaaggcatagcacttttaagaaattagaatttttctatcatctatgcaaatgatatttatgttaatattaaatatcttatgttacactgggagtaatttgaggtgcaattatttttattactactttgaatagaggaccattatccttctttcttcagaaaactaagaagtaagtgtaacttttaaagtaagtatatatcagtgagagtaggcttgttttacaactatttctagccagtgagttgtgttttcatgtctcatcaaaagacaataccacattgcatcattttacaaaatatgttgtcattttcatttcagttgtaacataggaaaatagatatttcctagatgatttctgagtttcttactgcaaagaacagttataaattggtatacatgtgtctctgtaatagggataatattgatatatctgttgctacatatttaagaatcattctatcttatgttgtcttgaggccaagatttaccacgtttgcccagtgtattgaattggtggtagaaggtagttccatgttccatttgtagatctttaagattttatctttgataactttaatagaatgtggctcagttctggtccttcaagcctgtatggtttggattttcagtaggggacagttgatgtggagtcaatctctttggtacacaggaagctttataaaatttcattcacgaatctcttattttgggaagctgttttgcatatgagaagaacactgttgaaataaggaactaaagctttatatattgatcaaggtgattctgaaagttttaatttttaatgttgtaatgttatgttattgttaattgtactttattatgtattcaatagaaaatcatgatttattaataaaagcttaaattctcaaaaaaaaaaaaaaaaaaaaaaaaaaaactcgag

SEQ ID NO: 1271 - DNA, 2298 bp, Homo sapiens
caggaactccaggttctgctggccgtggcatcctctctccaagtctgctcccttaccggagctacgataacgtagcatgaatgacacctgagattagaggctggggctcactgcaggctgtggagagtcatgctggtccacatgaacacttggcagtgctctcgtagacccctcggtgatgtggaatggacaggtgcctcgcaagagaagcaagcacgttcataacaaaacagcaacacaaagacatgttaagcatgtttatttatttggctgtttttgtttatttactcgagctgtggtcacagctgccaggtacctaagcaagtcagttgggtacagcaggacacgccaccattccagggtactggtaccgccagaaacaggagtgggtcttgtcctgttgcaggcacactgcagtggttttttcctcggcagctctccaacaaacgcctgagtcacaggccagagctgccttggtatgttgttaagtccaaaacttcttctctgggctacctatcttccttcatgaagcaggtgctcaggacccggaagaatcatctacctcccagctttgtgagacagaaccaagtaaaaggaaacatgctagaaaacgtgcctagagaagacacttcaacctttgccttatccaacccctcttcagagaaaggtgtcccatggccccaaaaagaactgccaagttttggtgaggagtaacaccctggcatgacattccttctctttcctggccctcaaccacttccttcctttggctcttaagacctagcaggttctgtgaactctcaggccttggccagcactagttaggggaggtcaggtggtcaatgtcctggtgattttatgagactgccccactgagaaaacttacttacttcaggcatccagtgcccccacccagggttcaggccctgtctaaggtgttgcttaaagacaaaaaggcaacatgtgcctcactggtggtgtgccactgttctcatgctgcctcctaagtgactccgattttcagccctggtagaataaggaagacagctgatgcctccttagccccttagcacatgttcctaaggtgtgttgtcaagccaacctgaagttctgcctccctgttatagtccctgtctcccccacagagacctgtgggtgctcccagcagagttgagactggctccgttgagttaatgactagaatatagtgctttcactacttgattgttaacctgttttcttctgatgccatcaagtaccagcagtcagactattccactggttaagtgtttactaccattaaagcgaggcatgaagcaaagagctgagtgagtcctctgctctccagaggaccaagaaatacctgtgtgacacagacccacttcagtgtgtacagcaaattctatagtgcttctgagcccagcagggctttacctgcccctggagagttttagccgtcttgtgtttcttgtttacttcacaaccaaatttgtcccctcttctctctgttaagggagagaagtcactttagctggataatacctatgtaacaaactgagcagctgttatttgggcaaaatcaaaggaagaaagagactatggtcttctatttattgtgggaaggaaaacagggtggggcgggtgagtgaaaaggtggaaatccctggtaccttgcctggtggttacacagtttaaccataggccaattttaggggcctctgaagtatctttctacaaacgcagacaagctccactacccctaacctgccaggatgctcaagtccactgtcacaatccctttcagaaaacattagtggccgctgccccagctacagagacggccgaaatgctttcactccttagctttgccaactccatcctccaaaacttcccagaatacctccctttccagttctaccaaatctgtacttgggagcagcctgctggatccagaacatgacaacagagagctgcgtccacagggaacaaagccctgacctctctctccacattacccttacaaaaacaggccctccccatgagagagctacacggcaggggcagacactgtgagtataagctactttcctccctggagtgctctatgtgggcagaacatgctctccttgcctctcctggaaggtgtcttctctatggcctggctagagctgcaaaaaagggacacaccccacttcggtaaaagaaaatagggaaaggccataaacaaagacagacttgtagtttattttgtattttttttaaataaatacactttacattaaaaaaaaaaaaaaaaaa

SEQ ID NO: 1272 - DNA, 1296 bp, Homo sapiens
ggcacgagcttccccattctgttttcctacacaattaaataattttagttccgtaaattgttctttttacaacgctttcttgcattttctctctttcctgtgctttatccaattttgtctttggttcatcatgcccctcaggcatggagtttgaaaactaggtagataggatgtctaaaccaaaaaagtataccatagtattggtcttactcccatacagagaagccattcaaactgtgggaatgaatttgagttattagagaaatgataatagtagtttaagtatgttcattcaggtttacacatatctgttgttaaatttaggatggcccgtactttggaaccactagcaaagaagatctttaaaggagttttggtagccgaacttgtaggcgtttttggagcatattttttgtttagcaagatgcacacaagccaaggtaatcataattcagaagttaatgctttctaaaggggtatagttttgctaatccattttatgtgttaaatggcaatggcatgtttggagaaattggttcttcagattcaagatattagacatttttaggggcagaacaggaatcaaagtattcattattgtggactagatcactctcacttctcccttaaaaatgttgtttgtgggctaaggaaaaaatttcatacctccatggattttactattgtggaggatatagcaagtgtccttggtctggcttagtttgggagcacagatggaggaaacttagcctgcccattatacttcattgtttggtagactaagaaagtaactggtattgctgttttctgagtaaccagttttctcaggctatagtattcttcctgggcatcaacagtgggcactaagactttcacatgctatggccgaaagtgctttaacatttttcttggggaaattttatattagagctctcaactttttaaattaggaagtgattttccctaaaacagggaatagacctggcatgatagccatctttgaaacttgccacagtcttcctcagcatacttggttggaacgctgtaccaagatgctactggatactcaaaaaatcccttttcttttaaactctaaggaagggtattaaaaaaacatcccaacagtatttaaaaacaaattaaagcttgggatcagttttaaaaagtgtcatggctgggtgtgatggcttgcacttgtaattccagcacttcgggaggccaaggtggaaggactgcttgagctcagtctgggctaaacataacaagacactgtatcttaaaaaaaaaaaaaaaaaa

SEQ ID NO: 1273 - DNA, 3147 bp, Homo sapiens
tttttatgggaattaaaaaattaaaaaaactgaaacttgtgaaaaaaaatgttatttaattgtaaaatctccaccccctgagcatatgttttcaggtctgggtgactaattagactgggaaacaagggcaggaacgatggccctgtgcttgctctgcccgctgcctctgtggatgtgtgggccgctggcttcagtcctgcttttttgatggccgttgtttacgctatgtatttttgcaggaggcctgaggtgggctgggttctcctcctatggcagggcttcactctcctcctccgttggggcttcgctgtcccttgagaatccttcttcatcttcttgtaatgaccttcggtgacaacagatctcaatgaggcagagaagtataatcaaaatcgttagtattccagtcacaattaacgccaagatgagttttttggtatagccatatcctggaagttcttttgtgaactcaagcgacttctctttctgttcactctgggcttctgtgctctcattaatgtagttctcagtcttccattggtccgtatcccattctatcttggatgcctttacttcctgctgcccactgagaagcttcatcaggtggcctgtcctggagacgagcttggcacaggtcacttgcacatgggccccagagcagtccatcttcaaggtccggataacatgagcaatgagccttctcacattgttgttggggataagggactgtagctgctgggttagctgaatttcaaactgatcacctggggacgagagcaatgggtaattgaagcttttgggctcgggggacaggtcagtgcccacgttgttgtattcccattttgtctcagtttgtttaacagttggccctaagttgaatgcagtcccagcggaatctgcctcaggaggatgattgtagtttgtgttttcagagatggtgacttctggcatgttagtgttttccataaaaacattttcttccaaggcatttcttgcagttgtgtcttttatattagtggtttctataaaatgttctgaaggagcagatacttccagaaaagggttttcttgaggactcaggtctcctaaggatgaaaaagccccttgtgaaggggaatttatgaggctcttcgctgcagagaacggaggcctgtttgcgagcatcagtctactcagataacttttctttctgaactttggactctttttgaccttgggtgttctgtgggtcatgcgggagcgagttttgtgaaagcggtatttttttctggaatgtgaaattggtttagaagccttcatatttgtaactctagcctttgcactttctaaaatggaaatagcgtgtgtgtgtctttccatctgtctctcacctgtggtagggcttttgcagggctggaggtagaaggcgcgcccttggagaagggtttcagcacagagactgctgccttatgctcttgggtgaacgaaggcttggtgtagacggcgtttcccgctaacttctcaggcccctgctgtgtgtgaggctgttccagctcccttggggctggactcccgagccttttttcttcggcagcgttctccacagatgcctgggcaccctgttccctcctgatgctctgccttcccacctctttgaagtgccttttctggatgctccttgggcccatgaggactctattcactttttgctggttttggcctacagtttgaatctttgccaggctgtttcctgtggttggcagtttaatgaacggtagtaacagtgatttcacatctaggtttactgctgagaaatatggcaaatgtaacttagtgtactgataaaatcactctcgtcattggtgtctagctgctcactcccaaagcctgacaagttgatgccactgctgtctgagggctcctctggctcaacaatcagctcagtgcttgttagttcttccgggcttgtaacaccttcatgaacgctccttctggattcccgaccgatgcttcttcagctgtcaaaaaagaagagactgctttgatcatgaaagatgatgggatgggatgcatcagtccatagctgtacaccccagtcacacagagtaggagtcagcaaacattcgagtgccattcagagaggagaaacacacacccaatcctaaacctatgaaatggcaacaacaaaaggagaaaatacatcttttgaaaacacggccacctacttggaacattccatagtgtgacatagagtaactctgtttaggattatttcgttgatccccagaggccaattgcccagtgctcagtcaaagcccaaggtggaagacaagtgcttccctgatgagctggcctctctgcagactgctccgtaccctgtgctgtcctgcctcagatgcagagagagcacaaggctcctgctctcctcgtcctcggtgcacctgtgttcgtgctaccatcacagctgaatgcaatgaaaggcggtcctctgagaggagcagggtggagatgctaaagtggaggccccgtcccattgctgatagatcctcatctggcatgcgctccaccctccccattctctgctcccacgtatcgtagccccatcacagaagatgcgacatggaaaaacgcactgtgtccaccctagttcttaaatttgggcagggatttggggtgtatgttaagagtttttcaaatttgccagattgtatgcctatgttgttaaatacacaatgaatccctggtatgatagcagtttctggataaacattacttgaggtcctaaaatgcagaagggaaaaagcaacttttgtcagatgcctactttgctttcatttcatctctaatattttggatggggaatcatccaaagcttctgactgcatgaaggtcaggtgtgccagtgtgcagctgggtttcttttctggaattaaaagtactttgggtggtggtgagggtcagaggaagaagtaaagattgtgagaaaggggaagaaacatgggcttggggagaacccagaattggggccagaagacctggcactaggctacagcacttagcacctctgatcttgtttttcctcatctgtaaaaggaggttaacaaagcttttctgcccacttcttggggagaagggaataacataattggtaaaaaaaaaaaaaaaaaa

SEQ ID NO: 1274 - DNA, 1432 bp, Homo sapiens
  misc_feature (1399)..(1399): n equals a,t,g, or c
gaattcggcacgaggaaagattgaagatgtgggctagtcaaaagtttactgataatttctcactcttctacagattgataatattgtcctgatgaaggactcagatacaggccgctctaaaggttatggtttcatcacggtgagtctctagtcttttaatttttttattttactttgggtttgtccacttgtctgattttgcagcttagcttcatcctcctcctttaggaactgtctaaatgacccataaaccctggtgcctgaagcttggactagccttctaccccttgagatgagtgcattgcttgagatcttggctttgctcctacactctgtcagtggccctggtatgggggtgttcaggagttcacccagcttccctggtgctgcaacttggctctttgggtaatagtaaccaggctgcagctaaaaggtwgggggtgtgagggasgttaggtatgggcttttaaagacatgctttatagaattgatgtttctcataacagggatgggaataggaaattatacttccctctggtgctaccccatttgaagcaatttctgcaccgagaaggatcagttattaacgtagcactatggggagaatagtgaggccacctaattatgggcaagcttcaccttttcctgacattccaacaaaatggttgccaattcctataactggttcttccagctccatgtgactccaggctgagaactggctgccagccacaaagtctgatagaagcttgtattttctgggcttaaaccaggcagcatacactcccacagtgacccacagggcagagggcagtaggttgtattctgtcattggaattgctcacctcaaaaatatccagtaaaggcaagccatgtataacacctgcctaggaactgtgcagtaccacatgccaggccctaaggcaggtaatgctgctagctagctaaacaagctagctgtggtgttgacaattctgtggtggcaagtaacttttgtaaccttttctcgctctctgtgtgactgagatatggaaaggcttctgtggggcatttttgcccttgcattgttgccttttgggtcaacaaccttgacacttaaacaaacagcagactgggaatcctctttgtaccagtgtgttgctgggtgctgctgataaaagggactagagagtaaaggccttctggtcagcaggtcacttagtcaacagctcttgtgtgtatgtgggggtgtgggttctgccttgctgtcagcactagggtgtgttccctcttaagcctggaattaggagttccagattcctagkacttaactaaaatttggccaggcgcggtggctcacacctgtaatcccagcagtttgggaggccaaggtgggtgaatcgcctgaggtcaggagttngagaccagcctgaccaacgtggtgaaaccccat

SEQ ID NO: 1275 - DNA, 1483 bp, Homo sapiens
gaattcggcacgaggaaagattgaagatgtgggctagtcaaaagtttactgataatttctcactcttctacagattgataatattgtcctgatgaaggactcagatacaggccgctctaaaggttatggtttcatcacggtgagtctctagtcttttaatttttttattttactttgggtttgtccacttgtctgattttgcagcttagcttcatcctcctcctttaggaactgtctaaatgacccataaaccctggtgcctgaagcttggactagccttctaccccttgagatgagtgcattgcttgagatcttggctttgctcctacactctgtcagtggccctggtatgggggtgttcaggagttcacccagcttccctggtgctgcaacttggctctttgggtaatagtaaccaggctgcagctaaaaggtwgggggtgtgagggasgttaggtatgggcttttaaagacatgctttatagaattgatgtttctcataacagggatgggaataggaaattatacttccctctggtgctaccccatttgaagcaatttctgcaccgagaaggatcagttattaacgtagcactatggggagaatagtgaggccacctaattatgggcaagcttcaccttttcctgacattccaacaaaatggttgccaattcctataactggttcttccagctccatgtgactccaggctgagaactggctgccagccacaaagtctgatagaagcttgtattttctgggcttaaaccaggcagcatacactcccacagtgacccacagggcagagggcagtaggttgtattctgtcattggaattgctcacctcaaaaatatccagtaaaggcaagccatgtataacacctgcctaggaactgtgcagtaccacatgccaggccctaaggcaggtaatgctgctagctagctaaacaagctagctgtggtgttgacaattctgtggtggcaagtaacttttgtaaccttttctcgctctctgtgtgactgagatatggaaaggcttctgtggggcatttttgcccttgcattgttgccttttgggtcaacaaccttgacacttaaacaaacagcagactgggaatcctctttgtaccagtgtgttgctgggtgctgctgataaaagggactagagagtaaaggccttctggtcagcaggtcacttagtcaacagctcttgtgtgtatgtgggggtgtgggttctgccttgctgtcagcactagggtgtgttccctcttaagcctggaattaggagttccagattcctagtacttaactaaaatttggccaggcgcggtggctcacacctgtaatcccagcagtttgggaggccaaggtgggtgaatcgcctgaggtcaggagttcgagaccagcctgaccaacgtggtgaaaccccatctctactaaaaaaaaaaaaaaaaaacycgagggggggcccggtacccaatc

SEQ ID NO: 1276 - DNA, 1443 bp, Homo sapiens
ggcacgagcagaatttatatataaatatatgcacccatttttttgagtgcatataatttagacctaaaaatccttatgattaggtgaaacaccaaaaatataaggaaaataacacagcagaggaatagctcagcctgaacagtgtgatggtcccagctactacatcagatgcggtttttttgctcccttatgttcttcggatatggttatggcatttgtaggcttggaggtaaagaactgaagataactggtgctggatagaggagccttattttttattatggcagcttgctatttttataacatggtgattgagttgaacacaatcaaagtacagtagtaactgatgtccccttcttcctggatgaatgagcagataaatattgatgtcagcatccttgaaccatatcaaagtgagcagtgtttggctactgcttctatttgaaatggtgctgtgttttggttgtggtctgaagctttgaagcgctacttagcatctcctttcttccatggagctctcacgattcaaacatgacagatttggtaaaatgctggttaggttgagtcttccttgcccccactcagtcatctttgtatgaatcccatgatttgggggtttttttctttttttttttataccagtttttagctggtgtttatgaagaacagtgagtacctagaactgtgccactaattaaaggaaatcctaagaaggtgcatttctttacagagctgtgtcatgccatcctttgggccctctgctggaaaagtagaatcaagtctcaaataatgcctttttaattgtatcctctagtattatagatataggacagtactgtatcatacctctgtgaatgtaaaatatcttgtacctgctttatgatacgtagtagtgaccgtgctttatcagagctgtttttaatgatgttattctagaatgttttctttccagatgatgattcagaagctaattttaaaaaacggtgccaggtaccacaacagtaacagaactttgcaattttctggggttttgttttttacctttttccccccttttttttaaatggagtgtgctggatgtctctataattttattcagatgactgcagaacctggaaaagctgttgctgctattgatgcataacatactgctattggtctttttatataaatatatatatatatacatatatatatataatttgaatttttggaaactttagctgtgctgtcaactttggaaaaagtatcccggtttactgtgttgagttggcattgtacagaaattaacagccatattggtctagaaacgttaaacttaatttttttccatttgtacaggggtaacgcactgtattaaatatgtaaggtcttatctacatgggtttgattacagaaactaataaagtattctctaaataatgaaaaaaaaaaaaaaaaaaa

SEQ ID NO: 1277 - DNA, 1213 bp, Homo sapiens
  misc_feature (66)..(66): n equals a,t,g, or c
caagctcgaaattaaccctcactaaagggaacaaaagctggaagctccaccgcggtggcggccgcnctagaactagtggatcccccgggctgcaggaattcggcacgagaaattatatttaacagatcttcaagagtaaaaaaaaaaagccatcttagtttaaggattagtttatagtgaaattgtaatttttaagaaagctgggcgttctataaaaaccttcaagaacttattaaaaattggtattttttaattctctagaaccacatagtagaatgaataacttgctaattttattcttaaaaacctcatgtttatgttttttgatttgtgtttgtatatttaaacactttgtgcgactttcagctactctgggcagttgaaaagtagaaagtcatacatgatacctgaaaatgagtttcatcacaaagacccccctccgaggaatgcagttgccagtgtgcaaaatgggcctggtggtgggccttcttcatcatcaataggaagtgcatctaaatcggatgaaagcagtactgaggagactgataaatcaagggagagatctcagtgtggtgtgaaagctgttaataaagcttctagtaccacacctaaagggaattcaagcaatggaaatagtggctctaacagcaacaaagctgttaaagaaaatgacaaaaaaaaaagaaaaaaactcgaggtcgacggtatcgataagcttgatatcgaattcggcacgaggagaggtcagattgctgtcagacatggcccatgaacatggacatgagcatggacatcataaaatggaacttccagattatagacaatggaagatagaagggacaccattagaaactatccagaagaagctggctgcaaaagggctaagggatccatggggccgcaatgaagcttggagatacatgggtggctttgcaaagagtgtttccttttctgatgtattctttaaaggattcaaatggggatttgctgcatttgtggtagctgtaggagctgaatattacctggagtccctgaataaagataagaagcatcactgaagataatacctggaagcatcatagtggtttcttaactctccaaaataagatttcttctctgtagcctacttgtctggtttatcccttacagaatattagtaagatttaatcaattaatatatatatatatatgccaaaaaaaaaaaaaaaaaaaa

SEQ ID NO: 1278 - DNA, 2667 bp, Homo sapiens
  misc_feature (2652)..(2652): n equals a,t,g, or c
  misc_feature (2659)..(2659): n equals a,t,g, or c
  misc_feature (2662)..(2662): n equals a,t,g, or c
gcaaagacttctggtactctgtggtcaacggggtcatctttaactgcttggccgtgcttgccctgtcatcccacctgagaaccatgctcaccgaccctggggcagtacccaaaggaaacgctacgaaagaatacatgggagagcttgcagctggaagcccggggaagtcatctacaagtgccccaagtgctgctgtattaaacccgagcgcgcccaccactgcagtatttgcaaaagatgtattcggaaaatggatcatcactgcccgtgggtgaacaattgtgtaggagaaaagaatcaaagattttttgtgctcttcactatgtatatagctctgtcttcagtccatgctctgatcctttgtggatttcagttcatctcctgtgtccgagggcagtggactgaatgcagtgatttttcacctccgataactgtaatcctgttgatcttcctgtgccttgagggtcttctgtttttcactttcactggcagttatgtttggcacccaaatccactccatatgcaacgacgagacggagatcgagcgattgaaaagtgagaagcccacatgggagcggaggctgcgatgggaagggatgaagtccgtctttggggggcccccctcamtcctctggatgaatccctttgtgggcttccgatttaggcgactgcccacgagacccagaaaaggtggcccggagttctcagtgtgaggcgtggctcatcagactgaaacttgctcacagacttccagttatttatttggggtctgaaggatatcaacagctcatctgtgaccaacagggcaactggaacctacacaaaccaattgcttgcagcaagcagagttttatatatttatagtcacagatggcagaggaagaggctctcagtccccacctgtacaacaacggaaaggtgtgtggccacacgaagaagccaaacgccgtggcctcctgcagagctggggcttctgtggaraatacttcgggttattacatgggttattcaaatcctgggtcctgagctgctgtttccaatcatgaagaaaaacagtgaatccagtgaacagggattctccaagcagtcatttcagggggctcctgctgaccccgccactcagcagtgcactccccggatcacagcagggcgtttacatagaaagacgttttggtctcgattagctccgatgctttgcactgaagttgcaaaagatctgtgcactgaacagtgaaggtggcttccggcacactccccgctgccccggaagagacatcctttgaccctctcagcaagtctgtgtgtgtgcgtgtctgtgcgtgtgcgcgcgtgtgtgcatgtgtgtcaaaattgccagtgttgtttaggcaatgtaacatttaccggctgtgtacagcaaacaagctattttttagaaaccgacgtttcagggaagaggggagagagccgcggggtcctgcccgtggttactatgaatgtattgctgttggaggacatctcgatccaaagaacagccgttcctgtgcggcccttcgttgccctcctgctttcattttttaaagaaatcttgagtgcttgagggccttggaactgattttttttttttgttccagccaaattagcagtgtataaatggcacctaggtaagagcagagctgcggctcggtgacttgatacttggggcagcccgatgctgtgtgtggggcaggggaggcatccttactggagaggcagggcccagccattgggcacctctgggaaggggaggggaccatgaggcagccagcccctggcaggggcgactgtgccaccgcaggcagcgctccagtcgggaatggccaggatggcgccctcttgttggagtttttggttagcttttacgttttcttctccacccacggcacaggtgataaaataggatccttggtgcggagcttaaaattatgccagaaagccaacagctcccctcgtggggccttgccttaaacttgcctggtttgtacattttttgccggacgcatcaagaagcaatctgtgacaaagtctgagggtcttcctttatgcttgccctccacactaagagaagttggcgtctccctcctgggaattgttttgcctttctgttcatctgtgaactgttttttgtttttaattactctgtaccccatccgaatcagggcttctaccactgctgatgcaaaacccacaaagggacctacctgagccaccgtcctagccaagcgagcaaacctgcagggggtttggaagtggacttggtcaccgcagaagcgtgtgcgccgttgggggaagagctgcgtcacagccagagggacaaagtgtgggtgatcctggagacgccagtttccgagattgttctgcatattcatttgcacattgttgtctgggttggacatgcgtgtgggcttcagtgtgaggcttttaatatgtatatcctgttatcaataaaacaattatccaagtggttgaatcctgtgagacttggcaagtgtgtgcaaatcaagtatacttgacttttcaacctcttctttcaatgtaacttttatatgaaataaagtaatcaattaacagttctcaaaaaaaaaaaaaaaaaaaaaaaaaaaccccggggggggggccccgggaacccaattnccccccnaanggggg

SEQ ID NO: 1279 - DNA, 1356 bp, Homo sapiens
ggcacgagatcccactcaatcttacctgtactatttgccatctcctctcaatcaagttcattccataatgatgttttcctgagtaaaccagaaaaaaaagaatccttataaataggcaaagattacttagtaaaataggcaaaggctctcagagccttttttctcatgtgacatgcatgtatctgaataggaacttcttgtttctggctgttgaattatccaaaaggatggctttagtggtaagttttgtgcataaaggaaaggaaggcatgttagccagtggagaatacatttaggccacagggaccttgtggtgcttcttggaattacgctgggctttatgcatggatagcagatgaggccaggggaggaaaaactctagagatggaaggatggatggacaaaggaagaagagaagaaagagagaataaatagcatatgcaatatgttgaatttgcactgctagcaagcaagaacttaagtcacacacatacccagagccaggccctcaggaatatttctcaacctttatgctttactcttctccagatagtaaaacacctacaaaatatcatcaggccttgttcttcagcatgacaaaatgtcctgcttcttgcctctgtgaacaagggggactgagattgtatctcctttccacaagagcccttgggatcaacacctatggaagggaagggaggaatggaaaaaaggggagctgagctgggatgcagatctgctagatgcctcagacaaccctgcggggagttatggagatggaatgccctttagaattgtccagggttcaggagacaggggaggcctttttatacctgcatcacctagtcactgggtatgcttgatggggaagaatcatgacgttaggagagggaggtggctctctgaagctgtagcaatccccaaagggggcagacctttgcagatgaggtctttcttctggcagcactcccagaaactaaggtaaagtctctgttattcctgagggggatccggatggcttatcatgtccatcacactccacaatgctatataataccataaaactttgcaaatagaatgaaggagaaaataaatattgcaaaagcatactgtcaaatttctacataacagaatattaggtttgaaaatattacccattagttaaatttctcctccttttacaatgatgtttgcctttaaaggggtcaccagagaataatttgtttcacagagcagccatgctattaatactactgtttagagatatagaaacgactttgcaactgtgaattgctaagaattgtagaaataaagggaaaataaaattttcttttctaaaaaaaaaaaaaaaaaaaaaaa

SEQ ID NO: 1280 - DNA, 850 bp, Homo sapiens
  misc_feature (18)..(18): n equals a,t,g, or c
gctgacctcatgatctgngcgcctcggcctcccaaagtgctaggwttacaggcgtgagcactgcgtgcttatttaaagtatgtsctgtctctctccttatgaatgtttttttttttccctgttggtcactcattttcatgatcgttttccaattcttagatctgacttcatgcatgagaagtacagaaagtacacaagaataaagaataaaagtaggggagtcaggaatgttctattttaaacgcaactattagattcctcactgtctcccttcaattattcctgatctttactctttgagtcctccctgaaataacatgctattagattgatgcaaaagtaattgtcgtttttgccattacttttttttttttcttttctttttttagacggagtttcactcttattgcccaggctggagtgcaatggtacaatctcggctcactacaacctctgcctcctgggttcaagcgattctcctgcctcagcctcccgagtagctgggattataggcatgcgccaccacacccagctaattttgtatttttagtagagatggggtttctccatgttggtcaggctgctctcgaactcctgatctcaggtggtcctcccgccttggcctcccaaagtgctgggattacaggcatgagccaccacatccttgccattactttcaatagcaaaaaccacaattactttttcaccaatctatataatgattagaaatatatcccctactctggagggtgaggcaagtgatcctatcgcgtgaacccaacagtttgaggccagcctgggcaacatggggagattttgcctcaagaaaaaaaaaaaaaaaaaactcgag

SEQ ID NO: 1281 - DNA, 1018 bp, Homo sapiens
gaatattttaggtgaaactaaatcatctaggagcgatgtgataagtttcacatgtctaaaatgtaacttttcaaacactttgtactacagcatgaagaagcatgtgctggtagcccattttcactacttaattaactcctactttggcctaagaactgaggaaatgggtgagcaaccgaaaactaacgatactgtttctatagagaagatcccaccacctgacaaatattactgtaaaaagtgcaacgcccaatgccagcagccaggatgcgttaatgtatcacattttgacatcagacatacacagagatttggagaataagcttagatctgtgatttcagaacatattaagaggrctkgactcttgaagcmaacgcacattgctccmaaaccagcagcacatttggstgcaccagcaaatkgcatgctccaagcgctycaggsagctccttgcttccatcttgctttgccacagaacagtccaagcccagccgcaggacagccagtgactgtggcccagggtgcccctggaagcctcactcattccccccctgctgctggccaatcccacatgactctggtctccagccctctgcctgtgggccagaacagcctcaccctgcagcccccagcacctcagcccgtctttctttctcacggggttccacttcatcagtcatggagaccagccagtttagatggtaagtcatatttctggtggtacacagcagaggaaccccttcactctatctttaggtagaaatatttggaggatgtgacagcctctgagaaacataatgttactatgtggattttaaaaaatataatacttgcatgtaattgctataatgttcatatttgaggcagttgtgaaactggtttatgattgttggtgtactctgttgtaaattcaaagagagcttgttgaacattttttttttttacctattgttttcagagtgtctattttgaattaaaatttgttacaccgctaaaaaaaaaaaaaaaaaactcgag

SEQ ID NO: 1282 - DNA, 1693 bp, Homo sapiens
ggcacgagcaaagttgggcatataggcacacatattacgttgagccctggcctttggatctacaatgccatagatgaatgcaacatactcctgacatatcaagaggttctatcattttttcataattttccaaattggaaaaattctccttaattattttatttgtattataaacttttttccactagttccccacttactgttgactacagatgctttagtagttttaaacaatgaatgggaggagactgattttcccatatgttttgtaaattggcctttcttcttcccacttcactgaagataatctgcccttgcagattatcttttatgattcagggagctatggactggatagtgatggactttgtaatgaaagcacaagctactatttttgcagctgctgaagataagaataagctagaaaacatgaaagtacaatgatcggagatgctgctgcatattcctgtgtagtaaaagatctgctttgttatctggacagtctcttccagaagaagagacttcctgagtcaaaataagataagaagtatgcaacacaaagaagtgaaatgacattcttacagttgaaatattcatactatgttagttggtaaaactgcttagcttctacctcattgaggcaacattggtgtgagaaacactgaaatatgactgagagcctacactagcaagaagatggggggaagatacctttaaaaagatcacttggagttcaataattatggatgcataataacattttgagtactcttaatatagtcagcctagttctttctcaaaaaataaattcaaggacataacagttcagttgatactatggaattttgtttgtttgtttgtttgttattcaaaaccagcaaagggatatgatgcttatttggtagagaggacatgctcttcagctctttctgccttcttgatccaagaaagcattcacaaatttaccagtttatttactcaggaaaatgtggctataaatgaatttacccaggaataaactaaattctattatttactaagttcaaatagtatacttttcataaagggatgaaatcagttattgaaaagaagctaaattaattgtaagctaaacaacagcaactgaaatcactgaaagaaattaaaacctactatcatgactgtaaaggattttaaccattctcactttttatatttctagctattaatactgaagggaggacagaatattaacactttgaaattaactctccgccaggcacggtggctcacgcctgtaatcccagcactttgggaggtcgaggcgggcagatcacctgaggtcaggagttcaagaccagcatggccaacatggtgaaaccctgtctctactaaaaatacaaaaattagctgggtgtggtggcaggcacctgtaatcccagctactctggaggctgagacaggagaatcgcttgaacccgggaagtggaggttgcagtgagccgagatcacacctttgcactccagcctgggggacaagagcaaaacttcttctcaaaaaataaacaaataaataaataaataaactcttgacctgaaagatatatgctccgttttgactaatataaaattgattagcagagttagttgaaatcattacagcacccaggggcagctggattgctttcatgaccaaaaaaaaaaaaaaaaaaaa

SEQ ID NO: 1283 - DNA, 1136 bp, Homo sapiens
ggtcgacccacgcgtccgagatgcttgctgctgattggttggggtgggtgaaatcacagggagttgaagctgtcctcctgtgggctgaattgcttctaggtggggccataggagtggggttgctgggtccaggtagaaccacgggtgtcagacatgcaaaaataaaataaaataaaataagataaggtaagataaaataaaataaaataaaataataaataaaataaatataaaatttccctgaaaagatatttcaaaaagccagtcttagattctacaataatgatgttatttgctggagtaattgatggagttgcatgtcttataacctctggaataacggctgacaatctctcaagtctgcgccttagctggactcaggttcctcttctccccacagcctgactgcctccattagcttcacaaaagtggttgggkttcagggsaaggcccattgtcatttaaactgtagccgaaatgacttccaaagttagcttggcccaatagcccaggaatatttaagtggaaggcaagatgggggatgggttagmttagctctctttcactctcatagttttctcactggtataatttttgcaaaggcggtttcatgcctgccatctctttcgtcgctacctctcccagttcccattcttagctgttttatgaaatgcttctagtttcatcctcttataccaagttctgggagactgatttgrgtaataataaaactccagtttcccatacagccggctctgcgtgaattaaactcattttctattgcaatttccctgtcttgataatcagttctgtgtaggccgtgaggaaggagaacccgttgggtgattacgagactgtgttactgcccactacctaatggatacatttagcctggtatccaaacccatctaattatgaccataactatatttatcaccttgctctgctttcaaacgatatgacacacaatgaatgaaaactttcatttttcatcttcatttgtgctgttccctttgcctcaaatagccctcaacttgcctacagtaactgtaaaatttgccacctaaaaaaaaatctcaaaatcctctctatgctttgatgtccagcaaaaaaaaaaaaaaaaaaaaagggcggcc

SEQ ID NO: 1284 - DNA, 2405 bp, Homo sapiens
acccacgcgtccgcccacctcagcctcccaaagtgctaggattacaggtgtgagccactgcacttggccaacaatttttaattgtataggaaactagcatttttgaagtacttctgaatttagcacctaggtcaaattacgttggatatgttttcatggaaactgttgtattctcttattttgcatggtttggctcttaattgcttataattctggtacatattgagtacaaggaaaatatattttaaatatgcataagttagacttgctacaaacattgagattagaagttgcaaactgaccactaggtcatatctgctccacaggcgtatctcacatagtttgagaactattttgaactagttgctaaagcttaaaaatagaggaatttctcttgaaaagtggaattttggataataatggattttatatatatatatatatgtcagtcatggactgtcactacatagtagctattatttttagacagagtaagtgctctccaatttgccagagctcctgtcattctttaatatattacagctggcctacttcactcatgtaccttatgtagattcctctttcgttatttataggtatatatatacataaaggcagctatataaagaaatttcttagttttttcattaataaattcaagacatccgaagcttctttgctttattatttttctggtacattcgtctccttaaaaggagacattagaagcagtaaacatcccagagatagtaactttcttcttcagaactttttccaacaaatcactccattggctgatgaaaaagaagatgactgaaaaggtttatacttcctggagttccactatcttgcgctgtaatttctttaggtctttctgtactttatatttctctaaatccatctttgttttctgtatttgttggagggagctgagagagtcatgaattgatttaaatcctgtaagagggtaaaagaataggtcacttaaacaatgcattagagcttttttttaaaaaagttgctaatcggcagtcctgccataattgattatcatttaattccaagcgcattaaattctatgaagaccagcttaaaattgtacataatatatttcttgtatgtcatgaagatccattcacaatagtgtttcaacttatatctggttatctggtttcattgtgaaatttatttttctcctcctcaaatatattgcataattctatattgcaagagagaaatttaaaatattttattctttctgaatgctttgatgagagacttgtgtgattttttttcagtcttgttaccaaattgaaggtaaagatcacagatgagattttaaatcttctctgaaagtagcctatttgagggacctaacagcggccccctgctgccctcctccctcctagcactttgtatctctcttatgcatgtctagtcactcctgaccacagacctatcaaacctcaaggccttagggcacaacccatttgttattcactggggcctttcacagagtcgtttctcaacacatttttattaaaggcataaagcagcaaaccattaatttgaagttccccctttttagaactcctcctcattagtaaaatgaaagaacttgcaggtggtaaattccttttcagttcaccctgaagttttactaatggaataagtaaaattaaacctctgatagttaaacagaaagcagagcctttaaaagaagggccagttaagtttgggacatgattcctggccagataattcattattttgatatgacggtgggaggggtatattgtgagggttgaatttccaggcagcaaattctacttatatgccaggaacatctggcagattgagaccctcatgtcctcccaaggcacctccaaggtatctctatacaggaccaaatttggtagaatttacacatgaatttttctgagatctagaagacaaaagaaaaaaaattacttgggactttctctaggaaagaaactcttctgagtcctggtaattccctcagaattatgactcaaggcagatggctgcaccacagcacctattccatgtccttccctttgagaaattagatgagcctttcaaattaatcctctttgatgttagctcagcttgacactgctgccattagcctcttcaaaataaaagcagtcattatactggactctgctaattcatccctctttctcacttctaaaggtcaggtctccagtctgacatctgtccaagctcattacttgtagttcaatgagaagggcatttgatttaggctcttaatttcataacatacccacaagtcacgtcttgggtatgtccaaggattttccaagtctgacaattccatgaattagtaaaaattccatgatcttagtaaaaaaaaaaaaaaa

SEQ ID NO: 1285 - DNA, 2937 bp, Homo sapiens
ccacgcgtccgctgagaaacagtccatgtgcaccccaaccttaatggcctgaggtgggcagaggggtgtggagcagcctggagtacagggccctgggggaggagcccactgatgaggggcgctctcccatagccatgtgttgaatgctaactaggctggggtggacgaactctgccaactgctgtcatcttagaagatagatgcagcagtaaggaatgtttgttttgcttttttctgaaattttcttaagcactgtggctgggaaacttcgaagcggaccctgtgctgcatgtctgctcctcccctgagcctgtctgcttgggggtggtaaaaataaaaatcccagtttattttcagtaccttacctaacagggttggctccaggcgtgggtggcctagaagatgaggggagtggtcttctcccagccttttaccctcttgcctcctgcctccgcgcttacacacgcactttaccacccggtcattccctggcctcttgctgccacttgtagtcttccttccttcctctcagggtaagggcagtgcctgctgtgcctgttggccactcccacacttcccctcccccaggagccctcatctgctgtgctgagtccaggaaagcatagttaggtaggagctggttggagaagtgctagaactagaaggcagatgagactagcatgggcccacctggagggctgtccctaatggccccagtcgccttacctcacccacagcagtgcccttgtcttcctccaaaacagaaagcagtgacaaaagggggaggggtggtaatctgaagtctcactgctgagccttcagcttttatttttcactgtttcaaaacccgcattctattctagaatggtttttaaaatggaagatcttacctttttctatcttgttactctggggttttgtccccctaagaaattgcactttttgtttggggtttattcagctgcatagatgaccagcttgatccctggtgaaatgaaaagccttccttctcctgaagcctctttccgccctgccctccactaacaacactgaggagcacaagcccaggcttgcccacctggtaggaaaggaagaaattagaacaatgggagccttggctcccctctcgtctcctcccctccttcttgtcactggctttgatgaggcccacttcccagaggctcctgggcctgtgagtgcaggagctcattctcccctcactgctgaagtctgtgacagcttcttcctccagttatgtctttcttccaaagcaatttcttaaccatcagccatgtgctgctatttctagggcttctgggctttgtcccttactgagagattagggactccacagctgccttgaggtaggcctggctgaagacaagggtagcagcaggtggcaggctgttaaaagacagctgcctgaggagcctggagcagtggaaacaggtggaagaaaccggccacagccctgctttaccgggctcacctctagggcattccagcaagaggctgatgcaggagaatggccagcaccaaaggacatttaaaagagtttttgggtttttttgtttgtttgttgttggtgtttgttttttttttttttttttggcacacttgagctgactcagtgcaggtttaatatcctggtgacttgcagtcacattctaatgactttcaagggccagaatatggtgaaaatcacttaaaatatccgtcccttccatgccttagtttagcaggtaggctctatcttttgccatttctgtattttatgtgctgtgttcccgtttcactgggtatgaactgtgaaatggactgaatcctggccactttatgagtttgtttggttttataaggcatttcaatgtacattctataaatacaagcactccatttgcaaacagatcttaagctaatattttctttcccattcatcttgccctccccctcctcccgccagctttaaagttcagtggagaagccagatggcaattcagacaaaggtatactcttcctgcttcatgggtggtggcacgggaatagatagcccttagccctttccctcccagtcccagctgagccctcagaccacttgcttcccacataacaatgtcgcctccatttccgaggaacatccttgcgtagagaatgaaatatgctgcaatcatttctgcatccttactcctcacccccaaagaaaaaaaaaaggcctagcagggaagcagcatgcaggcttcacagcttaatgccaaggacagcgagtgaggctgggagcttctcttgggcctgctgggtctgtcagctctcggaatagggacagtccttactggtgccccaaggtgggacttggagaatattttgcttggcatatgtttggtctgaatggtgtagttgctggttccctagagaggaaaaggtggcaggcccagctttgctgggaaatggctcttaatttccagttgaaaccctagtagaattgtgaatgaaaacctcaaggttgagcccctctgccaagcagcagagctagtagaaggggatgcaggggcaaagcactcagttgccaagcaaggaggagagatgtacgtgggctgtgtggcagtccccacaccctgccctggcttcttcaggttatcgcaccactatggaatcctttgcagaatggtactcatataatggtttaaaacaacacattcataattgactctgtgcaggatgtcactcaatcagtttgggtttgctttattttattttatatatatattttttggtatcctgtacattgcagtgggtgtgaagatagtattttaatatttgtacaaagtttaatttaattttaattgttctatgtatataactgcatttctaaataattaaaaaaaagttcttatgaaggcaaaaaaaaaaaaaaaaaaaaaaaaaaaaaaaaaaaaaaaa

SEQ ID NO: 1286 - DNA, 1709 bp, Homo sapiens
  misc_feature (365)..(365): n equals a,t,g, or c
ggtcgacccacgcgtccgctttttttttcatgattggttgcagttttcctacagttctcattaacaggtgctccttgatcactatgacacgcgatgatactttatctctctggttagggttggttatcttaattaattgcttatatttatatttaactgaaactagcctcaagatgccactttattaaagtttgagagtggtaagaaattacaaaactattccattaaaaaaaatagamaagaaaaccaaataaaccagaagaacatataaactatgattagtcaaatcaaatctctgcatttaaaagtaamcatcatttactagatgtctactggactagaaatatgtgtcttctgamcagtanctgagragtttctgcaaattattctgcaaattgtaaataggcatctctacctttttattccattaattttatcacmcagtatgaagtttttttaaaaccaaagccaatgatgtacatatattcaaaagcmcaagattctctgaaaatatagaaaatactgctaggcttattttacgaagacaaaggmcaataggaagctgggaagaataccagcaaacagctatacgttataaggcctctgtatcacaaaaatgaagggaaaataaagccaatctaaagtattacgtacttaaattaataaactggattggaagcaatcattccattataaatttcctttcatacatagcaatcccactgagatgatacctttgtaaaatcaggcaaaaatcaattgttaatattctagagatggacaaaccacagattaagtacctaaataatcatgtttccaatcaccaattaactaagtagaattctcttaattgtatctattaaggcctactaattgacagaaaaagggcagagttgaggacttggagaaagaagacagaagcattcctctgcctgattcataaaggtcagaatcccctggccgttgttgtaggaacccagccatcaccagtcacaaagaaaaaggcagcagcacactttgagtatccaaagggcctctttactgaggctgcatggctgttgtgggcttagtccaacatgatgatgtaggacaagaacctaccagttcaatcaacatgcaattaaaactcctgatgaaggacggcccagggcagtccattggtttggggcaggggacgcagagaagcaaagcctgttttaattaagaawatactaggcactcctctttaaatcctcaaaaaaatgaggatgaacaagattccaaaaccaacaatcacaatgtgtgtgaaagtaccagcaacaagaatgaagtgggactgaatatgtgctttcctacaaatgaaacctgtttgatggtgtaaggaaaatggatgagctgtggtcaagaataggccgaggcagacatctagtccagcatgactcagcgagtttggagtgcaggcacacagctctgcctgttatgtaaccatgccatgtgaggtgcattaagtaaccactcatgtgtgctcatgcttgactcggagccactattgtctgtaaaaggtataattaccctgctaatgctgtatgtaacggcttgcacctgtggctcatcctcaggcttgtacccatggcttgcttgtgcccatggcttgcttgcacccacagctcccgtgtgtccagagaataaagccatgttgaaatgccaaaaaaaaaaaaaaaagggcggcc

SEQ ID NO: 1287 - DNA, 1885 bp, Homo sapiens
acgcgtccgttcatattttgtttgctcctttatattctgtgttacttaaatatgctctaaaaagcagtggtaaaacagctatttaggaattgaggctgttattcataacttccatgtgagactgccacatattgaactcatattgaactcatattgaaaatatgtcattttatccactgggttttgtttcctactttttttatttgtgttaagaaagggaaaaaaatcacaagtttgtctaaccattcagtagaaaaatcgacaaagcatttgcagacaacttggcaaggttacagagaaacggatatactgtttttcagtatttggggaggttggtttgagcagcatttattgagaatttcattagtggggatgtttctattgaaaacacagagttagaaagtcataaaatgttcttgcaatataaggtaataataccaccagcgtttatcttactgttttcatgttctaagtgcatgcacctgagtaaaagcatctgggctgcagtccagtctgagagatgccaggaaaggctgcctaggccagttcagtccagtaaatccctcttcgatcttctcttccacacagacagcggtgatgagcatgcccatgaactgacatgattattttggggaaaatgaaagacttgtattctttttgagatagtaattccactttcaggggcgaatacattttgtttattttatcacccttcagtgagttgtttttgttctttaatcaaggatgtatgtttgaagtaagaagtaaagcataaagtatatgattttgtgtgtgtgtgtttttatcttgctatacctgtagggaatgtttaattctgccttggaagtggccaaatttgaaggtgctgtgattcgaacagtcagtgggataagggggcagatcaagaaagcactccgagctccagaaggagctttcagggccagctttgaggataagctgctgatgagcgatattgtcttcatgcgaacttggtatcctgtttccatcccagcgttctataacccagtaacatctttgttgaaaccagtgggtgagaaagacacctggtcaggaatgcggaccacgggccaactcaggctcgcccatggcatcagactaaaggcgaacaaggactctctgtataagccaatcctgaggcaaaagaaacattttaattcactgcacattccaaaagccttgcagaaggccctgccatttaagaacaagcccaagacccaagcaaaggcaggcaaggtgccaaaggacaggcggagaccggccgtcatacgcgagcctcatgaaagaaagatccttgcactgctggatgctctgagtacggtgcatagtcagaagatgaagaaggccaaggagcagcggcacctgcacaataaagagcacttcagagccaagcagaaggaggaggaggagaagctgaagcggcagaaggacctcaggaagaagctcttcagaattcaggggcagaaggaaagaagaaaccagaagtccagtttgaagggggctgagggccaattgcagtgagcctttggactggagggactgtccctggatctgcggaggtagacagtttcaaacatcacagtttgaatgcctgtgaatgacacgtcagtgggaaagagctcaagagatgtctctactcaaactgtgcctgcaggaggaggaacagagaagcctgggctgctgggactgggttcattctcatgacttggggctgtcgagatttaaagtgatgtaagctgtggttatgtggattctcttactttcctctgcctgcctcagtttaattattttgtcctacagaaatatcattaaaatatttttttgttaaaaaaaaaaaaaaaaaaaaaaaaaaaaaaaaaaaaaaaaa

SEQ ID NO: 1288 - DNA, 1078 bp, Homo sapiens
tagctatattgcccaggcttctcctggtctcttaatgtctgccccatcttagaatcttgtgtttctcaccatctatgtctctgagattttgtttttgtcttcctgtatgtccatctctccccatctctgtctttcatgtctttctctctgtctctgaccacccagtatctctgtgtctcactgtctctggtcatgaaatgtctgtcattgtggcccgtttcacactgtctctatatctgtttcccctgagatccgggatcagttgaaggaagaggagatccacatctaccagttccccgaatgtgactctgatgaagatgaagacttcaagaggcaggatgcagagatgaaggaaagcatcccttttgcagtcgtgggatcatgcgaggtggtgagggatggcgggaaccggccgtggagaacccacatcactgcgatttcctgaacctgcgacggatgctggtgcagacacacctgcaggacctgaaagaggtgacgcacgatctgctctacgagggctaccgggcccgctgcctacagagcctggcccggcctggggctcgcgatcgagccagccgcagtaagctttcccgccagagcgccacagagatcccgctgcccatgctgcctctggcggacaccgagaagctgatccgcgagaaagacgaagagtgcgccgcatgcaagagatgctggagaagatgcaggcccaaatgcagcagagccaggcccagggcgagcagtcagacgccctctgaggccacgccccgcccggccttacctcggctccgccttcagtcggcctcttgtccaatccccgcgccccacactgcccagcgccccccgggacctccgcgggtgccgccctcgcgcgggctagggggaggttctcccagcctgagtccgtagccccgccccggcgctggtcccgcccacccagacaccgcccacttcccggcccggggcctgcacaatctccgaccgcatcactgtcttccggagtcccccttcttctcccagactctgtcttcaataaaaactgagcttcccgcgaaaaaaaaaaaaaaaaaaaaaaaaa

SEQ ID NO: 1289 - DNA, 1553 bp, Homo sapiens
cccacgcgtccgattatgcaaactttctaacattttaaattgctttattcttttttttattacatgcatcgtaagttttgcatatttacattgcttctggtttttagccgttctgaatctgaacaccttccttttttagcagcagcaggcgctctttagtcatttctcccccagttcgaacagctacagtctccagtcctcttacctcacctactagtccctctacactttccttgaagagtgagagtgaatctgtctcagcaactgaagatctggcacctgatgcagcccaaggggaagacaattctgagatcaaggagctcttagaagaggaggaaatagagaaggaaggatctgaagcaagctcctctgaggaagatgagcctctaccagcctgcaatggccccgcccaggcccagccctctcctaccactgaaagggccaagtcccaggaggaagttctccccagctccacaactccatcaccaggcggagcctggagcccttcagggcagccttcatcatctgccacagaagtagtcctccgaacccgcaccgcaagtgaaggatctgaacaaccaaagaagagagctctatccagaggactcagcaccccctagtaggctcctccacccagagccactgcaagccccaggccctcctcagggaacataccttccagccctacagcctctggagggggttcacccaccagccctagggcctccttggggactgggactgcaagtcctaggacctccctagaggtctctcctaatccagaaccaccagagaagccagtaagaactcctgaggccaaagaaaatgaaaacatccacaatcagaaccctgaagaactttgtacttcccccaccttaatgacatctcaggttgcttcagagcctggagaggcaaagaagatggaagacaaggaaaaggataataagcttatctcagctaactcctcggagggccaagaccagcttcaagtctccatggtaccagaaaacaacaacctcacagcacctgaacctcaagaagaggtatccacaagtgaaaatccacaactctgaagagaaactaccaagactcctcctgccccaaacctcgccagagaagctcttcaaccagagggtataggtcagagggatataagagccagcatccatccctgggttctcagtaggaatgctggtgctgtctaaagacctggcattaatggaggcggaggagcagccttacgggagggatggagggaggcaggctggggagaagagaacattagactcagggaatatttaattctggttttagcattattagaataagactttatacattaactaaagtggagctttaatcactataaaaagcaaaagtatctatagacacagacacttgcctatacagagacataaccacacacactcagaggatagtgaacaaatctgtctttgacttacgacccattttgcaagacttaaagccggaagaacacattttcagattgttaaataaagtctgattctgactaaaaaaaaaaaaaaaaaaaa

SEQ ID NO: 1290 - DNA, 1258 bp, Homo sapiens
  misc_feature (1180)..(1180): n equals a,t,g, or c
  misc_feature (1240)..(1240): n equals a,t,g, or c
  misc_feature (1243)..(1243): n equals a,t,g, or c
acgcgtccggaaagtttcaccagagcccttttccaccatgacagtgctcctcctgctcattcctctcagcaaacgagagccattttccaagagttttgatgggaaatcatcaggcatccactttgcagtcctgattgggcttcttctgactttttgtttcctaatcttaaaaagctgtaaagggcacccatttctcttcagttcacaatgcagagactacactgacaaggtgaaatttccaggagcctcagttctttagggatagactgaatggttggtattatgtcttatagtagtatcttgaactgatggaacttatgttgagaaataaagtttatatttaaaaatttcttttaattccattttccatgaacttttaaaagtcccctcatacatgtttacagatgtccatagaaacgttattcagatactgaataaacaaccaaaaaaacattgttttatcaatgaggaacctgttaaatctacataatacagctataaaaataattatgtagttctataattaccgacatgaagacatctgagtaaaaacctatttctgatgttatagaagaacaagtatagtacactcttgaatgtaaatttctctgtgtatgcattcatatatactgtacattcagaatcctggaaaggggcttgcacagatgttaccagtgtatgtctcagagtgacagaaggacatatgagttttccttttcccttatacttctttaaaaacacactgattttttttgcacaatgaatatcaatcatattaacatataaagatttaattttttccccagaagaaaacaaaaagattgagctttgtgtaccatccacggacaaaaatgctatgtgttttgcagactcaggtagtagtccctgcgtgtgctgggggtgagatggggaggagccgctcatttctcagcaggccacaccactttcttccctaccaaagctgcacaatgttttcagcagtgtctgcaatgagagctaaatgacctccatctacaacaaatgtaacctgggcacttgctcttccacggatgctcatgagtaaaaggaagctggagttctttacaaaagaagctttgctatgagaaataaaaacaacaaactgttttttacaatttttatttggtgttaactccacaagaaaaaaaaaaaaaaaaaaaanaaaaaaaaaaaaaaaaaaaaaaaaaaaaaaaaaaaaaaaaaaaaaaaaaaaaaaaaaaanaanaaaaaaaaaaaaaaa

SEQ ID NO: 1291 - DNA, 346 bp, Homo sapiens
ggggattgacagccacctgtgaagactcacctgctaggatctggctggctgtcttggtcgctgatcatgtccgaagaagtacaccactttcttaatcatgcagcttttaaaaatctcctcagccccacacttgagggtctctctcctagattctaatgtctagccctacacgaatgcagtatgctgcccttgatgtgataggacaacagaggacctgcacacatgctactggtcctgactgtgttttccttccataaacactgttctggcaagctggttttatgtgctgctggaccatttgcttatgtttgsacaataaaccagraattaaatttaaaaaaaaaaa

SEQ ID NO: 1292 - DNA, 541 bp, Homo sapiens
  misc_feature (141)..(141): n equals a,t,g, or c
gaccaaagtacgggtaatgacacagtcctaaatgtggccttgctgaacgtcatctccaaccaggagtgtaacatcaagcaccgaggacatgtgcgggagagcgagatgtgcactgagggactgttgkcccctgtggctgtngagrgtgactacgggggcccacttgcctgctttacccacaactgctgggtcctgaaaggaattagaatccccaactgagtatgtgcaaggtcgcgctggccagccgtcttcacgcktgtctctgtgtttgtggactggattcacaaggtcatgagactgggttaggcccagccttgacgccatatgctttggggaggacaaaacttgtaagtacagtcaaggacaagacttgtactcaargttgagatttaataaaattaatatttttactacttcaccaaggactttcttaaatgaaaatggtttttccccctacaagtaaacagtaataaagaagagaattattcctagtgcagtttgttttcatggtcttaatttttgctaagactccactgttttt

SEQ ID NO: 1293 - DNA, 464 bp, Homo sapiens
tgattgtatgactggtacactctggcccagccagagctataattgttttttaaatgtgtcttgaagaatgcacagtgacaaggggagtagctattgggaacagggaactgtcctacactgctattgttgctacatgtatcgagccttgattgctcctagttatatacagggtctatcttgcttcctacctacatctgcttgagcagtgcctcaagtacatccttattaggaacatttcaaaccccttttagttaagtctttcactaaggttctcttgcatatatttcaagtgaatgttggrtctcagactaaccatagtaataatacacatttctgtgagtgctgacttgtctttgcaatatttcttttcygrwttawttaatttyctkgwattatakgtaaaaccaaaatgttaaatcaakgraataaatttgcagttargtcttaaaaaaaaaaaaaaaaaa

SEQ ID NO: 1294 - DNA, 453 bp, Homo sapiens
ggcttctactttctatatactttctcccacttgagaaaggggccttgaggctgggtcccttcatggtatacctttagactgaacggtttgcaacctagggcttgggcattacattccctgggattcacatgccctaactaaacctaccttgattttctcagacagcacaggcaggcaataaagcgtcacagattgtcccctaaccccatccagccatgtgtatgggtgtgttttattcaatgggatagtactgagcacatgaaagaaatgaatgacttctgtcaatctcttttcattcagtcttctcattctgtcaattgttttctcatccgcagtgcctctgccagaactgtgctcacatccattatttaagccagatcttttctaagtattatagaagtgtagaggcacatagaataaataaaaccagacttcaaaaaaaaaaaaaaaaaa

SEQ ID NO: 1295 - DNA, 2212 bp, Homo sapiens
  misc_feature (975)..(975): n equals a,t,g, or c
  misc_feature (1255)..(1255): n equals a,t,g, or c
  misc_feature (1337)..(1337): n equals a,t,g, or c
ggaatctctggcaggtctgtgtgttctgtcacttgctcgcccgagcagtggctttgctggtcatcccggtcgtcctgttacttactgttcttctacgtccacttgattctagtcttccgctctgggccccacgaccaaatcatgtccagtgccttccaggccagcttagagggaggactagctcggatcacycagggtcagccactggaggtggcctttgggtcccagrtcactctgaggaacgtctttgggaaacctgtgccctgctggcttcattcccaccaggacacctaccccatgatatatgagaacggcgaggcagctcccaccagcaacaggtgacctgttaccccttcaaagacgtcaataactggtggattgtaaaggatcccaggaggcaccagctggtggtgagcagccctccgagacctgtgaggcacggggacatggtgcagctggtccacggcatgaccacccgctccctgaacacgcatgatgttgcagcccccctgagcccccattcacaggaggtctcctgctacattgactataacatctccatgcccgcccagaacctctggagactggaaattgtgaacagaggatctgacacagacgtctggaagaccatcctctcagaggtccgctttgtgcacgtgaacacttccgctgtcttaaagctgagcggggctcacctccctgactgggggtatcggcaactggagatcgtcggggagaagctgtcccggggctaccacgggagcacggtgtggaacgtggaggagcaccgatacggcgcgagcaggagcagagggagcgggaacgggagctgcactcacctgcgcaggtggacgtcagcaggaacctcagcttcatggcgagattctcggagctgcagtggaggatgctggcgctgagaagtgatgactcggaacacaagtacagctccagcccactggagtgggtcaccctggnacaccaatattgcctactggctgcaccccaggaccagcgctcagatccacctacttggaaacatagtgatctgggtttcgggcagcctcgctctggccatctacgccctgctgtccttgtggtacctgctccgacggcgaagaaatgtccatgacctccctcaggatgcctggctgcgctgggtgctggctggggcgctgtgtgccggtggctgggcagtgaactacctcccgttcttcctgatggagaagacactcttcctctaccactacctgcccgnactcaccttccaaatccttctgctccctgtggtcctgcagcacatcagcgaccacctgtgcaggtcccagctccagaggagnatcttcagcgccctggtggtggcctggtactcctccgcgtgccacgtgtccaacacgctgcgcccactcacctacggggacaagtcactctcgccacatgaactcaaggcccttcgctggaaagacagctgggacatcttgatccgaaaacactagaacaagagtgtggcaaagaacacccgtgctggggtcgggacgaggttgaagggtcttggtcaatgtacgtaatgagcagggtgggccccacgctgggaggacacgggctgggctgagcagggcctctagtggaacacatgggggtctcattgaaaagctctctgatgagcacctccttttgtgcaaagttaattttttctcgacaataaagatattccgtgtcttcacccctgaactaagacacagggagtatttcagaggccagcgtaggagtcatcgacaacgaaaagccgagaacccagggccagcagtggagcctcagcagaccagggcctggtccttgctaattgctgcagggtggagtttgatctggcagacccgatcctccttcatgaacacccagcaacctgagcaagtcccggccctgccctcagcgagcccggcaggcgtcccgggacagctcagtgttggagggccacctgaaccacgagccagggctggggcttgcatgtcattgtctatgacagcgtcaagactggcccttggcaccgtgctgtgtggaaaccctcccctctgagactccactgagacgtggctgagtgaaatcttcctcgtcagtggtcaaggtgtgtcatccatacagctccatgcctttgtcttttttaaatgtaattaaaaaaggaaccaactggaaaaaaaaaaaaaaaaaaaaactcgag

SEQ ID NO: 1296 - DNA, 1518 bp, Homo sapiens
ccacgcgtccggactcactgaatgagctccagaccactgtggagggccagggcgctgatctggctgacctgggggcaaccaaggaccgtatcatttctgagattaacaggctgcagcaggaggccacagagcatgctacagagagtgaagagcgcttccgaggcctagaggagggacaagcacaggccggccagtgccccagcttagaggggcgattgggccgtcttgagggtgtctgtgaacggttggacactgtggctgggggactgcagggcctgcgcgagggcctttccagacacgtggctgggctctgggctgggctccgggaaaccaacaccaccagccagatgcaggcagccctgctggagaagctggtcgggggacaggcgggcctgggcaggcggctgggtgcccttaacagctccctgcagctcctggaggaccgtctgcaccagctcagcctgaaggacctcactgggcctgcaggagaggctgggcccccagggcctcctgggctgcagggacccccaggccctgctggacctccaggatcaccaggcaaggacgggcaagagggccccatcgggccaccaggtcctcaaggtgaacagggagtggagggggcaccagcagcccctgtgccccaagtggcattttcagctgctctgagtttgccccggtctgaaccaggcacggtccccttcgacagagtcctgctcaatgatggaggctattatgatccagagacaggcgtgttcacagcgccactggctggacgctacttgctgagcgcggtgctgactgggcaccggcacgagaaagtggaggccgtgctgtcccgctccaaccagggcgtggcccgcgtagactccggtggctacgagcctgagggcctggagaataagccggtggccgagagccagcccagcccgggcaccctgggcgtcttcagcctcatcctgccgctgcaggccggggacacggtctgcgtcgacctggtcatggggcagctggcgcactcggaggagccgctcaccatcttcagcggggccctgctctatggggacccagagcttgaacacgcgtagactggggtcccgcccgacgtgtctacgtcggctgaagagacagcgggggcggcgggctcctggggtctcgcctgagacggggcacctagccctgggcgagcgccgcacccgggcccgcagcggcaccgcgcccagagcggcctctccccacgcccggggcgcgccggctcagggaggctcggggccgcccatgcagacttttggcctggcgcgatcccccaagaacccctccagggccggcctgcggaggagccgatcctcgcaccctccgctccctccactggccctccaggtcgattccctgggctccaggctcccccgcgcgggcgccgcccgccgccatactaaacgatcgaggaataaagacacttggtttttctaaaaaaaactaaaaaaaaaaaaaaaaaaaaaaaaaaaaaaaaaaaaaaaa

SEQ ID NO: 1297 - DNA, 1498 bp, Homo sapiens
ccacgcgtccgctgtacgtgtaggtggttcagatcctgcgtaatggcagcatgaggacttaaaaggtggttttcattttgaagatggctatgtagcttgtaaggtgtatcacagcagtacctctcatggctttttggttccagcagtgagggcattggtgagatcaatggtaaactgtgcaagctttctttttatcattaggaaatgtgaaacgttggacaaattttgagttttaacaaggacaaaaagttgaaagaaaaggcacagttaacaaaaaagggtggctagatttatcttgggtgatggaggaaatgagagaggaatgctcttgaaaggtggtctgtggatctgtctgaatagaaagagcacagtaagtatgcattgccggagaaaacgtccttgaagctgcttgtctcatgtgtatgatgtgctttttaaatcatgcccctcgttgcctgcctaatctgtgactccctaaaaactaactgggcccatgtagatggggctgcaaccagagctgaataacatgttaggctcacacatgcatcagcactgcacactggaatcattgctcttcctggactttgtagaaatcagtctcaagtgcttcaagagtctggctcctgctacttttatctgtcaggtagcacataaggtttgcagggttatattttgtatagaatcacagttgtggagaaaaagtaataatttctcaatgaattttaaaaatgggcctattttctatccccgtggttcatctgatataattaatgttccctgtgaattccccccctctatgggaaggatgcctttactctttatcagtaataaattatgacctgttttcatattgccttagggttatttccctgtgtaaaccattgtcttttgttttggttttctttagcattatgaagctttggtattgtacaaggtcagtagtaagatgctcactagtctcagggcttgtgtaatattctgggaggtcatttaaatgccagaaatggtcaagcaattatacacagtatttatgactctgttaagcataccgtttgtctgtcacattagtagattctgagattaaaaaaaatttttaaagagtgatcatttaaataatttctaaaagggtcttttcaagctctaacaaagtcactaacaaatgcattattttctacagaattagatgttagtagtacagtactgcatattcagggaaaaagtgtgaggaattgatttcaaaatagttcgttcttgtgtttgacctaagaatgattgtcgcatgaagtgtttgtttttacagtttagcatatataaacaaacatgataggattccttaagatgttaccacccagggggccacaagccagcctgctgtctcaggaagctgtagaaggagtgtttgtcaatttcttgtcactggtttgctgacttactgaggattaattgttgccttacaatgttactgaaataaactgtttaatataaaaaaaaaaaaaaa

SEQ ID NO: 1298 - DNA, 1626 bp, Homo sapiens
ggcctggggcccctcgtcccaggcaaggtggccgccaccagcgtcatcacaatagtaaagtccaagacggatgcccgatcgtagggacgcgcgtctgcccaggcgggtctttgcggggccactaggcacatggcgaatttggctgccctgtccctctgtttccttctcttctctttcctccctctcttccccacccttctctcttccctgcaaagcacaacctgtaccccaggggcgccgggctgagcccctttgatctcgtcattgtcgtcgtgtgttttgtatgttgggattggtcagttcggcggtgacgtggggtcgccccaaccccttttgtaccagggccatgcaggcttggagtccagagttggtgctgtgggaacggactagagagagttgcgggagagagaaggagcaggcacgctgggcctcgcgtgtccccgagcagtgagggtcccagtgttccctccactcccgagtggccacaggctcgcgggctgggaaggattcactctctttagccccaggggagcagctcagcttagcccagcatgaagagatgggctctgctctgagagtagggcgggcttgaaggccctgatgggtggaccaccagcctgggcgcagtggtgctgggggcgtgcagctgggcccaggggctgtgcactcaggcctgacccgttgcactgaacaagaccaaatcgctggttgtgcgcttaacgtgagggtgggtccagtgtgccctgcgatgggtcccgtgtcactgtttacatgacctatttgtgtggttatatagccctttatttaaaagagagaagttccttttacaaagttattaaattaattatatgtttaaaagttaaagaaaaaagagctgcagagtatttataaaactgtcttttagaaaaaaaacaagcaagaagaccatttgaccatatgaatggaaaagggaagaaagtataatagaaactttgctagttaaaaaaaaaagaaaaaaaaagaaaaaaaatccctttcttgtaaacttacggacacctctttgtggctgttggagtttagtttttatatacacagagttatcagacattatttataaaacttagtttaaaaaaaagacaaaaaaaaaaaagccaagccgtgagccgaccagaaggccgtcctctttgatatcttttgcaattgtaccgaaagtgacttactcctctgcccttcctgcttccgtctcttgccggtgccgtggtgtcgtccgtgcctggtgaggttttgtgcagcggtaaagtgctggtgcttctggtgacctttgacctgtgggtgtcacttcttgtgtctgttttcccgtgttcgttttttgggtttagttgtgcttttgcttctgctggcttgctggacctgggctggggtgccaagtggcgcctgctgcgtcagagctcaaggaatctgtgcccaccaccagctcctggtccgtagaggtgagacatggggktctgycatgcccccctccactgagccttggctacatctgtgtctaaggcttgggctgatctagtggcggggtaagtgaaactggggtcccttggggcgccccacgctgcttccacaaccaacaactctggccttgggtggtgg

SEQ ID NO: 1299 - DNA, 669 bp, Homo sapiens
  misc_feature (23)..(23): n equals a,t,g, or c
  misc_feature (37)..(37): n equals a,t,g, or c
  misc_feature (75)..(75): n equals a,t,g, or c
  misc_feature (97)..(97): n equals a,t,g, or c
  misc_feature (108)..(108): n equals a,t,g, or c
  misc_feature (202)..(202): n equals a,t,g, or c
tgggaggttcttttataagcagngctcgtttagtganccgtcagatcgcctggagacgccatccacgctgttttnacctccatagaagccaccgggnccgatccagcntccggactctagcctaggccgcgggacggataacaatttcacacaggaaacagctatgaccactaggcttttgcaaaaagctatttaggtgacnctatagaaggtacgcctgcaggtaccggtccggaattcccgggtcgacccacgcgtccgccctggggagcttgttcttcaccagcaacgaaactcagacagcaatggatgactttcttctggctgatctggcctggaacacgatggagtctcagttcagctctgtagaaacccagacttctgcggaaccacacacagtctccaacttctaaaactaacggtggagtccatgtgtgaaatggcatctaccatttcctctggattaaaactacggactggggacaacagtattaattcgattgaatgtggctgatgatgcagttgcttagcttctttgtgtttctttgccttttgtacttgtaaacagaaatttgcgtataaatgtgagtgtattataaagtttgagatgttgatctaaaaaaaaaaaaaaaaaaaaaaaaaaaaaaaaaaaaaaaaaaaaaaaaaaaa

SEQ ID NO: 1300 - DNA, 2791 bp, Homo sapiens
gtcacctgacacctcaccggtccggaattcccgggtcgacccacgcgtccgcccacgcgtccgtaatccgtggttttctggagcatttcacagcctaggaacatacaaggggggcatctccctggaatgtaaattgactaagaggaattcaataatggtcaaatgaatgcagaattttagagtcttgcttagtattctcaccacatttcgtttartctactcatactctttttctcttactgctgacactagatggaaaaactcttaattaaaagtatttcacaaaatgtgctcgttttcagtcattccgtttccactccagcctgttgtgttgtttttttgaaataataatttaaagtaattttccttttgcaggatggcatagtcaatccaacaataagaaaagatttgaaaactggaccgaaattctactgctgtccaattgaaggctgccccagaggccctgagagaccgttttctcagttttctctcgtaaaacagcactttatgaaaatgcatgctgagaagaagcacaaatgtagtaagtgcagcaattcgtacggtacagaatgggacctgaaaagacatgcagaggactgtggcaagaccttccggtgcacatgcggctgtccctacgccagtagaacagcactgcagtctcacatctaccgaactgggcacgagatacctgcagaacacagggacccacctagtaagaaaaggaaaatggaaaactgtgcacaaaaccagaagttatccaacaagaccattgaatcattgaacaaccaaccaatccctagaccagacactcaagaactagaagcttcagaaataaagctagaaccatcttttgaagactcttgtggctctaacactgacaagcagactcttacaacaccaccgagatatcctcagaagttgcttttaccaaagcccaaagtggctttggttaaactacccgtgatgcagttttctgtcatgcctgtctttgtgcctacagccgactcctcagcccagcctgtggtgttaggtgttgatcagggctctgccacaggggctgtgcacttaatgcccttgtcagtaggaaccctgatcctcggcctagattcagaggcttgctctcttaaggagagcctacctcttttcaaaattgctaatcctattgctggtgagccaataagtactggtgttcaagtgaactttggtaaaagtccatctaatcctttacaagaactagggaacacgtgtcaaaagawtagcatttcttcaatcaacgtgcagacagatctgtcttatgcctcacaaaactttataccttctgcacagtgggccactgctgattcctctgtgtcgtcttgttctcaaactgatttgtcgtttgattctcaagtgtctcttcccattagtgttcacactcagacatttttgcccagctctaaggtaacttcatctatagctgctcagactgatgcatttatggacacctgtttccagtcaggtggggtctccagagaaactcaaaccagtgggatagaaagtccaacggatgaccatgtacagatggaccaagctggaatgtgcggagacatttttgagagtgttcattcatcatataatgttgctacaggtaacattataagcaacagtttagtagcagagacagtaactcatagtttgttacctcagaatgagcctaagactttaaatcaagatattgagaaatctgcaccaattataaatttcagtgcacagaatagtatgcttccttcacagaacatgacagataatcagacccaaaccatagatttattaagtgatttggaaaacatcttgtcaagtaatctgcctgcccagacattggatcatcgtagtcttttgtctgacacaaatcctggacctgacacccagctcccatctggcccagcccagaaccccggaatcgattttgatatcgaagagttcttttcggcctcaaatatccagactcaaactgaagagagtgaacttagcaccatgaccaccgagccagtcttggagtcactggacatagagactcaaacggacttcttactcgcagatacctctgctcagtcctatgggtgtaggggaaattctaacttcttaggccttgagatgtttgacacacagacacagacagacttaaactttttcttagacagtagccctcatctgcctctgggaagtattctgaaacactccagcttttccgtgagtactgattcatctgacacagagacccaaactgaaggagtctccactgctaaaaatatacctgctctagaaagcaaagttcagttgaacagtacagaaacacagaccatgagttctgggtttgaaaccctggggagcttgttcttcaccagcaacgaaactcagacagcaatggatgactttcttctggctgatctggcctggaacacgatggagtctcagttcagctctgtagaaacccagacttctgcggaaccacacacagtctccaacttctaaaactaacggtggagtccatgtgtgaaatggcatctaccatttcctctggattaaaactacggactggggacaacagtattaattcgattgaatgtggctgatgatgcagttgcttagcttctttgtgtttctttgccttttgtacttgtaaacagaaatttgcgtataaatgtgagtgtattataaagtttgagatgttgatctaaattgtttttgtgttgcctacatttgccttttcacagctagtcttttcawgttaaaaaaaaaaaaaaaaaaaaaa

SEQ ID NO: 1301 - DNA, 2791 bp, Homo sapiens
gtcacctgacacctcaccggtccggaattcccgggtcgacccacgcgtccgcccacgcgtccgtaatccgtggttttctggagcatttcacagcctaggaacatacaaggggggcatctccctggaatgtaaattgactaagaggaattcaataatggtcaaatgaatgcagaattttagagtcttgcttagtattctcaccacatttcgtttartctactcatactctttttctcttactgctgacactagatggaaaaactcttaattaaaagtatttcacaaaatgtgctcgttttcagtcattccgtttccactccagcctgttgtgttgtttttttgaaataataatttaaagtaattttccttttgcaggatggcatagtcaatccaacaataagaaaagatttgaaaactggaccgaaattctactgctgtccaattgaaggctgccccagaggccctgagagaccgttttctcagttttctctcgtaaaacagcactttatgaaaatgcatgctgagaagaagcacaaatgtagtaagtgcagcaattcgtacggtacagaatgggacctgaaaagacatgcagaggactgtggcaagaccttccggtgcacatgcggctgtccctacgccagtagaacagcactgcagtctcacatctaccgaactgggcacgagatacctgcagaacacagggacccacctagtaagaaaaggaaaatggaaaactgtgcacaaaaccagaagttatccaacaagaccattgaatcattgaacaaccaaccaatccctagaccagacactcaagaactagaagcttcagaaataaagctagaaccatcttttgaagactcttgtggctctaacactgacaagcagactcttacaacaccaccgagatatcctcagaagttgcttttaccaaagcccaaagtggctttggttaaactacccgtgatgcagttttctgtcatgcctgtctttgtgcctacagccgactcctcagcccagcctgtggtgttaggtgttgatcagggctctgccacaggggctgtgcacttaatgcccttgtcagtaggaaccctgatcctcggcctagattcagaggcttgctctcttaaggagagcctacctcttttcaaaattgctaatcctattgctggtgagccaataagtactggtgttcaagtgaactttggtaaaagtccatctaatcctttacaagaactagggaacacgtgtcaaaagawtagcatttcttcaatcaacgtgcagacagatctgtcttatgcctcacaaaactttataccttctgcacagtgggccactgctgattcctctgtgtcgtcttgttctcaaactgatttgtcgtttgattctcaagtgtctcttcccattagtgttcacactcagacatttttgcccagctctaaggtaacttcatctatagctgctcagactgatgcatttatggacacctgtttccagtcaggtggggtctccagagaaactcaaaccagtgggatagaaagtccaacggatgaccatgtacagatggaccaagctggaatgtgcggagacatttttgagagtgttcattcatcatataatgttgctacaggtaacattataagcaacagtttagtagcagagacagtaactcatagtttgttacctcagaatgagcctaagactttaaatcaagatattgagaaatctgcaccaattataaatttcagtgcacagaatagtatgcttccttcacagaacatgacagataatcagacccaaaccatagatttattaagtgatttggaaaacatcttgtcaagtaatctgcctgcccagacattggatcatcgtagtcttttgtctgacacaaatcctggacctgacacccagctcccatctggcccagcccagaaccccggaatcgattttgatatcgaagagttcttttcggcctcaaatatccagactcaaactgaagagagtgaacttagcaccatgaccaccgagccagtcttggagtcactggacatagagactcaaacggacttcttactcgcagatacctctgctcagtcctatgggtgtaggggaaattctaacttcttaggccttgagatgtttgacacacagacacagacagacttaaactttttcttagacagtagccctcatctgcctctgggaagtattctgaaacactccagcttttccgtgagtactgattcatctgacacagagacccaaactgaaggagtctccactgctaaaaatatacctgctctagaaagcaaagttcagttgaacagtacagaaacacagaccatgagttctgggtttgaaaccctggggagcttgttcttcaccagcaacgaaactcagacagcaatggatgactttcttctggctgatctggcctggaacacgatggagtctcagttcagctctgtagaaacccagacttctgcggaaccacacacagtctccaacttctaaaactaacggtggagtccatgtgtgaaatggcatctaccatttcctctggattaaaactacggactggggacaacagtattaattcgattgaatgtggctgatgatgcagttgcttagcttctttgtgtttctttgccttttgtacttgtaaacagaaatttgcgtataaatgtgagtgtattataaagtttgagatgttgatctaaattgtttttgtgttgcctacatttgccttttcacagctagtcttttcatgttaaaaaaaaaaaaaaaaaaaaaa

SEQ ID NO: 1302 - DNA, 1025 bp, Homo sapiens
ccacgcgtccgaaagaaacctgagtcaacatcattttctgcccctcggaaaaagagcccggatttatctgaagcaatggaaatgatggagtctcagacactactgctgacgctactatccgtaaagatggagaacaatcttgctgagtttgaaagaagggcagaaaagaatttattaataatgtgtaaggagaaggagaagctacagaaaaaggcccacgagctgaagcgcaggcttctcctctctcagaggaagcgggagctggcagatgtcctggatgcccagatcgagatgctcagccccttcgaggcagtggccacacgcttcaaggagcaatacaggacattcgccacggccctggacactaccaggcacgagctgcccgtgaagtccatccacctggagggagatgggcagcagctcttagacgccctgcagcttgaactggtgaccattcagcgcctcctggggagaacttgatgttggtgattcggaagaaaatgtgcaggtgctggacttactgagcgaactcaaggacgtgaccgcgaaaaaggaccttggagctccgaaggagctttgccccaggtgctggaactctccgcagaggcaagcaaagaggcagccttggcaaaccaggaagtctgggaagagacccagggcatggcgccccccagccggtggtatttcaatcaagacagtgcctgcagagaatctgggggagcacccaagaacacgcccctgtctgaggacgacaacccgggtgcctcgtcagcccccgctcaggccacgttcatcagcccaagcgaagatttttcttcaagcagccaggcagaagtcccgccctctctctctcgttcagggagggacttgtcatgactcatggttacattcaggatacttgagcactttatatactaccgtagcactgtagctattttttatgtgataatcttgtttgataaaaaagtaaacctgttttgcaattgaaaaaaaaaaaaaaaaaaaaaaaaaaaaaaaaaaaaaaa

SEQ ID NO: 1303 - DNA, 920 bp, Homo sapiens
cccacgcgtccctgtccactccatgtaaatgcctttagcatttcagttattgtatattttgtttaaggtgacacttcagcatgccgctaatgtctttgttagtgacagtgcattttgtagtactgtccaagtgttgtgctaacagtaagccatttcttaagttttttgccttgattagggtgccctaatttgagggttttaaaaaaaactatatttttgttaattataaaactgtaaagagctataaaagctattcccatttggttagtcaaaagggttttattgctaaatgtttggtgtaaagttgagacccttttccattttggtgacagatttctttggggaaaaaaggcagctttctgttttataaatgcagacttctgtttattgaatgaagcatatctcagtgtttatctgtcaggttttgaaacatttcatatatgtccaaatacttggcaggatttaaaaaaaaatagtgaatttggtgtaaagttgctattttatggaaatgcctctaactttacattttcattccatctgtagatttttctatctttataaaatattggagttattttttaaggaaaaatagaaaagtagcttgtgaatagctcaaactaagcttacaaatcgcatgtaaaaaagcaaaaaagttatttgtgtctgtttatattgcttccttttttgtagcctttgtacctgtacagggtgacagtaagggccaagcaggagaggcgtaatccttgtataaaataggatccagcgacactcttgtatttatctgttctctttttagtcagtcacttcaaaaaaacaaaaaacaaacaaaaaaaagctgtacattttaacataaaataaattatgatgagccaaaaaaaaaaaaaaaaaaaaaaaaaaaaaaaaaaaaaaaaaaaaaaaaa

SEQ ID NO: 1304 - DNA, 815 bp, Homo sapiens
ggcacgagaatgaatttgacattgtacagatcaggagaaagaaagttcattaacagtttcaagatccctgcgttttcacccagcaggaaacaaattaccatgagttaaggtggggaaattactggcaattcattgccttcttttaaagactttaaaaaaaaaatgagtaaataattttagactattaccccctttccatgagagatacacagctagttaaactgccatgcatattaattttttgttttcattttattccacctaccaactacacagtgtctgctttccaaaattagtttgaaagccaatgacctgtgtttgaactgggtgaaatagcatagcagttcacacctggaataaaagaatgattgtgtgtgagtctgttaatggctgtgtagagctatatctctatatggagctatataaaaatatattttatacatgccagattcatttagacttgaattgaccctgtggtaaagcagcaggaataaaatatttttttgataaagcactcactcaaatagagaaatgagctcttgcagttaccatttaatctgtgacttctttttgagatgcagaaaaactccattataaagtgctcagttcatccagggacacagacacactgtgggttataacacaccctcatctgcatggtgaggtacatgagtcagctgctcttctctcaggagggtggctttaaagctccacagtcatgcatgctgccaattccagattgtccaaacctgtaggttagcaaggacacaggtgagccataggtatgacatgttcataaaaaaaaaaaaaaaaaa

SEQ ID NO: 1305 - DNA, 586 bp, Homo sapiens
ggcacgagaaaattattttacatactagcatcactttgtatccatctactctaatctctccagatgtaaatcctcccatcacaagcttcttcctatggattctcttgcctggggaggcatatttgagttgcatttcctccaatgtgcgtcaccttcccaaagaatccaaggatgccatcaacttctgttagagggagcattatgtttggtatagcacatccggtatttggcagagtcaggagtccttcaccctcccaggaactgtactttgaaacttcccataatcctccactgtgatcataatgtttcagctcaccttccaggcaggcctaggaatcacatgtctgggacacacacatgccattatcaccaaatagatttcttgatagtcatttaaaggacccttcactgtgcagtttacagtttcaaagtattttcacacatctcatttgatcctggtgacaatcccattaaataagcaaacaaggttgctacctctgtttcacagttaagaggcctaaagattagagaactgtagatacttgcccaaagtttgacagcagtacagggaataatgccagacata

SEQ ID NO: 1306 - DNA, 246 bp, Homo sapiens
ggcacgagcagtttttaaatctgggataagtatactgagtgtgctcaattttggggactaagctgctataatttagattttataagtaatgaaatgattttttcatatctgcattactatttgttctttttcctaacttattcaggacaggagagagaaagggaagtattattggcccactttgaaaacctcaaacatttgcactgtgagattgggaaataatgttttgacggtatagaaagaaag

SEQ ID NO: 1307 - DNA, 1701 bp, Homo sapiens
ggcacgaggaaaggaaggaactgtggaaggggtgatgggagctgggatacactccagtttcatttcttctgggggattttcgagaatctccaattcaagagtcaatggcaatacttcctgttttactatttccacaatgctctccgtggctgataatttttcgctaactccatttatttcattaattaggttagtactagaaaccagtggaatatcattaggtgctacactacagggtttcttgcatatatcatcatcattttcatttgttggtaaagggtctgatgtttctgtgcaagatgtgaggctgggtataggaattgtgtcttctcttggggatgagagttcacatctgtcatctatagcagtggtgaatattggttggctactaagagcagaagaggtgggggctgcaattgtacttcgagcaacagaagaaacagtggtaggtgatggaggcagaggaagctctgctatggatactattgcagtagtttcagatgtctggccttcttgttctttcttctctccactgaggactagcctaaggactggggaaggagactttaacactggatctggttttggcttctcctcttgcttctggtcgctagctgcagtgacaggggtgctggcagcaagatgagcgctctccacagtcccataaaccacagggctgtgctcggggacctggctgggcagctgctgaggaggagtaggtgtggacgtgggtcttcctatgggtggagtaggatttctgctgccacctccagacataatctcctctgttatgtctttacctccctggtttggatcccgaattcttatagtttttttctctctcttggctggaggcggctgttgctgcgtaggcactatgataggtgctgactgatacaccggctgacttgggtaaaaaggcgttccataagcattggggaagtccccaggtcctggtccaggataaaaaggacctggccccggtggttgaactggatattgttgggggggcccaacataaggagggccactatgacggtactgtggtatacagtactgaggcccctggggcactgggtacggcatgggcagatggttaaccatcatgatgtgctgattagcctggtacactgcagtgggtgtctgtgcaccaggacgaatggaaggactgctgttcgggatggtagctctaggaggctgtatttgaggcctctggaaaaaaatgcagtattttatccagcctcttccagccaaggacctgtaaacgggagtctgttccaaaaccttcctcctcttccagttgtctgtgcaatgtattggcactgttctgctgggcggagaacgggtttgaggttgtgaattcattgtctgaggggtttgagggtataccagcgtggttggacctgcattctgtccagagggataaggggtttgagagagtccaggggacgatgcatgtcccgggggcgttgccgcaagatttggatgccccttgtttatttcatgtgctgaataaggggatggggtaggggttcccggctgtcttgccacttgtgttaccgtgctgtagactgctgagacagcgggagtgaagattcgatcctcaagaggttgttgcacaggtcctctaggaattaggtacgcctcttccaccaggtgtctgccttccaaaatcagcaaaggctggtgtaaagtctggtc

SEQ ID NO: 1308 - DNA, 2593 bp, Homo sapiens
  misc_feature (16)..(16): n equals a,t,g, or c
aagatggcgctgcganttcggtgaggacagccgccccgcccccgacaaggagctcgctcgttcacctggtgtctgggaacttgaatgtgtgaagggcgcttattgttctgaacccttgattgctccctcctcgggctgcatttcaaaaatagtcatatttttaaaggagttggaggagagggagggggaggacatggcaccattccagaaaccagcattgttacaacaccatagccagtatatttagtttggcttttcctaacatagaaatcttcaaagctggggaagtggaaataaagttttaaaaatgagagagcagttttccaactatgtcaacaaagcctatcgtgttgatgtttttattgaccattttagcaacaggctaataaaatttcaaattgaaatttttattttcatggctttaatccatgatagtttaaatactgggggccattaagagtggatgtagctaagagcttagctaacattgccttttcactctatttttctcagatattgtaagcattctgtttttcaatattgtagttaattttttggctttcaacagcagccctagtaatggtggagttgttaattaatgtgtatattgtactgaatttctgtcagttaaggggttcactgctttggtggaaattggtggaaattgctagcaggttccacgatgtttatttttttctccatgttgtatatcattaccatttcacatacgcgtttctatttttcttcctctcctcctgatctccttaaaaatgaatctagagttggtggctttttccccctcctctttggccagttccacagttcagttcttcctgaaaacagggatgatgaacttgtaggatcaggacaaatgtgtgtttttcaaaaacttaaggctgggtgtgaaacacyttctgtggacaaggatttgtaaacttctctcctccctccagctgcggccccagcctaactgatagttacttgattcagtgtgctagacacttaaatagcatctatgtctctttcaagggaatttgtcaaataatgctgtttagctaattgttgcaagcaattgcatattaacagctgtgattttgttggacagcaagtattatggccaaagccagtttcttggcatttcaaaaataatgcaataaaaactagttgaggttagctgaggctggaaatgcctttttcatggtaaatgattcacttctatatttttctttctttttctttttttttctttggttttcatcctggattcatcccctgatcttaaatcaaaacgtcagatcaatgaactatgaactaaagtatttttcttaagcctattgagtgatttattttttaaaaaatgtttaaatgcatatgcttttctttcagcacaaacaacagcaaaaacttttgtaataactaacttacctttgcatgtatgaagaactgagtcatttatttccctaacttactcctctttcaagtaacaggtggcagatcataaaatgaattctttattgtatctacacactccacattctttactgtgtcctactactgtatcttggctccctgctgtattaaacaccatcttaagcacttgttcctgcaggactccttcttgacattttgtctcccccttcaaagtcactcaaagagtgggacttcatcaaaagaaatgaattagtctctatcacaccgaatactaagatttatttcctctgatggtacatagatttctctctcactaagagggtcactctcatagaggaatgtcttgtcagttttatacttgctgaggctagactgacaataaaaatgagctgggcagttaaattagcatttgttactatattggcctataaaggatcaggttgatgataatacctctaaaaatatgcaataataaaacaatagttatgaaagaaacttgaaaggtttgcaaggtttctcctatccctgttaaaattatcatttattatctctttgtcagtgttagtaaggtaacccatgacagaataatttgagtgatagttcatcatgcagaggatatgatcaagatattacctaatggttttatcctgaaaaaggtgtatacttttagggcactgttaacaatgcgagtgaaaccaagatggtgcaagttccctttgcagatggcgtgggcacacttgatttttattatgagtgaatgtaatctttctgtattttaccagagttacagcaattacctgaaaagtttcctaacattttaataatgttagggatttcgttttggttttagttgtcctcaagagacaacaggttcacagtaatttccatgatgttgggtgtggctaagctggggattggttctgttccccctgctcccgtgtagagaaaagctatatttatactgcattctttctcaactttcaggtaaaacaaactatgatttaaaaaaaraaaaaagaaaagacaggtacttttacttcaaagagtgctttgctacatttttatttaaaccaaaaatcaaataaaataaggaggggggctgggtatactttaaacaaaaccagtcctgaaatgctgttaytctcaaagtacattccaaaaa

SEQ ID NO: 1309 - DNA, 728 bp, Homo sapiens
aattcggcacgagaccaattgtacttttattatatcaggctgattcactgtttctaatgcaatgaacttgacacagattttaaattttttctcaatctgtcccattgtgtagacaaattaattcaaagttctttttcttccttctctttttcatctaagcctgtgcttatgagtagaaaaagagaagaggctaccttgaaatgcctcgggcccaaactcagaaggctctgcactcaactgagcctcccttcctactaagaatggaatagtgttgcttataggggtgttggtccaagtatcagctgtggatgattaattcccagggctgctatcacctaaggtaacttcagtaatcttatgtgtttggaaaggaggatgaggattatttttcaaatacataattttgttttattttgaaacaatctcacacctacagaaaagttgcaattataatacaaagagcttccccctcgcctgaactgtttgatagtaagttgccaaactgatatacccacgatccccaaatgcttcagtgtatttcctcccagcaaggacattctcctgcataaccacaatacaaccataaaagtcaggagattaacaccagttcattttgaccatctgaaattcaggtgtcattcatgttttgccagttgttctttgtatgttcttcatagcaaaaaaaaaaaaaaaaaaactccaagggggggggccccggtccccaatcc

SEQ ID NO: 1310 - DNA, 1697 bp, Homo sapiens
ggcacgagcgggtttagcggcagcctcttcgggattgtttccattgccaccctaaccgtgctggcctatgaacgttacattcgcgtggtccatgccagagtgatcaatttttcctgggcctggagggccattacctacatctggctctactcactggcgtgggcaggagcacctctcctgggatggaacaggtacatcctggacgtacacggactaggctgcactgtggactggaaatccaaggatgccaacgattcctcctttgtgcttttcttatttcttggctgcctggtggtgcccctgggtgtcatagcccattgctatggccatattctatattccattcgaatgcttcgttgtgtggaagatcttcagacaattcaagtgatcaagattttaaaatatgaaaagaaactggccaaaatgtgctttttaatgatattcaccttcctggtctgttggatgccttatatcgtgatctgcttcttggtggttaatggtcatggtcacctggtcactccaacaatatctattgtttcgtacctctttgctaaatcgaacactgtatacaatccagtgatttatgtcttcatgatcagaaagtttcgaagatcccttttgcagcttctgtgcctccgactgctgaggtgccagaggcctgctaaagacctaccagcagctggaagtgaaatgcagatcagacccattgtgatgtcacagaaagatggggacaggccaaagaaaaaagtgactttcaactcttcttccatcatttttatcatcaccagtgatgaatcactgtcagttgacgacagcgacaaaaccaatgggtccaaagttgatgtaatccaagttcgtcctttgtaggaatgaagaatggcaacgaaagatggggccttaaattggatgccacttttggactttcatcataagaagtgtctggaatacccgttctatgtaatatcaacagaaccttgtggtccagcaggaaatccgaattgcccatatgctcttgggcctcaggaagaggttgaacaaaaacaaattcttttaattcaacgggtgctttacataatgaaaaaaccacttgtggcacacgatgggcatctaacatcatcatcttctaatgtgttggagattttcatttcaaatatattttttaattctctattccaaacacgttaatgctttttctcgaaaataccttactgtaaaaataactgtcgcgtacacatgtgtgaagtagctagaacatactgaattttttttgtactgttggactctattcagtgtcatgtcctatatctgatcaagttatcaaggagataattctagaatgaaaaagaaaatcctcttgttggaaacaaaagacgttttatatgtgcagtatgacaaagaggagtttcagagacaactttgaatccttgtcagcctggagaccagcaccagaggaatctacaaggcaaactcccatatatttgcttcccccaaattgctgcccctacagactcaaagctctttttctttgttttgttgtttctctaaaaatttactgttctttgtcgatgctatataagcccagggagttctaagacgccagctctttgagatttgctcattcccctgtatttcccacatatatattacatatacccgtaataaatttatgtttgtttttcaaaaaaaaaaaaaaaaaa

SEQ ID NO: 1311 - DNA, 2047 bp, Homo sapiens
ggcacgagatgaaatgggccacaactttggaatgtttcatgacgactattcttgcaagtgtccttctacaatatgtgtgatggacaaagcactgagcttctatatacccacagacttcagttcctgcagccgtctcagctatgacaagttttttgaagataaattatcaaattgcctctttaatgctccattgcctacagatatcatatccactccaatttgtgggaaccagttggtggaaatgggagaggactgtgattgtgggacatctgaggaatgtaccaatatttgctgtgatgctaagacatgtaaaatcaaagcaacttttcaatgtgcattaggagaatgttgtgaaaaatgccaatttaaaaaggctgggatggtgtgcagaccagcaaaagatgagtgcgacctgcctgaaatgtgtaatggtaaatctggtaattgtcctgatgatagattccaagtcaatggcttcccttgccatcacgggaagggccactgcttgatggggacatgccccacactgcaggagcagtgcacagagctgtggggaccaggaactgaggttgcagataagtcatgttacaacaggaatgaaggtgggtcaaagtacgggtactgtcgcagagtggatgacacactcattccctgcaaagcaaatgataccatgtgtgggaagttgttctgtcaaggtgggtcggataatttgccctggaaaggacggatagtgactttcctgacatgtaaaacatttgatcctgaagacacaagtcaagaaataggcatggtggccaatggaactaagtgtggcgataacaaggtttgcattaatgcagaatgtgtggatattgagaaagcctacaaatcaaccaattgctcatctaagtgcaaaggacatgctgtgtgtgaccatgagctccagtgtcaatgtgaggaaggatggatccctcccgactgcgatgactcctcagtggtcttccacttctccattgtggttggggtgctgttcccaatggcggtcatttttgtggtggttgctatggtaatccggcaccagagctccagagaaaagcagaagaaagatcagaggccactatctaccactggcaccaggccacacaaacagaagaggaaaccccagatggtaaaggctgttcaaccccaagagatgagtcagatgaagccccatgtgtatgatctgccagtagaaggcaatgagcccccagcctcttttcataaagacacaaacgcacttccccctactgttttcaaggataatccaatgtctacacctaaggactcaaatccaaaagcatgaagcaacagctaagcaagaactaatggctaaattatcaacttggaaaactggaaaatctggatggcagagaaatatactatctcaccagtatttgctctcgactcaagaaggttaacattttctgattcatgttagactttgaagagactaaagaaaattttcaagaggaacatatgcctgagaacctttgcatgaatttaaaatttcaattatccattcttataagaaggaagatgattgtaaagaaatatctccgaagttaaaatctgtaataggaattgattcattctctaatgaaaacaaaacataaaaacatcacactaatcttggaggaataagaaaaattgtacatccattaaatgtacaattgattgcaacatcttgattgttttaaccattaacttgtcaaattacaatcacagttaagaaaatgatgtaaaattctgttttgtggatctctttcctagattagcttctgaaatcattattagctatatcatttgaggttttctacaatttggtataactaagaatttaaaaatgttttatcatatatatttgtataattaattactggcatggttaaagtggttttcactttttaaatggagaaaatttcagttaaattaataggataaaccaggttgcgaactggtgacctgtaggccatgtttgcactgcaaatatatttggtctgaatgatattgaaaaaaaaaaaaaaaaaaa

SEQ ID NO: 1312 - DNA, 1805 bp, Homo sapiens
agctgatgtgcactctaggttagtaaccatttttgtgaaaaatttagagaaattctttgagcagcttccactgaaacactaaaacccaatagggccaaaggccmaaacctgaggaaaccttatttattgcttaatccaacataggctatgaaagttttgagtttcctcttgtgtattagaatttcattcctatttgttgtagagagtatagtacggggaatcagtaaattaaatgaagtaaactaaagattacaccttttctgctggcactaagcgaaaagcaaaaccagtggctgtctattatctcctgtgttttagacagtcaagtgttgagcacttgctcttattcctttattctctaggggaagcaagcacttatttggctacttggtgtccatggggaaagaattcctaatgctccttatgtgttagaggactttgttgagaatgtgaagtcggaaacatttccagctgttaagatggagctgctcactgctttgctgcgccttttcctctcccgacctgctgagtgccaggacatgctaggacgtttgttgtattactgcataggtgggtttttcagaaggaaatagtatttgccatgacccatagtaaaaattcttaatagctttcattgtttggtgagtcacgtctgggacccgagaagaaaatgtgaatgcttcctaggttttcctctctccttcatttttttctcctattatggttggcacaagagtaggaggaaagtggttttgtttttaatgaagtcaatctgttgtcttacctcagaggaagaaaaagatatggctgtacgggaccgaggtctcttctattatcgcctcctcttagttggcattgatgaagttaagcggattctgtgtagccctaaatctgaccctactcttggacttttggaggatccggcagaaagacctgtgaatagctgggcctcagacttcaacacactggtgccagtgtatggcaaagcccactgggcaactatctctaaatgccagggggcagagcgttgtgacccagagcttcctaaaacttcatcctttgccgcatcaggtaaaaacagtccttaccttaaatcttgtcatgataaatctttaccttttcaatgattggtggaaagtagagtatcttagcactaaacctcagactgttgcctgaatttgaagcatttgtgagcaagaaaagaggttcgtcactggttatttcagccatttgtccaaaaataaaagtcacattgtgtacatttgggaatttggataaaaaacttagctcctacagattaagaacatctttcacacaagttttctgtctcttttaggacccttgattcctgaagagaacaaggagagggtacaagaactccctgattctggagccctcatgctagtccccaatcgccagcttactgctgattattttgagaaaacttggcttagccttaaagttgctcatcagcaagtgttgccttggcggggagaattccatcctgacaccctccagatggctcttcaagtagtgaacatccagaccatcgcaatgagtagggctgggtctcggccatggaaagcatacctcagtgctcaggatgatactggctgtctgttcttaacagaactgctattggagcctggaaactcagaaatgcagatctctgtgaaacaaaatgaagcaagaacggagacgctgaatagttttatttctgtattagaaactgtgattggaacaattgaagaaataaaatcataacagagtcttaaaaaaaaaaaaaaaaaaaaaaaaaactcgag

SEQ ID NO: 1313 - DNA, 1804 bp, Homo sapiens
agctgatgtgcactctaggttagtaaccatttttgtgaaaaatttagagaaattctttgagcagcttccactgaaacactaaaacccaatagggccaaaggccmaaacctgaggaaaccttatttattgcttaatccaacataggctatgaaagttttgagtttcctcttgtgtattagaatttcattcctatttgttgtagagagtatagtacggggaatcagtaaattaaatgaagtaaactaaagattacaccttttctgctggcactaagcgaaaagcaaaaccagtggctgtctattatctcctgtgttttagacagtcaagtgttgagcacttgctcttattcctttattctctaggggaagcaagcacttatttggctacttggtgtccatggggaaagaattcctaatgctccttatgtgttagaggactttgttgagaatgtgaagtcggaaacatttccagctgttaagatggagctgctcactgctttgctgcgccttttcctctcccgacctgctgagtgccaggacatgctaggacgtttgttgtattactgcataggtgggtttttcagaaggaaatagtatttgccatgacccatagtaaaaattcttaatagctttcattgtttggtgagtcacgtctgggacccgagaagaaaatgtgaatgcttcctaggttttcctctctccttcatttttttctcctattatggttggcacaagagtaggaggaaagtggttttgtttttaatgaagtcaatctgttgtcttacctcagaggaagaaaaagatatggctgtacgggaccgaggtctcttctattatcgcctcctcttagttggcattgatgaagttaagcggattctgtgtagccctaaatctgaccctactcttggacttttggaggatccggcagaaagacctgtgaatagctgggcctcagacttcaacacactggtgccagtgtatggcaaagcccactgggcaactatctctaaatgccagggggcagagcgttgtgacccagagcttcctaaaacttcatcctttgccgcatcaggtaaaaacagtccttaccttaaatcttgtcatgataaatctttaccttttcaatgattggtggaaagtagagtatcttagcactaaacctcagactgttgcctgaatttgaagcatttgtgagcaagaaagaggttcgtcactggttatttcagccatttgtccaaaaataaaagtcacattgtgtacatttgggaatttggataaaaaacttagctcctacagattaagaacatctttcacacaagttttctgtctcttttaggacccttgattcctgaagagaacaaggagagggtacaagaactccctgattctggagccctcatgctagtccccaatcgccagcttactgctgattattttgagaaaacttggcttagccttaaagttgctcatcagcaagtgttgccttggcggggagaattccatcctgacaccctccagatggctcttcaagtagtgaacatccagaccatcgcaatgagtagggctgggtctcggccatggaaagcatacctcagtgctcaggatgatactggctgtctgttcttaacagaactgctattggagcctggaaactcagaaatgcagatctctgtgaaacaaaatgaagcaagaacggagacgctgaatagttttatttctgtattagaaactgtgattggaacaattgaagaaataaaatcataacagagtcttaaaaaaaaaaaaaaaaaaaaaaaaaactcgag

SEQ ID NO: 1314 - DNA, 1238 bp, Homo sapiens
ggcacgaggaagatatatggatacagattatatatatatatacatattttccttaatagaggaatgcttcatattattcaaaaattatatcctgatcacctttttttgttttttattgtaaagtatctctgctttatccattgctgaattcgataggatgttgaaatgctggtcaccaaaaaaggaaactgagcaaattcatttcaacaacatcaaaacttcagcttctcatagtaaaaagctgaatgttactaatatttttcatatctaaaaaaaaattcttagcaatgaaattgctgttaaaacacaaatttcaatcaaatacttttgtgtatagaaaatatgtatagtaggtagatagaaaagtataaaatgtttgttgaagtatcttattttagaatgaatggagaaatgccaaagatgaatccttcactgcattatgaaaatatttcacatgttctcttggactttatataaatctgtaatagattttagaattgaaaaattctttgtgaaggtcttctaaaagtgttccaatttatctcaaaatctccatatataggatcagcttaaaacataaagaaaaccttgaatttctcaaatgtttgagatgttcaagacagtctcttaatccgttaatgcttttggaaacaattgacaaaatagggcaggcagctcatctcatgtcctgaagttggaatttaaataattcctatttgcaaattagaatgacagtgttggaatttggaggcagtagttgagcatattctctagtatatagctacacctttaataaaatgaaggaatgtcttcaatcatattttagtgggctatttataaatagtcttgaagtcaatttagtttatttatttaaaagataatgcatcctgaaagggatcatttatgaataacaatctgaagtcttttcataaaaaaaattaataaactttagttgtacatttagccagtgttatttgaagtatgtaacttttaaaatattaagtgtcttgtatgattagaatatgtgaatgagtaacttattttgtatcaggaatgttttggtactgtgttttcactcaaaccactgacttaacagatactgctgtgtataacatgtactaaatattacagttattgtgcataacagattgttcctcttatatttgtgtgtatacaggcaattcatgttttaatgtaaataaataccattttgcagttaaaaaaaaaaaaaaaaaaaa

SEQ ID NO: 1315 - DNA, 2272 bp, Homo sapiens
ttgaggttctgggggtcctggagacgaacaatgaacagcaacgatcttgactgtgcaactcagacattcctgcagaaaagacatatgttgctttacaagaaggccaaagaactatggggccttcccagcatttgactgttcattgcatagaatgaattaaatatccagttacttgaatgggtataacgcatgaatatttgtgtgtgtgtgtgtgtgtctgagttgtgtgattttattaggggcatctgccaattctctcactgtggttccttctctgactttgcctgttcatcatctaaggaggctagatccttcgctgacttcaccattcctcaaacctgtaagtttctcacttcttccaaattggctttggctctttcttcaacctttccattcaagagcaatctttgctaaggagtaagtgaatgtgaagagtaccaactacaacaattctacagataattagtggattgtgttgtttgttgagagtgaaggtttcttggcatctggtgcctgattaaggcttgagtattaagttctcagcatatctctctattgtcttgacttgagtttgctgcattttctatgtgctgttcgtgacttggagaacttaaagtaatcgagctatgccaacttggggtggtaacagagtacttcccaccacagtgttgaaagggagagcaaagtcttatggataaaccctcctttcttttggggacacatggctctcacttgagaagctcacctgtgctgaatgtccacatggtcactaaacatgttatccttaaaccccccgtatgcctgagttgaaagggctctctcttattaggttttcatgggaacatgaggcagcaaatctattgctaagactttaccaggctcaaatcatctgaggctgatagatatttgacttggtaagacttaagtaaggctctggctcccaggggcataagcaacagtttcttgaatgtgccatctgagaagggagacccaggttatgagttttcctttgaacacattggtcttttctcaaagttcctgccttgctagactgttagctctttgaggacagggactatgtcttatcaatcactattattttcctgttacctagcatgggacaagtacacaacacatatttgttcaatgaatgaatgaatgtcttctaaaagactcctctgattgggagaccatatctataattgggatgtgaatcatttcttcagtggaataagagcacaacggcacaaccttcaaggacatattatctactatgaacattttactgtgagactctttattttgccttctacttgcgctgaaatgaaaccaaaacaggccgttgggttccacaagtcaatatatgttggatgaggattctgttgccttattgggaactgtgagacttatctggtatgagaagccagtaataaacctttgacctgttttaaccaatgaagattatgaatatgttaatatgatgtaaattgctatttaagtgtaaagcagttctaagttttagtatttgggggattggtttttattatttttttcctttttgaaaaatactgagggatcttttgataaagttagtaatgcatgttagattttagttttgcaagcatgttgtttttcaaatatatcaagtatagaaaaaggtaaaacagttaagaaggaaggcaattatattattcttctgtagttaagcaaacacttgttgagtgcctgctatgtgcacggcatgggcccatatgtgtgaggagcttgtctaattatgtaggaagcaatagatctcggtagttacgtattgggcagatacttactgtatgaatgaaagaacatcacagtaatcacaatatcagagctgaattatcctcagtgtagcttcttggaattcagtttctggaactagagatagagcatttattaaaaaaaactcctgttgagactgtgtcttatgaacctctgaaacgtacaagccttcacaagtttaactaaattgggattaatctttctgtagttatctgcataattcttgtttttctttccatctggctcctgggttgacaatttgtggaaacaactctattgctactatttaaaaaaaatcagaaatctttccctttaagctatgttaaattcaaactattcctgctattcctgttttgtcaaagaattatatttttcaaaatatgtttatttgtttgatgggtcccaggaaacactaataaaaaccacagagaccagcctggaaaaaaaaaaaaaaaaaaaa

SEQ ID NO: 1316 - DNA, 2811 bp, Homo sapiens
gcgcggcggccccgtggagcagcgcagtatggcgggcggggcccgggaggtgctcacactgcagttgggacattttgccggtttcgtgggcgcgcactggtggaaccagcaggatgctgcgctgggccgagcgaccgattccaaggagcccccgggagagctgtgccccgacgtcctgtatcgtacgggccggacgctgcacggccaggagacctacacgccgcgactcatcctcatggatctgaagggtagtttgagctccctaaaagaggaaggtggactctacagggacaaacagttggatgctgcaatagcatggcaggggaagctcaccacacacaaagaggaactctatcccaagaacccttatctccaagactttctgagtgcagaggtgagggcctctgtcctgaactttttaacccggtgccacaacccgagggtytccataggggcagggartgctgagtagtgatggtgtctggagggtcaaatccattcccaatggcaaaggttcctcaccactccccaccgctacaactccaaaaccacttatccctacagaggccagcatcagggtctggtcagacttcctcagagtccatctccatccccggagcatctgtatgattcagaagtacaaccacgatgggtatggggaccccagaggctttgarggaagcargtcggctggargcttttggccaaggggaaagtgtcctaaaggaacccaagtaccaggaagagctggaggacaggctgcatttctacgtggaggaatgtgactacttgcagggcttccagatcctgtgtgacctgcacgatggcttctctggggtaggcgcgaaggcggcagagctgctacaagatgaatattcagggcggggaataataacctggggcctgctacctggtccctaccatcgtggggaggcccagagaaacatctatcgtctattaaacacagcttttggtctcgtgcacctgactgctcacagctctcttgtctgccccttgtccttgggtgggagcctgggcctgcgacccgagccacctgtcagcttcccttacctgcattatgatgccactctgcccttccactgcagtgccatcctggctacagccctggacacagtcactgttccttatcgcctgtkttcctctccagtttccatggttcatctggctgacatgctgagcttctgtgggaaaaaggtggtgacagcaggagcaatcatccctttccccttggctccaggccagtcccttcctgattccctgatgcagtttggaggagccaccccatggaccccactgtctgcatgtggggagccttctggaacacgttgctttgcccagtcagtggtgctgaggggtatagacagagcatgccacacaagccagctcaccccagggacacctccaccctctgcccttcatgcatgtaccactggggaagaaatcttggctcagtatttacaacagcagcagcctggagtcatgagttcttcccatctgctgctgactccctgcagggtggctcctccttacccccacctcttctcaagctgcagtccaccgggtatggttctggatggttcccccaagggagcaggtatgtaggaggtgaagaaaactgagatttcaagtatgggagagtttttactatctccattcctggattaaaagtgctgaaaaagtccacagttaaacattcctttattcaccctatggctcccaagaaaagcattcttcctctggagtactggtgtactaaggggacaatacaccaaatttgttgagtttacaatcaagtctactaaggttggacttccttatcagtttggcagagtcccagggcagaataatcatccatctacaggtctctgtttcctctccctccacagcagtggagagcatcccagtgtttggggcactgtgttcctcttcgtccctgcaccagaccctggaagccttggccagagacctcaccaaactcgacttgcggcgctgggccagcttcatggatgctggagtggagcacgatgacgtagcagagctgctgcaggagctacaaagcctggcccagtgctaccagggtggtgacagcctcgtggastaaagttcccagtgtgggagaaaggagctagtttgcaataaaaacagctggatgcaggagcccagtgtcttcatgcagaggagctcaatgtcgcgggactagctacaccaacatatgcactttttacatttagaaacactgtgattagaccacagaacaataaatatgtgccatcagaccaaaaaaaagtagagaaaggagctgaactccactctcgatgctacttacagaggacatctgtaaagtcttcataaaagaccttgaatgatgcctaggatggcagagcccctgggtcctactccatcctccagcctttgtccttgtcctggcctcctgctctccagatctgtaaactgggctcaaggactgtacaagcagagtacaactacccgcctccccggtgccagggcgcctgttgggtttggtcctgtgtagatgattcccagagtctcattcatccagctcctcttcagacagaaggtccccatggtcagacagctggtctgcattgctggtactggttgcatcatcctcatcctcagagctggcttcacaggcagtgtggaagagctgcatgagttctcgaaaatggtgggaaacctaagaaaggaggagggctgtattcactgatccttagtaacatgttaacatttatgaagcactataaaaaaaaaaaaaaaaaaaactcgagg

SEQ ID NO: 1317 - DNA, 1758 bp, Homo sapiens
gcaagtacttatgtggattggaaaccatactgaatttctggatgagaagattcagccaatattagacaaagtaggctctttggtaaacgcaaggcttgaattttctcggggccttatgatgctggttcttgagaagttagccactgatattccttgtctgctatatgatgacaatctcttctgtcatttggtggatgaagtactcttgtttgaaagggagctacacagtgttcatggctatcctggcacttttgctagttgtatgcatattctatcagaggaaacctgttttcagagatggttgacggtggagagaaaatttgctcttcaaaaaatggactcaatgctttcctcagaagctgcctgggtatcgcaatataaggatatcactgacgtggatgaaatgaaagttccagattgtgcagaaacttttatgactctactcttggttataactgacaggtataaaaatcttcccacagcttcccgaaagcttcagttcctggagttacagaaggacttagtagatgattttaggatacgattaacacaagtgatgaaagaagagactagagcttcccttggctttcgatactgtgcaattcttaatgctgtgaactacatctcaacagtactagcagattgggctgacaatgttttctttctacaacttcaacaggctgcactggaggtgtttgcagagaataatactctgagtaaattgcagctaggacagctagcctctatggagagctctgtctttgatgacatgattaacctcttagaacgtttaaagcatgatatgttgacccgtcaagtagaccacgtttttagagaagttaaagatgctgcaaaattgtataaaaaagaaagatggttgtccttgccatctcagtcagagcaggcagtgatgtccctgtccagttcggcttgcccgttgctgctgacgttacgagaccatttacttcagttggagcagcagctttgtttctccttatttaaaattttctggcaaatgcttgtagagaagctggatgtatacatctaccaagaaataattcttgctaatcacttcaatgaaggaggagcagcccagctscagtttgatatgactcggaatcttttccctttgttttctcactattgcaagagaccagaaaattattttaaacatataaaagaagcctgtattgttttgaatttgaacgtcggttctgcactactgctgaaagatgtactgcagtcagcttcagggcagcttcctgccacagcagcattaaatgaagttggaatttacaaactggctcaacaagatgttgagattctacttaatttgaggacaaattggcctaatactggaaaataatgtctttcagaaaaaggtttctttggtttttgtttctaagaaagaggaagccaattggatttcaagttatatgatgaaattctgaattaatgaaactggaaaactttatagaattacttattatcttggatttatggtgttattaaaatgctgaccatatttccttcatcctcttgttcctaaggaaacaaaaacagaaaacgaaacaatgaaaactcaattctatttacaagtataaatgctgagtatgtctgttgaagacgagcagagatattaaattataaccaactttcaatttcctgtgctaattaagggaaattctgttgtggataatcaaacatagccaataaatttttttaaaactccaaaaaaaaaaaaaaaaaaaaaaaaaa

SEQ ID NO: 1318 - DNA, 1918 bp, Homo sapiens
ggcacgagaaaaaaccaaataataatagttatccgtcttctacttcatggaagattgttttggtgccctgaccctctgaagtgcccagttcctgccatctgaaacctcggcctgatctgatctcatgttggaatctgcctgtctttcacacagggctggtcttggtcctttacatgccagttttgcttgtgaattcttgcttttttcctctcatcagccttaagtttaggcgtttgttgttctccagtgatgtagacagttcccttcacaagtcacagttcttcccataaatgaggcccgctgacctctgcgggactttaaaaatctattcagatatttccgagtaagtggcttgtttaaattcttcctgtgtctttctttattccttaattggttggtggaaagaagagatgcttgggaaccttgggttcttaggtttggaattcctttaaataaatatctaaaaagctaaattttaaaataccagctttacataaatgattgttgactctggtctgtttctgacacctttccagaaaaaagtcaaattgttcaggtacaccaaagaggaagaagagctgtggaggccaccctctacaaagctttatagaacttctggatctaactcacaaacaagcttccagaagagactagagaccttaggccaggagatgaaggagttcagtagcaaagtcacacctgtccaattccctgagctttgctcactcagctaatgggatggcaaaggtggtggtgctttcatcttcaggcagaagcctctgcccatccccctcaagggctgcaggcccagttctcatgctgcccttgggtgggcatctgttaacagaggagaacgtctgggtggcggcagcagctttgctctgagtgcctacaaagctaatgcttggtgctagaaacatcatcattattaaacttcagaaaagcagcagccatgttcagtcaggctcatgctgcctcactgcttaagtgcctgcaggagccgcctgccaagctccccttcctacacctggcacactggggtctgcacaaggctttgtcaaccaaagacagcttcccccttttgattgcctgtagactttggagccaagaaacactctgtgtgactctacacacacttccaggtggtttgtgcttcaaagtcattgatgcaacttgaaaggaaacagtttaatggtggaaatgaactaccatttataacttctgtttttttattgagaaaatgattcacgaattccaaatcagattgccaggaagaaataggacgtgacggtactgggccctgtgattctcccagcccttgcagtccgctaggtgagaggaaaagctctttacttccgcccctggcagggacttctgggttatgggagaaaccagagatgggaatgaggaaaatatgaactacagcagaagcccctgggcagctgtgatggagcccctgacattactcttcttgcatctgtcctgccttctttccctctgcgaggcagtggggtgggattcagagtgcttagtctgctcactgggagaagaagagttcctgcgcatgcaagccctgctgtgtggctgtcgtttacatttgggaggtgtcctgtatgtctgtacgttggggactgcctgtatttggaagatttaaaaacctagcatcctgttctcaccctctaagctgcattgagaaatgactcgtctctgtatttgtattaagccttaacacttttcttaagtgcattcggtgccaacattttttagagctgtaccaaaacaaaaagcctgtactcacatcacaatgtcattttgataggagcgttttgttatttttacaaggcagaatggggtgtaacagttgaattaaacttagcaatcacgtgctcagaaaaaaaaaaaaaaaaaaaaaaaaaaa

SEQ ID NO: 1319 - DNA, 1817 bp, Homo sapiens
  misc_feature (23)..(23): n equals a,t,g, or c
  misc_feature (29)..(29): n equals a,t,g, or c
  misc_feature (60)..(60): n equals a,t,g, or c
agttggccacgggccccagggcncggggnccgcaaaccgcacttctgaggagaccagcantcatgcatcgtgcaccacagtgtcaggcctcccaacccacgctccttccctgtggccaacctgtgggcccggccttagggtggaggctttagtgtacagggacagccatggccacacagcacacatgtggagcagcggctctccctggaaagctccaggcctgaatggatggactcagcgactgcaccagtggcagctggtgactgtggacagtggtggaccctgcttctgtgcacctgctgcaggctctttttatgaaggctttcatgaattttagtatgtaatacgcactgacgacacatgatgcttggatgacagatgagaggggatggctgagtcctgtggctggcccgtgatgccaggtggcccatgtgcccagggcgcctgcagggctgctacagggacctggtcaggaggtgcacatggtgccctgccctcacccaccctctgtgtttccccttctttgaaaaggtagaagagaaaggaatattttaaacctttttggcttaaacagaattttagcatcagaactagctttctgggattggaggcaaaccatcaaggtggtccctctccagtctggacacgatgccagcaaggatgacgtcctgccacctcctggagttaccctggcctcctagggtccctttttctgatgaagtcttaatkccctaaaagcgcctctttggacactgaggccctctctgcctttcctggcctccggcaacagttttttacaaagattttttgcagtcgagtccatatgtccacccattgatttttaaagcttttgtgatattttagcattttgaaagactttcacagtgagagtagaaggtagatttggaatcatgcattttagcaagtggacttgttgaaacaggaagcaagggccttcagtgtagcccattcttgatccagagctgttgcctgtgacagcggtttctctggatgtcaaaggcagctgcctggctgcccagcttgcttctcgactggtggcccctatgggtgggtgtgcgatggaaatgtgttcctgccggagtctgaggcaccagggtgtgctcaaaggctggccctggtggtggactggcacctgtgcagagtgccgtgtgcttgtggtgcgccatctgaagcaagagtccagcgttctgccgtgtctgtcccccaccatgccccctacaggcggtactgayggcgcttttttttttttttctgtcaggaaaacaatgttggcctgtgggccgcccacaacatatccttccctcactacctgtgtgaccaaggttggcttctgttgacctttaaaaaagaaaccctcaactcaaattgctataattagacacttgcttctgtcttgcctcctgtctgcagctgtgaatagtcatttgactgtgactgttgcccttagccagccagatgcgcctgtgaaccaaagcttcgtgcacatgtgttcccctaaaggttggggagcctcgctgtgtcttgctgttcccaggcaccaccacagcaggtgctgccatactcttgtrgkmwctgtgcgccccccccccccccacccgtctgccaagcatgggtatgaatcgtgcacacagccatgcttcaaggccggggcaggggagcctgtgctgatgccatccagagcactgggctgtgcctggaaggcgagccttgattgtctgaacacataaagcaaactgtccagaaaaaaaaaaaaaaaaaaaaaaaaaaaaaaaaaaaaaaaactcgagcggcacgag

SEQ ID NO: 1320 - DNA, 960 bp, Homo sapiens
ggcacgagggctcactcagcacgctcactaacccagcatgccacttccagcaggcatgcagtcctggcccagctctatgggaaacaaggaggaaagttagccactgaaggccaaaacaccatgtggggtggacagagggtttgctgggctggctttgctttccctgctggggccacagctgtgttaaccaatgaggtctgctgccaggtgtgaacaagcatgtctctacgaatgaacgaaacattggggatctctgccgaaaccaccaaagggcatgtctgatgggcacagggtctcccaaacccagtggcttctgtctgtcctcagcccttgtccctgtttatctgcagccaggagacttgcaagggattggtgattgacagagaggactcgtgcgctgttttgtgttagcagaggatttgtgttttcacaggtaggcttagcgtcctctcagagtgtagtgccaggtcctggtgccacgctagctgagcactcaggagagttcatcagctcagatcccacagggcctcctctttagcaggaattcacaacagtttggatgccctaaacttctgtagctcaggaacatcactggtgtatttgtttttttgtttgtttgcttgggttcttgcaagagcgcgtggggacagttcttccagcaggcactggttttgttgccccagggctgctttgctgtgatgatgattgcatttcaacacatgccagatgcagattttttcccccttactgtttcaatgacctttattttaaaaacacatagcttgaaaatttatttttatactgatattagtttggatgtgccacttttggcaccaaacgtgtatgtcatttttatttccattttataaacatgtaaataatagtgataacttgttaataatagtaaacctttatacctaaagtaaatgtcttccctcccacaaaaaaaaaaaaaaaaaa

SEQ ID NO: 1321 - DNA, 636 bp, Homo sapiens
ggcacgagctagtctcgagtttttttttttttttttttttttttttttttttttttggtggcaatcacagtctttaatcattaattgtcatatttctgatttgttagcaagtgccagcttgtaggctggttgaagtacagaactcagaggaaaaaagaaattaaattttagctttctggagagcagcccctctctggcaccatcaaacacttctttgtttcccttcaacttggaactcttcaaacatcaggggttgtgagggtttggccattcttttatcttgggtccatgtgagtgacagaaatggtgcggcctgggaaagatctccctcctttacattttctcttctccctcctcctccttattctaaaactgtgcctccaacagaggggcaggggctcttgtagagagatccctggcccaggacaggagatgccaaatctaatttatctcactgagggcctttgagaaaaacgcttcagggccaggctcagtggctcatgcctatataatcccagtactttgagaagctgaggcggcagatcacttgaggccaggagttcgagaccagtctcgtcaacatggcgaaaccctgtctctacaaaaaaaaaaaaaaaaaaaaaaaaaaaaaaaaaa

SEQ ID NO: 1322 - DNA, 1095 bp, Homo sapiens
  misc_feature (14)..(14): n equals a,t,g, or c
aattcggcacaggncatgatccacctgggcttcttgttacctttgtctctggtgtggaggaggagagatggcatccagtggacagaggagttcatttttcagggatgacttggttgrtctgccttcctgggccarcgtgcaggcaaccccactggggccagagcatcctctccgtgagtyctcatagcttggatctaaccctggtcatgttggatttccattcctcctggccttaagttttttttttcttgtttgtttggttttttttttttggagatgaagtgcagtgcagtggcacaatctcagctcactgcaacctccgcctccagggttcaagcgattctcctgcctmagcctcccgagtagctggtattacagacgcytgcmaccgcamccagctaattttkgttttkgtttgtttkgtttttttaaattttattagaagtgagtttcaccatgttggcctggctggtcttgaactcctgacctcaagtgatccacccacctcagcctcccaatgaaggtgttttttgaccattcttataccttctcttctgtctcagggcatccctcccccattcagagaccaccatcaagggtcaagggtataactagtcctgattcccaagcaaggggccaaaggtgtcagccaggtagatcatgcttttcctttttgcacctgttgggtcttcaaattctttctttggtaatccccattgttttctgtgagctggtccttttcctaccatgcccaggttgaactctccatctgcctgcccagcttgctggaaaggggcatgtgtttatggtccctgtcccatcaggagctccagcctgttggcaatttctctcctgatcctgcgttggcgtcctcagggctttgctccccggggtcccctgagtggccttctgtctctccgtggtttggatgcagtgcccacgagcttgcctgagtgcacaggtatccctctcgctctcatggagcagcttgcagggggctctgtgaactggtccctgtgcctacttttggggatcctgtgataagcagtgtcttcctgagtgcccccttctcactgtggacatcagaggccccag

SEQ ID NO: 1323 - DNA, 513 bp, Homo sapiens
ttggatcctggtggctttaaggcatttccatgactggagctgctggtctggatgctacctggaaggggattcctcattggatatcatttatggcccagtaagtgtcccataattttctttaagctccatctatgtaaatatttttgaacaattttgcacaagtacagggccacatacctatttgttataaacccgacgttgataaaatgcactcttagtataattgggtcttgttttgatcctggcagtttcatattgggatttggcagtgagttcaacagaataagcattatcctcttgaggcccatctaggattgaactaaagggcttctacaatatccacatgatcatacaattagttctctctctccctctcttttttttgtgctgtgatagtgtaactgaatatgagctggttgccagggtattgtggtagaataataccctgcagtaaacagttaatcatgcagcagaactggcttgatttaaaaaaaaaaaaaaaaaaaactcgag

SEQ ID NO: 1324 - DNA, 796 bp, Homo sapiens
  misc_feature (755)..(755): n equals a,t,g, or c
  misc_feature (762)..(762): n equals a,t,g, or c
  misc_feature (773)..(773): n equals a,t,g, or c
  misc_feature (789)..(789): n equals a,t,g, or c
  misc_feature (792)..(792): n equals a,t,g, or c
ggtctgatttttaatagggaaacaatgatacaaacctgtctttaacaacagacaactcttaatttcaccacttaacatcctattattttgcctattcccgtcaaatctttatgcatgtgtatttacactgttataaacatggtgtgcaaactatttgttgttgggctattttcacctcacatcaagacttgaaaatgcccccaagtttctgtatatttctgtttctgttctaatgacttacatggtcgcatgatagtcattgtgttacagtggcatatcttatttgatcattcctgtcttctggaaccattacgtttgttctaatttttagctcctgggtaacacctcaatctgtgtcttttatgaatatgtcactttgcttcttgttgccccaggaatacataggcaccagaggccaccttgatagtgttttgtgtggcctgttaggctgagtctagggatcactgggaattagctttgggaaggtgggcatcttaggcccaggctgatgaacttcaattttactgtattcttcatcagccattggaccttcctttgactacagccccaatgcttttctaatttggctgaaaatatttacatttataaaaaattawtggctgggcacaatggktcacacctataatcccaacgctttgggaggttgargtgggaggatcacttgagcccaggagtttaaaaccagcctaggcaacatagcaagaccccaaagctaccaaaaaaaaaaaaaaaanaaaaacncgagggggggnccgggacccaattcgnccnatag

SEQ ID NO: 1325 - DNA, 2238 bp, Homo sapiens
gagagaaagcaccctctcaacagtgcaacatcttttaaagccacctataatgaaagaataggtacaatggggacagtgtggcaaaaataaaatcacttcccaaagattttcagtcagaaagctgaaaaatcatttttcctaccttttgtgtatttgcctgccagagaattctgttctgccttccacctcacagatgtgctccagatccacagaaaagttggtccataggagaaaaatggcaattgaattttatgtatttgctttctttgttttgatagaaataattccctcctccttgtctgcatatctcatgactcctgccttccaaatacataggttcacattctcaatatgaaatcttataaactacatattttacagcagccacctcagcagagaagtgctcctgacatctctttcaccatcgatgcgaataagcagcaaaggcagctgattgctgagctagaaaacaagaacaggtgagactttgtagacgtgctggcttgtttgatcaatgtgcgcattccttaataaactatggtcgtgctttaaagtttcagggctttacaccctgtatggctactcaagggaagacatctacactcagtgatgctcacttccaaaaagctggtctttagatctttagaacttcagaagctccatgagaaaacggcgtgtgcatgtatgtgtatagttctgagatatcaatgcaattaatgttgcccctctagacggtctcacttccctttttctgagatacttaattttgttcaagagcttctagtacaggaggaccctcctgggtactaggtagaaggtgtctctaccacccagaaacaggtaggaggctcaccagagaggccccctggaaggaccctgagctaaagaggcatctggagagacaccaccatcacccagttactctccaaacatccaaagatctccacctgcagcccatcagcaggttcttcctctattcaacacagattgactcacagtctacctccacagcatacaccccaaaaattgtccagctcatctccaccaccacccagttcagcctgtccttttcaaaaacatcaatcttatgttattccaggtttaaaccctctaatgtgttcccatcacacttcagttaaatcctactcctcttaccatcacctgcaaggtcttacctgacctgattccctcctgccattccagcctcagctcaccttgctcagcacactcccacctcccatgtgttcctcctgtctacagcctttgaattagtcattccctcagcctagaaagctcttcctccaggtctctgtgtggatggctccttctcatcactggggtctcagctcaaatatcatctcctaaaagaccacctgtctgatcctacctaattgcccctagcccagaaactagtctcaattacatacccctgtgtgtgtgttgggggcaggaggttgtcacttatcactatctgaaataatcatgtgtgtttgtttcttcgtttattgtctgtcttcctggactgaaacggaagttctttgagaacagaggccatggctaaatggtccctggagcccagaaccaggcctggcaattgtagaagctcagtagatatacattgagtgagaaaacgatgaatagctgagttaaatctcagacttggttctgaggaaacccaacatggaacaacttgtactaggtcggtgcaaatgtaattgtggtttttgccattatttttaattacttttaatggcaagagaacgcaattacgtttgcaccaacctaacacattctagtaatatatttcttgaaacagcaccaaaacatttccatgcttaaccccattcttaaacactgatgtgacatttgaggtcaaactggaggagtaaaggaggaggttgtgataattatttcatgcctgtaaaatttgacctgagaatttggggataaatgatcaaagtattctttaaagttctcaagaaagaataaaaaggagggtgcaaactctggttggcactttttcatatttttttctagtaaggaaagcttttggcttagttgtcttgagacctggctgccatcattaggaaaccacaaattaggatagaaatagcttcataaatgtgacaccatgactccatcgcctttgaaactactgctctactctgacccccagggagatgtgctcacatcagagctggaataaaaaaatttaaaaataaaaaaaaaaaaaaaaaa

SEQ ID NO: 1326 - DNA, 499 bp, Homo sapiens
acgagggataatggtggtaaaggatgtaccagacagtcatctcctgaagagatgccgaacaacctgtccttgttttatgtattttctctttctttcctgtccagttttattcctctcatagtaactgctaaaaaaatgtcagttcctgtcactcttccaccccttttctccctctcccctgcattgtggtctgggccttggtccactagcaactccccttaggtgttgcttaatctgcctcatggccaaagccaatcccattcctgtcccccgctacccaagggactcccagtctgtatgcacaaggcgggatgtgaagtctggatgtgcaagaaacccagctgtaagaaagagcttccctcggcttggcatggtggctcatgcctgtaatcccagcactttgagaggtcaaagtgggagaatcacttgagcccaggagttcaggactagcctgggcaacatagcaagatctcacctctacaaaaaaaaaaaaaaaaaa

SEQ ID NO: 1327 - DNA, 788 bp, Homo sapiens
  misc_feature (3)..(4): n equals a,t,g, or c
  misc_feature (11)..(11): n equals a,t,g, or c
  misc_feature (20)..(20): n equals a,t,g, or c
  misc_feature (41)..(41): n equals a,t,g, or c
  misc_feature (61)..(61): n equals a,t,g, or c
ccnntgccgcnccgctctanaactagtggatcccccggctncaaggatttcggcacgaggnccacagggggaagcactgggactcatcaggaggctgagggagagagggaaaaagggagcggggagaggcaggaaactttattgtgattttcatgcatcagaatgtgctaggcagagtaagctggcttaggattggcttgtttgaattatttcaatgggctctggggcataggggctgccccttgttgtcaggtgccagggcctggggtgatgagggcaggggatagtgggctgragtgtgagartcccagagaggaggtggctggggtgtaggctctggactggttggtttgcatatggaaggcaagtcccaaaccatctctaggaactggctagaatcaatctaggaattgggaagggccgtctccctggggtcagccaggccccagatgtcagagcatcagaaatacagaaaataagtcactgggcgcggtggctcacacctgtaatcccaacactttgggaggctgaggcaggtggatcacgggaggtcaggactttgagaccagcctggccaacatgatgaaacctcgtttctactaaaaatataaaaattagccaggcatgatggtgtgtgcctgtaatcccagctactcgggaggctgaggcaggagaatcgcttgaacccggtaggtggaggttgcagtgagccaagatcgcttcactgcactccagcctgggtgacagagcgaaactccatctcaaaaaaaaaaaaaaaaaaaactcga

SEQ ID NO: 1328 - DNA, 3011 bp, Homo sapiens
ggcacgagtacattgtctgaaaaaagcagtgagactcgacagtaataatcacttatactggaatgctcttggtgtggttgcatgttacagtggtattggaaattatgcccttgctcagcactgtttcatcaaatcaatccagtcagaacaaattaatgctgttgcatggaccaacttgggagtgttatacctcacaaatgaaaacattgagcaagctcatgaggctttcaaaatggctcaatcccttgatccatcttatttaatgtgctggattggacaagctcttattgctgaggcagttggaagttatgacaccatggatctcttcaggcacactacagaactaaatatgcatactgaaggagcattaggttatgcgtattgggtctgcacaacattgcaagataaaagcaacagagaaacagagctgtaccagtacaacatcctccagatgaatgctattccagcagcacaagttattttgaataaatatgtagaaagaattcagaattatgccccagctttcacaatgttgggttacttaaacgaacatctacaactgaaaaaggaagcagcaaatgcataccaaagggcaattttgttgttacagactgcagaagaccaagatacttacaatgttgcaataagaaattacggcagattgttatgttccactggtgaatatgataaagctatccaggcttttaagtcaacaccccttgaagtgttagaagacatcataggttttgcattggctttattcatgaaggggctttataaagagagcagcaaagcctatgagagagccttgtctattgttgaatcggagcaagacaaagcccatatcttgacagctctggcaataactgaatataaacaaggaaaaacggatgtagccaagacattgctatttaaatgctctatcttaaaggaaccaaccacagaaagccttcaagccctgtgtgctctagggttggcaatgcaggatgctacactgtcaaaagcagcacttaatgagttactgaagcacatcaaacacaaagacagtaattatcagaggtgccttcttacatcagcgatttatgcactccaaggccgcagtgtggctgtgcaaaaacaaatatctaaagctgttcacagcaaccctggtgaccctgctctttggtctctgttgtctcgagttgttgcacagtatgctcaacgaaatgcaaagggaggtgttgtagcaggaaatgtggctcatattctggactcaaatcatggaaagaaggcattactgtacactgcggtaaatcagttggctatgggaagcagttcagcagaagatgaaaaaaatactgcactaaagaccattcagaaggcagctctcctttctccaggtgatcctgctatctgggctgggctaatggcagcctgtcacgctgatgataaactggccttaatgaacaacactcagccaaagaggatagatttatacttggcactgttatctgctgtttctgcttcaattaaagacgaaaaattctttgaaaattacaaccagtcccttgaaaagtggtctctctcacaagctgtcactggtctaatagacacaggaagaatatctgaagctgaaactctctgcacaaagaatttaaaaagtaaccctgatcagccagccgttatcttacttttgagacaagttcagtgtaaaccactcccggagtcacaaaagccactcccagatgctgtacttgaagaactacaaaaaacagtcatgtccaactcaacctctgttccagcttggcagtggctggcacatgtgtatcaatcccaaggaatgatgagagctgcagagatgtgttacagaaagagtctacaattggcatcccaacggggcagttggagtgggaagctctcaagtctgttgagactagcactacttgcattaaaagtctgtatggctaacatttccaatgatcactggccatctttggttcaagaggctacaactgaggccttgaagctttgcttttgtccactggctgttcttttacaagctttgttacaattcaaacgcaaaatgggggcaagagagacacggcgtcttttggaaagagtggtatatcagcctgggtatcccaaatctattgcatcaactgcacgttggtacctactgagacacttatatgccaaagatgactatgagcttattgacgtgctggtaaacaatgccaaaactcatggagatacaagagcattggaactgaatcagagattgtcctcacaataacattggattattttatagtaaggaagcaaagaaaaagctgtaagaatgaagcaatgaatcaagacttctacccaaagcaacatttttttaaactatatttattccttttctaaaggaatctagagaagttgaagtttttaagttaggaatgcaattttctgttaactccaaacctgattttaatctgaaaaaaaaaaaatttaatttgggaaaaccagaatgaaaggaaaaccattattgccttggttgcttaacattatttgtaaaccattattttctgcatcttgcatggtgcacaatagaatatcttttactgtaatcccttacaataaagccttaatagccattttctatgtaatatgcaaaagtagattagcacaatgcacaattttcttttgttaaaaatcaaattcaaagatttaattcttgctatgaattctaaagttcggcaaaccaattcatcataaaatccaaataatcttgtaacctatttatctagtgattcatctccaattctgttgaaaaagcataatataaatgttgatgagactagactctaatggatatgtttatataattccaaacactcaggtgtgtgaatgcatttaaaaacattaatggaaaataatgctgataatatttaattgatcatgcaattccttcaattatgatggaaagacttgaactttctgaaataaaacaaaaatacaaaaaaaaaaaaaaaaaaaaaaaaaaaaaa

SEQ ID NO: 1329 - DNA, 1445 bp, Homo sapiens
ggcacgagcggagacaaagatggctgcgagagtcggcgccttcctcaagaatgcctgggacaaggagccagtgctggtcgtgtccttcgtcgtcgggggcctcgctgtaattctgcccccattgagcccctacttcaagtactccgtcatgatcaacaaggccacgccctacaactacccagcggctggggaaaagggccacaggatagagctcagctcccactccactcaacgccaaagctgtcctggagccagacggtcctgagctctggcactggaggcctgggagccatgcccttgaccagccttgagacctcgagcaagacaaggcaaccattctgaggctgagtttcctgctctgcaaacgacatgacaccctcggctggatgttgcagcggtgacactgaagtagtgacaccagacgatttctgtacttaatgtgatgtcagcacttagtaaacattcatatcccctgcctccagagttccttaaggttcaattgatggaatgcctcctctgcaccagcacctgggcagtggagacggagtttcaccgtgttggccaggatggtcccgatctcctgacctcgtgatccgcctgcctcggcctcccaaagtgctgggattacaggcatgatgagccactgcgcccggcctatttcaacttaagtgaaaatctcacctgtggccagcggctaccgtgctggacagcacagtgctcatctgaggaggcaggacgcagcctctccgcctctttgcttattctgctgactgaccgcctctccagccagagcatgagctgaaaaacgacagcaacttgtttctacatcccgtgccttaaccagagcctggcacgtagtacatcctccatgaacatttgcagaatcaatgactttgcaaagtgagaagtgcttggtgaataccaaagagtcagacatgctggaggttagggcaggaggtgcgactttagttacgacctgcagagaaggcccgtgggcccagacttgaataaggaggagacaaaggggtgacaggaggaaagtatgccaggctgaggggacagccctgcacgcagcttctgaggactccagcctagacatggagggagagatgtgactcagccaaacagggacccaaagacagtggctgaagcaggtgctgctcctgggtcagaaagacctgagttccgggcggggcacagtggctcacgcctgtaatcccagcactttgggaggccggggcgggcagatcacttgaggtcaggagttcaagaccagcctggccggcatggtgaaaccccgtctctactaaagatacaaaaattggccggatgttgtggcacatgcctgtaatctcagctactcaagagtttgaggtcgggagttccagaccagcccggccaacatgatgagacctcatctctactaaaaaaaaaaaaaaaaaaaa

SEQ ID NO: 1330 - DNA, 1003 bp, Homo sapiens
ggcacgagcaacagagcaagactccgtctcaaagaaaaaaagaaaagagaaaaaggggagtcctagtaagtgtgcccagtctgtcaccatcaagatagtgagggtcagcacagtggcctgcaagtcagagtaagcctgggatgagacttcagagctgctcttctcagactgcagctctgctcctcagtttctacctcccagagtcttgtgcatcccagagtccaggctgaaccgggccctctggcccagcgagtcctttgcattcctaggcaaggctggtgcgtactagtgaacatctccctgatgtggtattattagggattgaagagttcccctgagcatgtttggttttctagatacaagttgagtattccttatcctaaatgcttgggtttcagtgtttggggtttcatatgttttcagattttggaatatttgccttacacttactagttgagcaccccaaatccgaaatctgaaatccatgctccagtgaacatttcctttgagcagcatattggtgctcaaaaagtttcagattttggaacattttggatttcagattttcagatttgggatgcccaacctgtaatagaaatttactcatttactcatttacataccaaacatttaacattttttggcttccttaaattagtatgctgaacttaataaataattggaaaatgtggagaaatttatgtatgtatttatttttaattgggcagcccccaaaccaaaataggttcagagaggctccatcattttttaaataagctataattttcagcctggggaacatagggcgaccctgtctctacaaaaactttaaaacttagccaggcatggtggtatgcacctatagtcccagctactcaggaggctgagatgggaggattgcttgagcacaagagttccaggctgcagtgaactgtgattgtgccactgcactccagccaggggcacacagcaagaccctgtctcaaaaaaaaaaaaaaaaaaa

SEQ ID NO: 1331 - DNA, 1901 bp, Homo sapiens
ggtgcccacctaagggctaaggcctcttgctggtgcacatgacatttgtcctgcagagctggggggaaggcgatgtggtgaccccacccccacccgttaatttaaagctgtttctaaacagttgagtttcttctaaagaggaagccttgcccagcaaggaccagtgagacagccggatcttggagacaattacaagacggggagtgagactcctgattgctctggaagcctgctgatttctacaactgatcatttgcagctgctggttttggtttccaccttaccctactggctgtaaaaacacaaatgtgtactttattgattttctttctaattctcccgcattggtggcttgggacttgggagagggagcaagccttcctccatggcccatcactcggctgtggagaacaaagaccaatgtgaagacactacagaggattctgtcttccaggcccagtccactggggagtgctggaatggggacctggggtggggaggcagagggtcactttacataggattaagttcgaggtggctaccgatttcagcacatgcactactgaaatttacacaaaaagaaagctgtgaaattgaagtcccaatttaagagtcctgaggcagaacctggtggctggaggcattcccagaggtggggaagagagcctgcccggccggagaacatctgccttgctgcacctgaggcccagcagagccgttcctgggactgtcagataatcggtgcagcggtggaaggagcctgcggctgctggcacagacttcacacagcacctcctctctgctgggtttccacacagcctgtcttcagatcctgctgccgcgtgcgaccagaggtgggaggcccctggtggcatggaagagggagggtcagtgccaagtctcaggaggagggcgcatgtgtgtatcaccctcagctggcggaacctggctgcgaactgtgcagttacgttgcatccacaggattccagttgygtgtctgtttccttctctttctccgtatttatttttttattcttcggaggaggtggacatttcggaagtggtggggactaagggaagaactctctagttccctcagtgtgaagcctgtcgtgttctctccccttgcactggtcatcagtattgtgtaaaggaacaactgatatacttgagtgtgcaagcaaagaacccatttgccatgctgctatgaagactacttttagatcaacaataaaaaaaaacctacaaaaaaacctttattctttaattgttgcttttacggtgatattgtgcatgcaaaccaggagcattttgtgtcttaagaaaaataatcttagaacagatggctgtgaaaattacacccatgcacagaacaagccacaggaataatagttcaggatttggtttttctctttttcttgtaaacctggagggttgatatattctttccatgcagttattagaacttagttttgttccaacagttaaacttgcaatgaaaagaaaatgtgccatttttttcactcagaattattcatagctgtatatttgaaactgctaattacacacgtgtgatgtatgttggttttttagtgcaatttcttctgtagctattctttgaccaaactgtgggtattgttaatattaatttatatttgtctcattttgtatgtatgtgtagtgtgtttgtgagtatgtgtggtttataatctgacaaagtcatgaagctcagtttggctgtaatttaattccccttcccttatttttatttatttttgtactgtgctgattcaataaaatgcactgaccatccaaaaaaaaaacacaacaaaaacaaaagcagaaatactatatgtctacattttaaaatcagaattagtatatatacttacacacatact

SEQ ID NO: 1332 - DNA, 1901 bp, Homo sapiens; identical to SEQ ID NO: 1331

SEQ ID NO: 1333 - DNA, 1901 bp, Homo sapiens; identical to SEQ ID NO: 1331

SEQ ID NO: 1334 - DNA, 1177 bp, Homo sapiens
ggtcgaatcatatgatctcctaaaagctgttcacattgttcagttcatttttatattaaaacttgggactgcattttttatggttttgtttcaaaagccattttcttctgggaaaactattaccaaacaccagtggatcaaaatatttaaacatgcagttgctgggtgtattatttcactcttgtggttttttggcctcactctttgtggaccactaaggtaaataaaaatgcatattttgaatgtgtgtttgtatttcttcattttgaatattatttttgttccactgtgttttacgtcaaatatttatctgtacaaatgtgtctagcacttttatagcatcagagagaattcaacagatagaacaaacctgtttagtttctggactagttctttagtgaataccattaatatatttattcatgatttgtcatagatattttactagttagaattccaagtttcagaaaatttttagcataaacggctttttaatcatttattcatgatccctgttaacagcttagaagctataataaaaggtctgaagtggtaaataaaattagccaataagaaggagaacaaaaatctctaaaagcactcattttttgcacaattttgcaaatactctcataaataaatgtctcagaagtagtatatcaattatcagattaaatgcgtggtggataaagtaaactactcccatttcatatttccctagatctatatagattagtctttttctgcaagtggactggtttaaggaggaaatgcttagggaccattgataggaattgtatcatgcagctgtgtatgagcattcttttaacatttccccatctgtaaaggattttacttagtgaataagtgtaagaaaaaatgccttgccgtgagaatgagaggtaaggagtgaaatgaagaatgttcttggccagcactgtggctcacgcctgtaatgctagcactttgggaggccaaggggtggatcatttgaagttacgagttggagaccaccctagccaacatagcaaaaccccgcctttattaaaaaatatacaaaaattagccagaaatcacttgaactcaggaggcgaaggttgcagtgagccgagatcacgccactgcactgcaggctgggcaacagagcgagatccgtctcaaaaaaaaaaaaaaaaaa

SEQ ID NO: 1335 - DNA, 1731 bp, Homo sapiens
  misc_feature (1657)..(1657): n equals a,t,g, or c
ggacactgtaaattctgcaatctctcagcacttgagtgcaccaaacgagtgaatgctgaactcacttgcatcccttcatgtttctgtttgtggattataaggatgatgaaatgtgaaagtctcccaacactctgagggtggtgaacgattgccacccgtttgattttaatgtgctgctgcatgagactgcattgttgctaatggccagtgtacccagatgtgaagtgtggtaggctggttcatatgtggaggtgggtgtgtgaagctagacacgaaggtccctaaggttctgaagagacttgaactgtggaaatgctcttagcaggcatcccgaacccctgcttcggtgctgttttgaggagtaggatcttggagttcagaccaactatgactatcatttccttcactatctagaaaaacgctattctactttggaagagaatagtagttattttcaagtctcctgacagtcactgggagtacaaggtttgctaatgtgctctctggacgttattaatggccagtattagttgctgctgtattactgactcgcttagctgtagaaagggtaatactctcctgattttgtatgattggactcttaagtagctgctgttagtcagaattaaaacccatctcagactaagaatataatgaataagattaataggccaaaatatgtatctaatcacattgataaaaattaatataactgacacaataaaacacatttcccccatctgtacaataaatacagcttcaaattcagtggagtctgtagggcagataactttaatcatcactactgtagtcagtataagaaatgctgaaaaaaatccaggagggcttgtctctttgtgggtggtcactgtgatgttgggccagctcctgttcaggtccagagctgctaacgtgggttctactcagtcccagtgacttggccagaatagagctttgccaggtaactgccctgtgctaggtgaaaggggaaaagcagtagctggatatatttcaaatgaggttttgaacaagttcagaaagtggaacttgattgaaaagtgaacaagtgtagtagtgtgtgagaaaattcagatggtgtcggatgcagaagttaatattccacttaatgttatctgagcattaaaaatcatcagcatttaactgagaccccactatagagtttccttatcaagactttttggttttaaagttgtttttaatgcattgcaagttacaatagctattttgcttttagatttttcccagcactttgtatttattagctttcattaacttgcctccagtatacattccacttcgtgcttttcttaggtcatttctacatcccttattccttgttttcctgcagtgtaatggccctgaatgtcctctgagccttcagctccattatggacccaaactagactatacttggataagttaagctcttcttcgtgtactggtctataattagaaaaactgttttaaattagatgttcccattatttatttaaacagctttttgctgagaaagcttagtggattaatgaggcagagggtgttttgaaatccaataaatagttcccacaggctgggtgtggtggcttatgcctgtaaatcccagcactttccggaggccgaggtgggtggatcatgnaggtcaataaaattggaggaccatcctggccaacatggtgaaacccatctctactaaaaacacaaaaatttagc

SEQ ID NO: 1336 - DNA, 1098 bp, Homo sapiens
atacactgagcaactgcacaatgaggaggagaatgaggatgctcgctctatggcagcagctgctgcatccctcgggggaccccgagcaaacacagtcctggagcgtgtggaaggtgcccagcagcggtggaagctgcaggtgcaggagcagcggaacacagtcttcgatcggcacaagatgctcagctagatgggctggtgtggttgggtcaaggccccaacaccatggctgccagcttccaggctggacaaagcagggggctacttctcccttccctcggttccagtcttccctttaaaagcctgtggcatttttcctccttctccctaactttagaaatgttgtacttggctattttgattagggaagagggatgtggtctctgatctctgttgtcttcttgggtctttggggttgaagggagggggaaggcaggccagaagggaatggagacattcgaggcggcctcaggagtggatgcgatctgtctctcctggctccactcttgccgccttccagctctgagtcttgggaatgttgttacccttggaagataaagctgggtcttcaggaactcagtgtctgggaggaaagcatggcccagcattcagcatgtgttcctttctgcagtggttcttatcaccacctcccttccagccccagcgcctcagccccagccccagctccagccctgaggacagctctgatgggagagctgggccccctgagcccactgggtcttcagggtgcactggaagctggtgttcgctgtcccctgtgcacttctcgcactggggcatggagtgcccatgcatactctgctgccggtcccctcacctgcacttgaggggtctgggcagtccctcctctccccagtgtccacagtcactgagccagacggtcggttggaacatgagactcgaggctgagcgtggatctgaacaccacagcccctgtacttgggttgcctcttgtccctgaacttcgttgtaccagtgcatggagagaaaattttgtcctcttgtcttagagttgtgtgtaaatcaaggaagccatcattaaattgttttatttctctcaaaaaaaaaaaaaaaaaa

SEQ ID NO: 1337 - DNA, 1122 bp, Homo sapiens
ggcacgaggagagcttcacctgtccccctgagccccctggccccttcctcagcagccctttgcggactctcaaccagctgccaagccagcccttcactggccccttcatggctgtgctctttgccaaactcgagaacatgctgcagaactccgtctatgtcaacttcctgctgacggggctggtggcccagctggcctgtcacccccagcccctgctccgctctttcctgctcaacaccaacatggtcttccagcccagtgtcaagtccctgctgcaggtgctgggctctgtgaagaataagattgagaactttgcggcttcccaggaggacttcccagcactgctgtccaaagccaagaagtacctcattgcccgtggcaagttggactgggctgagggccctgcagcaggacctgccccacgccgttctgatcccctagaaccctaaaggagaagtccaagaacctagggggttgggggaatctcccctctcacgtccaatggaggttccctgatcccagcaccttcatgatacccctgtttattcccagtagaagaccggaagccatccttgggggagttactcctgcggcatgcacacagtccaaccagggcccggcaggcggcacaattggtccttcagcctgggcgagacggagcaggacttggcctaagtgggggctcccctggggcttcaactccagttctactcacccggggcggggcccctgaacgccaaggtgaggctcttcgagtcaagaatgctgtctactgtgcagtcattttccctgaatttctcaaggagttggctgccatctcccaggctcatgccgtcacctcgcctttcttgttggagacttcaaggaaggatctggccctctcatctcaggctgtgggcccctcaatccttaactttcttccatggacaatcagggccatgggtggcccgggctggggctagggcacaggctcctttttatgtttggaggcagtggcaaaaggactttttaatttatttcagatgaatgttttatggagaacttgttgcaatatgtataaaagggaaatctctaaaaaaaaaaaaaaaaaaaaaaaaaaaaaaaaaaaaaaaaaaaaaaaaa

SEQ ID NO: 1338 - DNA, 829 bp, Homo sapiens
  misc_feature (8)..(8): n equals a,t,g, or c
  misc_feature (20)..(20): n equals a,t,g, or c
  misc_feature (45)..(45): n equals a,t,g, or c
  misc_feature (826)..(826): n equals a,t,g, or c
cccgagcncaaccgattcantgagccgaggaaccggaagagcccnaatrcgcaaaccgctttccccgcscgttggccsgattcattaatgcagctggcacgacaggtttcccgactggaaagcgggcagtgagcgaacgcaattaatgkgagtagctcactcattaggcaccccaggctttacactttatgcttccggctcgtatgttgtgtggaattgtgagcggataacaatttcacacaggaaacagctatgaccatgattacgccaagcgcgcaattaaccctcactaaagggaacaaaagctggagctccaccgcggtggcggccgctctagaactagtggatcccccgggctgcaggatatctactttggagaaggagataatataattgaaaggagctagaggaatgtataatgtttaccattaacactatcctttatttacagccccatgggggaaattccctttatacccaggagccatgtcttaccaggtaagaagccagattgaactggagggacattcttccagtcctcttagtaacataaactcctgggatgtggtccaagtttgacctgtcattaaaaattccatactccagtgggttagaagctagattccaatgaaggcggttggttttgtttttctatttacaaccattcttagtcacattcttctctgggcttttgttgtatactttaaaaaaactgtttgatgtgcaatttgttacctgtaactttctaaatgaataaaagaagattgaaaaaataaaaaaaaaaaaaaaaaaaaaaaaactcggggggggcccggtacccaattcnccc

SEQ ID NO: 1339 - DNA, 1227 bp, Homo sapiens
ccgggcgggggccgcggaagctgcgatgcggacagggcagcggcggtgacccgagctgccgcccgacatgaactcgctggagcaggcggaagatctcaaggcttttgagaggagacttactgaatatattcattgtttgcaacctgctactggacgctggagaatgcttcttatagtggtatctgtctgtacagctactggtgcctggaactggttaatagaccctgagacacaaaaggtgtccttcttcacatcattatggaatcacccatttttcaccattagctgtatcactctaataggcttgttctttgctggaatacacaagagagtagttgcaccatcaattatagctgctcgatgtcgaacggtattagcagaatacaatatgtcttgtgatgatacaggaaaactaattttgaaacctaggcctcatgttcaatgacaatcttcactcattgttatgggacttaaaatagcctttcttcgaataagtgatacagcaaaaagccataaaggattccttttgcggttggatatgtaaaggtcatagcagcaactgacaagaagtgtgcaatatttacctggattatcttgatgatggtgactcattatcagtgctttggtacttttgattacctgtgtttcagtattagtgtcactttagtacttcagatcctgcaaatatttttgcagatgaagtatgtatgtatgttactaagttaaacttagaaacagaacctcattcagtttttataatgtatttttgcaaactactgtaaatagcaaatcaatgccaatgttaaacaaagaggaaaacgttgtgtggactttgttctcttgcaccggtatttcaggaacatctgcttgccatccccacagctctttaaaactggcttattatgtgtgcctttcattcttacatttctaatcatactgcaggaaaaacattggattcagcttagactgaggaaaactctccattatgttgtaagaaattatagatgttttgagagacactttttgttaaaccagatattgaactccagcaactattgtggttatatttttagttcattgttctcatttaatgctaaatatcctttatattgctttaataattttcttttttttttttttttttttagacggagtctcgctctgttgccaggctggagggcagtggcaacagagcgagactccgtctaaaaaaaaaaaaaaaaaaaa

SEQ ID NO: 1340 - DNA, 1513 bp, Homo sapiens
ggcacgagcttcgacattaccaagttccgttccaacaagcaataccgcatctgtctcaaaaccctcaaggaagagtttcagcaggacatgtcccgccgctacggctttgctgccctgaaatatctcacagccgagaacaacagctagcaccaagaagcccaccactagggggagacatgctgtaggggaagtgccactcgctgtttggggcccggccttcaaattcaaaattgagccatgctttttcggtttgtttttatttatctctttggcccagccaagctgccctcactacagagaccttggacaaggatccagccagtccctctctgccccacaaccctgcattcccagaggttagctatgcagcccacctagatgagtctcttcaagaatgggaaatcaaggggtgacagggagtaaaagggttatcatcttactgcaaagccacaagatcagggcagggctttaggatgttctggatgctttttaataattatgcttcccatcataactggggagaaagggaagtcagggttctaggggttattcgtcccaggaaatagaagtgaaattgtctttattaagtgaaaactttcccctttgccctgcaatgtagctgggcattcaaacggagggcaaaccgatgatctaaaccaaccacttggaaaaacccaatggggacattgtaaccagagggtcctggaggtggggttgatgggtttccttatccccaaagtcactcctgttttgttttgtttttctttgggggttttgtttatttttggggctggcaatccaaaataaaaatctgatcctttgaggctctaaaggaaaatcagctgcctctaccaaccaccctctatcaacagtggcccaggaaggaggtcaagcatcttcggccgatatttaaacatgggcagcttccttcaggatgatcaccgaggctcccgtgactttgaactccctactctccagaatccaggggctatagcgatggggactgcggaattacgagggctggctgttttacaccggtcacattttctattggcagtgactgattcatgggaaagggctttgaaggaaactacttcaggtgcacacacaaggtacgaacctctcaggcctttcgaagaactttcataattcatgaaagcccagttctgaagatttcacgtatccatctggagacctacaggaagaaagtgattgggttcctctggttctttgcctgcttcactgtggatgggaagaggtgacaacctcagtctccctttgggacctgtccaagggtaggcaaccaccttcaccttcacacagattgaggagacactggactttttacccattttctttaatcttcaatattaatattgtgtttacattgatgagaacaagagttaatgccctaccctctgctgggctgtttgtattgagttgcaatgtgaccagcgaaagctgcatttaataaatgaaagtacagactgttaaaaaaaaaaaaaaaaaaaaa

SEQ ID NO: 1341 - DNA, 650 bp, Homo sapiens
cggcacgagtccaccagggctggaaaggttacttcaaaatgaatgtggccaggcagaataatgacagtgactgtggtgcttttgtgttgcagtactgcaagcatctggccctgtctcagccattcagcttcacccagcaggacatgcccaaacttcgtcggcagatctacaaggagctgtgtcactgcaaactcactgtgtgagcctcgtaccccagaccccaagcccataaatgggaagggagacatgggagtcccttcccaagaaactccagttcctttcctctcttgcctcttcccactcacttccctttggtttttcatatttaaatgtttcaatttctgtatttttttttctttgagagaatacttgttgatttctgatgtgcagggggtggctacagaaaagcccctttcttcctctgtttgcaggggagtgtggccctgtggcctgggtggagcagtcatcctcccccttccccgtgcagggagcaggaaatcagtgctgggggtggtgggcggacaataggatcactgcctgccagatcttcaaactttatatatatatatatatatatatatatataaatgccacggtcctgctctggtcaataaaggatcctttgttgataaaaaaaaaaaaaaaaaaaa

SEQ ID NO: 1342 - DNA, 3652 bp, Homo sapiens
  misc_feature (306)..(306): n equals a,t,g, or c
  misc_feature (1412)..(1412): n equals a,t,g, or c
  misc_feature (1519)..(1519): n equals a,t,g, or c
  misc_feature (2101)..(2102): n equals a,t,g, or c
acgagctgatgtctcccggaggaatctgcaattgcataatttagttggttgcttgtctactgtctctctctttggcaagaatgaaagctctatgagcaaacagaccttgtctgccttatgatccattttattactagagcctaggactgttaaattcattaataaagtctttccatcactttttgttctttatattcctttactcaattgatattcagcatgtgcagaacagttcttttccaaggctgcataaaagttttggaatgaggcacataaataatatccttctaccaataaatgctatcngttataaaatagtttttattttataatcactgaatatgtcaaaactttacagttcaggccttttgaatcaaatgcaaaatcaaatatgaaaaggttaatgatcttgtccactaaaattgtagtttgccatacaggaaaatagactcttaaaaatgataaaaaaaaaaaaatcattcttaaggaaacatattaataagacatttaaaaaggctaagatctttaatgtgaaaaataataagataaagatgacaaccactgaagagaagaaaaaacgttttatgttttttctaaatgtgtgtaaaaacaaaatcttgtacctaccaaaatgacacttttttcaaagaaaggtatcaaatgtgtatactttaacacacagcccttccttgtgtaaatatataggaaatccttaaaggagcataaaacaatttacttagaaattctatacttaaacttattcaaaggaaataattaaaggtgtgtaaataagatatgcatagcattgctctaaatgtcaaatagtagggaactaggtaaataagatatatctatttagggaattagtcaagtaagatatacctatttagctaattccatgtagccatcaaaaggataccatagaacagaacttattgatgtgaaaagatgattaaaatgtacttgttactaaaaacagcaggctgcaatactgtattaaataatgagcccatgctgtatatctagacaaacatatatcataatgataataataaatgtatgagacttatatttttgcttctctgtattttctaatttgtctgtgataaacaaatattattaatgtaatgaagaataagctaaaatatacaaaaacaataacaactataaaaagaaccccttcaatcaaaaagagatcatcagggatttaattcaactatggattggcactattaggaggccaaatatgattcgttgaactgaactgtagtaaagacaagatattaggaaaatgtttaaattatgtgagaactattctcaagcactttaaagatctatttgcaagataacaatgtgctaactttaagtaatgtctatgtattcttgagaccagctttgacaatgacagctgncattccatttgacttggacttacattatgttttgtctatattttcaaaaacagaacccagggactgattcttacaagcattttcttaaagattcactgggtggctgnaaatctgatcaagctgttctttgggagatcattattcaacacttatcacatactttatttctacagctatgactgtcactccccaagcttcacttcataatgaaaataaagaatacagcccttttggaaaagttggatggtaataccaagtgcgtaagtttttagtacatgccatatcacaaccttctacgtggctgacttttgactttttcatttcttttataactgacagaagacacaaaggcaaaaatgtcaacttcacaaaaaatcttagtgctttttggaaagaatgttatagatcatccagtctaaccccctgatgttataaatatggaaatttaggcctagaaaataggtaagtgatgaatcaaactagaagcaggtgtcctgcctctaagcccaatccagttgccatcatcatttactatttacatggaacatcaggttctactttagaagttaactatcaacctacagggttaaggaaaatagcaatgtgtatatacagaccttgcatctggtagctgtatggtgcctgtccaggttgaggggtactgaagcttgtgccatagctgagaaatnntgtctgtccaggtgactgagactgtgacaatccaccttcagtcttgatgcctgcccacaatgcacctaaatcagttagtgatagcttatctatctgtccattttcaaaagctggtaaatatacaaaaacatacacttccacaaccgtttaactacaaatgcttccccaatcttatctcaaaaataaagggtatacatgcattcagtgaaataccataaagtacaacttcagttttttaaatccaggattacagatttgaatgtctattcacattattctctcttgttttattgcacttcaagacatatcccttctataaaatgtaactccagtgatatattttcatacttaattttgttgttttaattatgtaagagttgaagatcatctccttcacagtaaagaaatagccataattaaattttagctaaatgttcccaaagttgctatattgactagtgttaaaaataaaatccttttttatattaaaaatattaattagatcctataccatcacagtatttttccctcctttactctttctactacaaagctgatttcagtaccaactcattttgaagtccaaagaagcaatactgggcacagaactaaacaacatggtggaaaggcttttcctgaatatctaggtcctatcagaaaataagcacaaaggaagcagaacactaatgagctgaatcttataaaacagcagtgatttataaacaagtgaggttgaccagcagtttccttttgtccctgttagtgtgaaatatttgactataattgttttcgatgtagtctaaagtacctttgtttttatcatatgataatataaaaatgatgtatctgtggcccccaaatacttccccaaacaccaggctaacatcgtaattttgggacttggatttggcagcactgaggtatggggctcagctctgtctttaattaattacaattaaagacagtcatacatgttaacaactctccttcattctcacagagggagggaagaaaaatttctgccgagggaattcacattttttaataattttgcttcgtacttaagataaatgatatctttaggatctagaatacacagtagtcttactgtttatttccattttaggggaatctcatcagcagagtacagctaggtaattgttttaaggcagtgggagaatctgactcttggctgagagtgcctactttaattcctgcagtatctctaaataacttcataatgaccttaacatttaagtcttaacacaaccttaacattttaaaaatgtgattttccctgtaaaggtgatcccaaaccaatgaataacccacacatagaaatggtccctggaaatacacctgccccagacaggtggcatgatggctttagaaaatccctttctttccatgttgtcacccctagggattttccacctcttgctgcatttgagactatactgatctgcttccagccttcacctataccaataaaataccaataattcatgtattttttttttttgagacggagtctcgctctgtcacccagg

SEQ ID NO: 1343 - DNA, 814 bp, Homo sapiens
ccacgcgtccgccgggcgggcgcaggcgcgggctccggcgccgccgctgcgtcctccccggccgcgggcgagccgctgcagagggagcgtcgcgccggggcggagtgcgggcttgcgcggcaagtgcgcgccgaggtcacgaaatggattggagtgaaccggagaccccgaaaacggaagcgcagggagaaggaagaggtgtttgcagaggttcgccatcggtggtgtgaactcattgttaagcacaagttcacgaaagcctacaaaagtgtggagaggttccttcaggaggatcaggaaagaccacagcaagattctttcattcgtctcctcctagcctgggggaccaggctcgaactgaccctggacatcaaaggagggattatgtggctgctaaagccatcggcccacagccctgttcacgtcttggtgcttctctttcccagaggctggtcccagccaggcacacacaaaaggcagattctcgtaaacgcagcctccctccctggaggctgcctcctgccctggatctggagtggagctgctctgagattttgagttcttctgcagagatgattaaatatatccaagagacattggaaaacctgctgaacattttacattggtctgctcagcacatggctggatgcggatatttctataattccagaaagtcacacagctcctctgtatgagaccagtgggcgccatttaaaagaacaggatgagaatctaagatatattattaataaatgtaatggattttttttttgtaaaaaaaaaaaaaaaaaaaaaaaaaaaaaaaaaaaaaaaa

SEQ ID NO: 1344 - DNA, 1059 bp, Homo sapiens
ggcacgagatcaagtgaggggggcctcccgggaggcccaggggagcccacaagccaggcgtggtgccaataccctcatcccttccaccagccagcttccagaagaggccttgctgggaaacaggctggacagccacgactgggttttcctccctggcctgctctggggagtggttctttactgtggcctcacagcctctggcctcctcactgggcaccagtcaggatatctgcctacggctgtgtctctgtgccaggcacaggctgggagctggggcactgaggctccggaggctgtggcgaggctctgagacacgggggccagcaggcggtagcctctgtgtcagcagacactgcagcccttcccaccccggtggcagcctggagtgggtgctacagcttccctcatgggtgaggagcgaggcagggaggtgagggaggctcggaatctctgctgagctcacactccttgccctgtaatgtgcaagaacctgccccgccccgcagccctcgtgccccagcccttctgcctctgctctgctttgcaggctcgagtacttgcaccagaagcagacaaagtctccagtgagctggagaggcaagccctggagaagcagggcagggaagccgagaaggagatccacccgtgtgtctggaagggactgcgggaccattccttccatcctctttatttcctgaggtccagagaaggaaggagacttagcagccacagagcaagaccccaatctcctgactgcactggcctgactgccccctcccaggggatgttaatgaaatgaaggaagtgggccctttgagtcaggaaaccagggccagttctttttcaggagttaaatgtttacccatttccaaggttgcgttttgggaggggacatgggttctctccttcctgctatttaggcattctccaggttcgagagccactgcattttgtttaaacacagatagcacgggcctttctcttattgctacagtgttttgtacacggttaaaacactagtaaagctttttcgttattaaaaaaaaaaaaaaaaaaaaa

SEQ ID NO: 1345 - DNA, 968 bp, Homo sapiens
  misc_feature (928)..(928): n equals a,t,g, or c
  misc_feature (961)..(961): n equals a,t,g, or c
  misc_feature (963)..(963): n equals a,t,g, or c
cctggaaaagcgcctcctccgccgctcccgctcgggggacgtgctggccaagaaccctgtggtgcgctccaagagctacaacacgcctctgctgaaccccgtgcaggagcacaggcggagggcgcggcggccggcggtaccagcatccgcagcactctgtgtcggagatgacgtcctgccccgagcctcagggcttctccgacccgcccggccagggccccaccggggaccttcaggtctkccccggcgccccactcarggccctgccccagcagactgtaccccacgacccagccccctgagcagggcttggatcccacccgcagctccctgccccgctccagcccggagaacctggtggaccagatcctggagtccgtggactcggattctgaagggattttcattgactttggccggggccggggctctggcatgtccgacttggagggctctgggggccggcagagtgtcgtgtgaggcctcacagctggccttgagtttttactgacacgtccctgtgtgcgggggtgtccatgtggcgtgtgtgtgagtgagacttttttactgcgtcccgtcccgccagccctatcggcctcgtcactggccttggtcactttgtatttctgtcttggttggaaataccatcagccttccttgctcggcccaggtctgtttcaggcatctgagtcggcgtttacccaggggccgggccagagacgggggtcggccgctcgctcccacgctcctcctgccccagccctctggtgtccacacctgcccacagagaatgtaaacccagtgggctctgcccacgccgggccccaaagtgaccagactccagcacacctgtctcctcctgcctggggtggccatggggatggaagggggtggaataaaacctgtcaacctggctcatgtcttgcangtgcctgccctgggggcgcccctttcagggtgntnaccct

SEQ ID NO: 1346 - DNA, 990 bp, Homo sapiens
ttaagacacgcgtcccaggtgtggatgtgtgggtgcttaagacagcagactgctgctttgctgggccaggcctgggtttatttattacaagcagttcaggaagcacagacatcacgttgttcacttgcttcactgatgaatgtaataattgttctcgttcatgccctttgcccctggtgtcggggctgtccacactggggaccattggtgcccccatgattattagctccctgaagcctggtgggtcgtcagggcttctgtccggtgtttaaagacccatcccagacaagcccaaaccacctcagtttgaagagacatagagggacaggcagacggggcctcagagggatccagcctcatccagcctcccggcaacctcaggagagcaggccagatggggcctcagagggatccagcctcatccagcctcccggcaacctcaggctggttcccttccagtgccgactccacagccctgctggttcccttccagtgccgactcccaggctgagtcgctttgcagcgtttgggacgtacgcagggcctgtgctgtgggccagccacttagtgcacttcctgagctcagaaacacgcagtggttcagcactgagtcatgcttgcttctctacgcactgatttgttctattccagttttcacgtacatcgttttggtgacatctctgcgttatcatttatttatatggagtgtattttctccaaaacttctctacgagggaatgcacctgctcattacagctgctgtctgtgtattcttcacggcaatggatcaaaccagactcacacagtcttagactaagctgaacactggaaaaataatacatgcttaaagtctgctgttattctaaaatgaaagatatgaattcaacaaagttgatggataactttctttgactgctctacctgaatttagactaagcagtaaatagtttaataaaagatcactttaatataaaaaaaaaaaaaaaaaaa

SEQ ID NO: 1347 - DNA, 968 bp, Homo sapiens
aaaatgtgcagaaaagggaacatgtgttgctgtgactttaaaatgttttttcctgatgaatatatcagaaagtaacatggcattctcatttcatgcaggtgcagactactgtactgttgttgcaggctgactttttcagagtgagggctccttgtggggagctgcgagctgccagcatcagggcaaagccatggtgactttgaagccttcctacttgacttgagtgagatgtggcgaggattctgggggcttagagagggcagcctggagaagccagagttaagctcagaacaagaggtgcaggaagagccacagcagggaagggaagagagatcccagaggaggggcagagtgtggcaggacaagggccctgccgtacatgcccaattacagggcctcgaaagagtcctgtattgttatttttcgtcactacctccccgggtcgggagtgggtaatttgcgcgcctgctgccttccttggatgtggtagccgtttctcaggctccctctccggaatcgaaccctgattccccgtcacccgtggtcaccatggtaggcacggcgactaccatcgaaagttgatagggcagacgttcgaatgggtcgtcgccgccacggggggcgtgcgatcggcccgaggttatctagagtcaccaaagccgccggcgcccgccccccggccggggccggagaggggctgaccgggttggttttgatctgataaatgcacgcatcccccccgcgaagggggtcagcgcccgtcggcatgtattagctctagaattaccacagttatccaagtaggagaggagcgagcgaccaaaggaaccataactgatttaatgagccattcgcagtttcactgtaccggccgtgcgtacttagacatgcatggcttaatctttgagacaagcatatgctactggcctcgtgccgaattcgatatcaagcttatcgataccgtcgac

SEQ ID NO: 1348 - DNA, 818 bp, Homo sapiens
  misc_feature (595)..(595): n equals a,t,g, or c
gaattcggcacgagctgatgtccacagggtggcgctcaatcacgttcaggaagcgcgcctcggggactgcgatggcacagatcacgtggatccacctcctatcggtggtcatctgcagcgcacctcctcgcaggttgcacaggcagcactccgcagtccaggcgtgggccgcgcaccgggaacacgtccagccttcattgaccagctcgggacggatgccatagcaactggcatggacctgcaggcagcacttgccgcagggatcagggggctggtcccgtcgtcgccgatgtaggagttggcaggcagcggctccgtgttctcaccgccakaggtgaagcacatctcagggatgagcggtcgggtcttctgacggcttttggagggtaatgtggccgggcagccctctccgagggaggctatgggtgcctccttctcagtctgtagggcctggcagtaggggtagaagagcgtgcagatggcgcagtagggctccgtgcgcgcascgctgcgttgaacttcctctcggsctggaagctggccgccctgttcttccactgcagagacagcagcggcctcaaggcgtccgggtcantcacatcttcctccccggagaaaggggatkcctcctcgtcacttgaggcctcctgcttcamcaccgacagtggggaccgggtgggcggccggcccaggggatggcgccggctcttcttgatctccatcttcaatttggaaaatgtggamggtgcctgcccctctccgrcccgggctttggtctccatgcgacctgccccactgctggctgcaccgtcctctgg

SEQ ID NO: 1349 - DNA, 1134 bp, Homo sapiens
cggcacgaggaggaaccccaacccagctagtcccctaggggctggaggccaggggcagactgagaaggggggcatgggtggtaggggagggaggaaagaccacccaccaaaataaacaggcagatccaaacatttatacaggaaacatctggctgaacggaagaggatcttggggakatgagaagccccccacatttcattttttttttcctaaaatgtcctggactgggttggggaggtcagccacctggggtttaaggggcaatcccctccccacaccgacgtgctgaggagcagatgtgtgtgagacagacacaaggggcaaagataaggacaagagggtgccttctccttggaatctgttatgagggctgagggtgtccccgtccagttcctggactctgggggatcttgggtgagatgggggccggaatgggctggggcaggggtgaggctgggcgctcagcctaagaagccatcggggtcatcatcctcaaagtggccttgctgaagcaccttgatgtggtgttcgtagattttcagggctggcccgaggcggatggacaggccggtgagcacatctgtgcgctgcatgagcagcaaagatttgccatcaatttcctgctcttggaaagctgtcgcctgctccgggaatccagcctcagtaaaatattcgacgacatccatcacggtccactcgacgggatccgatggcttctctttgcgcccgggaggacagccaaagggggacccgtcggccccaggtagggctggtttgcctgggggcaaaggcacgggggacggggagtctggcccggtggcaacagaagctgttcccccttccttgttcatggctgccatggagaacacctggcgggtgccgctgcccggggctggcccccgcccttcatcctggccctggagggcagattgcttgagcccaggagtttgagaccagcctgggcaacacagtgagacccctgcttctacacacacaccaaattagccaggtgtggtggtgcacatctgtagtcccagctacttgggaggctgaggtgagagaatcatttgagccctgaagctcaagacctcgtgccgaattcgatatcaagcttatcgataccgtcgacctcg

SEQ ID NO: 1350 - DNA, 1643 bp, Homo sapiens
ggcacgagcgcacattcatgtagcgcatgtgtgtgttcgtgcatatggtgtgtgcatgggtgttcgtatctgtggggtacaggcatcatgcacgtgtgttcatctgtgtggggtgtgggtatacctggactgtggcctgaggctcccctacaggacactgctcctgccgcctccccaggggataacaggaccctgctcctcttgctaaagccagtttgggagcacccccacccaggcaccccacgccagccaggctcgcctctgaccagatggctgaaggagcaggtagagcaggaagtgggagccagtgacccaggttcccctggtggccaggcttggtggcccatgtccatggagtcccccacctgccaacgacctccggccatgcctcctgggtaccaggccacccatgggcgggggtgggggtaactcccagctgactcgctgcctagctggcaccaatgaggtctccacctcagcctgggctgagtgtctagtgctgactccttcctacaggcaggtgagcttgggaggcaggggccctgtggacttgggaagcgggctcagggtctggaggccagaggtcttgtccccaggcccagcatcccatcagcaagagcccaggaggctctcagggcagtcctcctctagcaatctcaggggcagcgtcctcccaggagtcacatccagatcaccatacgcacccgctggcccctagcatgttccataagtggagaggggttggcctgtggaggcaggggcggccagaagatgtgccggaaccccatctagaggctgacacgtaaacccagatggcacaggggagcctgagcatgaagtggctggcctctcccttgcgggggcccagcaactgccgaccccatgtgccaagccccgcctgcccactggaacgcctcaacaggctgctccctgtggttggtgacaccaccactcgggtcggcttggctgaggccagcggagcatctcccctctgggtccattcacatccatcttccccggacaaatgaacaccccccaaacactcacttcccactttgaccccagaccaaacacacagccactcctggaatgccggtgattgagggtggctgggcccttctgtgcccacaaaccagggcctgggctatacctgtgtggctgcacaactgtgccaggacagccttacctttgccgggggcttcgtgccctcccagctgcgtgtgtccatggacggggggacctggtagatgtcatgccccatcccggcagaaggtggcacctggtaaatatcctgggcagggcctccaggccctgggggcacctggtacaggtctgtggccgggctgggaaacgggtgatggggtgtctgcttcgagaaggtggatgtctgcttggctgggggagactggaactgagggctgggacccgggacttggtagaggccttgctgagccttgctgggagtgggcaccaggtagacgctgtctggctggggctggtaggtgttggggagcatgggcgtgtactgggaggccggaggcgctggggcatggaggccaggctgaggctgggccggggtggcgggagggccggggccaggccctcgtgccgaattcgatatcaagcttatcgataccgtcgac

SEQ ID NO: 1351 - DNA, 2298 bp, Homo sapiens
ctagagcaaatttctctttctagaaggggagggtcacagggtcacagattcaccaaagctgaaagggctgaggagctcatggtagcctgggttgacctactctggagcacggtgtcttccttctaaactgagtgactgtagtactatctgtgcctctgatggtaataaaactgacaagatgtctaatttttttttaagtaggaccaaaggaaaacaagatttagatagtctgactttgcttttgaacaacagacattgcaagtcaaaattgttgtcaaatttacatatggtaaatgatgaactttaaaaatgtgtccaggtgttagatgagttcattagactcttttaatgctaatggctagtacgtttaaacaaaacagcagttctctgctgcaatattcccattgaccacttaaatgaccataagtggtcatttaagaacatgttagggttagccctgatctgaatataaaagtgagaaaagggctacagtgcatttcttggtaacttaaactgagtcttgaagttataatgatccattcgagttctgtgatccttattgttcttaattgtgtttctctacgtattgttacagatgagccatacgtttctttgtatcaatgtagacatgacttcagatacctctgaggacctacccagcagtctaggaccctgggccaagtgctgggactatggtactaaatccagtagatgggctgtgtagcaactctcccagggaacacactagggtacttagggaggtgctttgtggagcatgttgaagctttgagatctgagcaggaggcagtgatgtccctggtctattcagggaaagatttcagtgtgaaatggtaaacatccaattgacaggatttagattttgcttagtttttctgctttttaatgtttctatcccccatctcagtgttttctttatccatcccagtgatgccttatttgaaactgggcttaaactgcaaaaagaatgaagttggatttaggaagctgttagatcattgagtggtgttgagagtgaagtttcactagcagggaagtttccttgagcctaaaataaaaagaaaaaattaaaaagaatcagtttttttaattaaaaaaatagaaagctgttaggctcctaattcgtggggtttttttttgtaaaaacagtttagataatcctgaatgcaatcattaacttggttgctaattacaagaatgaaaattataatggaaaaggacaaaataatataccagctggtttgttattatagtccgtgtattaaaatactattgaaatacgttaaaggtaaatttttaaggtttaaaaaaaatttagtaacttacagggatggagaatttagatgtcagaggtggggagatttatttttataaggtaatttttatcctgataaggacttaaaaaaaagttttgcaactgaaattttaaagtaaacatgttaagtacagttaaaaagtaagcattgtagtaaatagtggattctctggtgtgtattttttatctcagtgttgaaaattggaaaagaatggactgaagtctaaaaactggaataatgaaggacactaaatgcctttattgtagatactatgtttgtaagtctatagctaagcaacttaagccaaaaaggtctttcaactgaagctttaatcaacttattttggagatgttctcttcccttatctcatgcgtcatccctaaaataataagatacatgggatcaaatagcccttgccttttcaacacaaatcagttggaaaattatggtttgagtcctgttgctgccatggcttctgtttctcagaaatgagtgtgtatgaacataccaatctatgtaataggctacctttttttgtcttctttggaactttgtacacaaaccaagacaatatcagggtgacaggtgaatgaacttaaattctcagtcttgtctattcaccaaaaaagtatactgcctgttttttctttaattattcaaggttgatgacttttaggaacatgttttatactgtattttttaattaaagcaagtgccttgatgtaattccatgtaaatcattgcttaaccctcttatgggatgaggatgagttattaatgtattgcagcctactggaaaggagggggagttggttaatagcagatacttttcttctagaagcttatgttttatgctgtttattatgtaagatcctgtatgtgtgttgagatttagaggtttcatttgttttgtctgctaataaattgttactctaataataaaaaaaaaaaaaaaaaactcgag

SEQ ID NO: 1352 - DNA, 1952 bp, Homo sapiens
ggtagaactcaagttgctgtgaacttttctcatccaaaagactcatttgtgtggatgcgtgaccatgggaaaaagaaaaaaaaaaagatccattttttaggttcttttcggtctccagctgacaacccaactggacaatgatctgtctggtgcaggagaaggcaaaagtttctacaagtctacatgaccttgctgatacttgttctaatagaaacccagtctgctgtgtcttcaacatactggtattttcattacaaagtatggtaaatttttgagttgtttgtttctgttttgtaaagagaatccttattggacaccagtgaaggtgtctctgttttaatgatcagggtttttattccatcttttgcatttcttctatttctgaaggtttgtctcttggcatctttttttagtttcttaccataagagtttgacccgaaactgctcacttcacattggatgacaccatgttcttcctctttgaaaagaaaaggggaatgtgtcccactagtgaaaggaaaacttttcaacactatccctgctttaatctcagcaaactcagactattctgcttagccttcattagtcatctgggtgtgagtgtgtcttgttctgtttttctttttaataaaacttttaaaccatatatttagcctgtgaccaggggggccaaaccctaagatttctggtaaacctgaagggtggccctcctcagacaatttatctcccagcaatgaccctactacactcgcgtactgtgaatttgggaggaggtaaagttgacttctcctcgtgggcagttttccaatcaccttgtgagtagacacctgccaatattgtttgaaacctttttttaatatgacatcctctcttgtcattctcttctcccctttcccacagacttccctcctactgggtccaggttcagaaccaagacttctgtacctagtgctgcctgattggtgaacattgacttcaagtagcatagcccttgtgtgactcacaactccgtgtccttcctaaagtttcgggaagcagggttgtctaatatgcacatttcttattttggtcatatttttactttagtgtcactcaccttttacaaagtgactttgtactcatttagggctctatcggaaatgcttccattttgccttttctacagttaggccaattttgaaatatataaattctatgcaacatttatgttgagttaccaatggaagccaaaagttctcttcccaaactgccaagaatgatacaggccataattgaaatgggaataccttttaagtttcattaggggtggggtgggagtgggacaggaacaagacttgcctagatctttgttgtatcttggggacttttactttgttgtttgatgcttaaacttcaaaattctctgtattcaaatttgattgtggcgaatctacttcaaaaaggaaaaataatccaactttgtggatattaaatggaaggtttgctgttttgatctagttgtttccagtggagcagttttatgaaatatgttctataagatgtacattttttcattgtaacatagaaattgtaaataattgattaaagtgctgcattttgatgaattttttctagccatttttaaagagaaaactaggaattgagtattttgtgtacggtatgtttccatcctccctccccttcctcctcccctcctctctctctcttcctacctatttaattttcatttgtcatgaggtttttggatttgccaatgatctgctggacatcatgccccatgtcatagagaataaagctgatgattgtaccagtcttaaattattcatgattcaataaaattgatgcttatttattcaaaaaaaaaaaaaaaaaaaaaaaaaaaaaaaaaaaaaaaaaaaaaaaaaaaaaaaaaaaaaaaaaaaaaaaaaaaaaaaaaaaaaaaaaaaaaaaaa

SEQ ID NO: 1353 - DNA, 1076 bp, Homo sapiens
  misc_feature (35)..(35): n equals a,t,g, or c
gacggctgcagaacatccgccgcaccgctgggggncaacgttgtcggaccgaggagtccgaggtggcgactgagtgagatacccagctgtgcggagctaggacgcggaacatcccagaggccagcatcaacatgctgccacctgcccaccaccaggcctttgtccgacatcgcctggaggaggccttccgtgtggcccttgttgggcaccgacatcccctgcctgtcctggcctatgtccgcctcacacaccggagatctgggaggttcctgtcccaggatgaccttgtgcagtccattggtgtgagtgcagcactaggggcagccggcgtggtgctctggggggacctgagcctctccagctctgaggaggagtgctggcatctccatgactacctggtggacaccttgggcccctatgtgatcaatgtgaccagggcagcgatggcctgcagtcaccagcggtgccatggccacgggcgctgtgcccggcgagatccaggacagatggaagcctttctacacctgtggccagacggcagccttggagattggaagtccttcagctgccactgttactggggctgggctggccccacctgccaggagcccaggcctgggcctaaagaagcagtataaagccagggcccctgccactgcctcttcttttccctgctgccacttttccagtcctggaactactctgtcccactcttgctctattcagtttacagtcaaccctcccaagcacacaccccgcttcccttggaatccctgaggggtagaaggggccagaaaaaacgcttataaaaccagaggccctctgagatcatgtgagtcctccatggcaaggaagcagttccagggagagtcaggttccagctagttagggctgccagcctagggctttgtgcctacacctcactaagcccatggagaggtcacagatgggccgtgcacgggcagatgggccccaaaaaatcttggcgaaggtcggtaaagtgctaagctgttgtctgcactctttcatcataaagtcacttttttccactaaaaaaaaaaaaaaaaaaactcgag

SEQ ID NO: 1354 - DNA, 561 bp, Homo sapiens
ggccattatggccggggtgattgccatttgtagaggggaaggaatcaagggactttaagctagatcaaaatctggggacaaattctcctgctaactgcaagttaaaataggcccttcttactgaatttccctgtttgtttctctgcagacaatgctttagccctactcttgggcccccaagttagcagagtaatcaaagcttcctaccgtttggcctactattccagactagtccctcgaggggttcccttccaaaatatgcagggctcaggctcccaattccgggcctgtctgctttgcttgtgtttctcctgtccctgttctcccggagggcccaggtggaactcacgacagggagggagacgcttcccaaaaacctgcagggctatttcccagaatttggttttcaagtacaaaactttttgtcctgtaagatatatgcagcctcacagaagcagcctctgcctccactttaccagctacgtttttatcttaagcacatggggctcccttagaacttactccactgatttaaaaaaaaaaaaaaaaaaaaaaaaaaaa

SEQ ID NO: 1355 - DNA, 1629 bp, Homo sapiens
cccacgcgtccgttccagagctcttggaattctgacatctcatcaaagtggctttttgaaaacatctacaagcaaaattacttcaactgcgtggaaaaataaagacattaccatgcagtccaccaagcagtatgcctgtttgcacgatttaactaacaagggcattggagaagaaatagataatgaacacccctggactaagcctgtttcttctgagaatttcacttctccttatgtgtggatgttagatgctgaagatttggctgatattgaagatactgtggaatggagacatagaaatgttgaaagtctttgtgtaatggaaacagcatccaactttagttgttccacctctggttgttttagtaaggacattgttggactaaggactagtgtctgttggcagcagcattgtgcttctccagcctttgcgtattgtggtcactcattttgttgtacaggaacagctttaagaactatgtcatcactcccagaatcttctgcaatgtgtagaaaagcagcaaggactagattgcctaggggaaaagacttaatttactttgggagtgaaaaatctgatcaagagactggacgtgtacttctgtttctcagtttatctggatgttatcagatcacagaccatggtctcagggttttgactctgggagaggctgccttatttggagcaccttaatctctctggttgtcttactataactggtgcaggcctgcaggatttggtttcagcatgtccttctctgaatgatgaatacttttactactgtgacaacattaacggtcctcatgctgataccgccagtggatgccagaatttgcagtgtggttttcgagcctgctgccgctctggcgaatgacccttgacttctgatctttgtctacttcatttagctgagcaggctttctttcatgcactttactcatagcacatttcttgtgttaaccatccctttttgagcgtgacttgttttggccccatttcttacaacttcagaaatcttaatttaccagtgaattgtaatgttgtttctcttgcaaattatacttttggtttaaaaagggattaagtcttttcaaaagggtgagaacagtcttacatttttcttttaaatgaaatgctttaaagaatgttggtaatgccatgtcatttaaagtatttcatagataattttgagttttaaagtccatggaagtgaatgggtcctcttacacattaacactgtaccaagctttgcagatcttttccgacacacatgtctgaagacttattttcaaagacagcacatttttggaaactaatctcttttccgtaatatttcctttatttcaatgattctcagaaggccaattcaaacaaacccacatttaaggttctttaggattatagaataaattggcttctgagtgttagctcagtgagctaggaaagcaccaatcgatatttgtttcctttagggatactttgttctcaccactgtccctatgtcatcaaatttgggagagattttttaaaataccacaatcatttgaagaaatgtataaataaaatctactttgaggactttaccaagtaaaaaaaaaaaaaaaaaaaaaaaaaaaaaaaaaaaaaaa

SEQ ID NO: 1356 - DNA, 1018 bp, Homo sapiens
cccacgcgtccgaaatagatgatatatagatgacaattgcaattgtcattttaattattttccctacagtaaagaacctagctctgagcagtgaaattgtaatggcactttaaaggaagtaagccgttaactgttctctagtggagcgatctccaactgttttggcactagggacgggttttgtggaagaaaatttttccacaggactgggggtttagggggatggtttcaggatgattcaagtacattacatttatcattagattctcataaggagcatgcaacctagatctcttgcacgtgcggttcacagcaggattcgagctcctttgagaatctaatgccatggctgatctaacaggaaactgagctcaggcagtaatgcttggcaccgccccccaccttctatgcagcccggtcgtggcctggggactggggacccctgctctagtcagtaataaggtacttgtgccagaatataaatcaacacattgcttcctttatcaaagaagtcttgttatttaaaaaaagtcaactgagccagtatgattagtgatgtaattgattttcattctggcacaagcctctttcattctggacagctcacaaatagttaatggaccatgctttgaatagccttcctctaagcaacatttataaatactgatattttagaactgtttacatttcttctgtttatttttgaattttcagtttgatatcttgtccttattcattgttgtataaacaactgtactttaatttcaagtagtattaaaagtatttcacttcagtttggggggattattatcaatttataattttataaaagtattttaaagaataattgtaaattttccataaattacaacttcctgccatcttttattaaataataatcttgcttaaggcatatagacagacattattatgagtattccagtaaaaaaaatctacatcaacttgaccattctggctaaaaattaaaaagcacttttttaaaaaaaaaaaaaaaaaa

SEQ ID NO: 1357 - DNA, 892 bp, Homo sapiens
cccacgcgtccggtttgtggagtatcttcatgggtattaccaccactatttacatgaagtcttcaagtggccttaggaagccgctggtaactgaacaactttctctaaaaagccaagctcatttttaactagagaatctgggaaatactgtgagttttttctctttccttttaaaggtacaattattataaattcctaactgctcctaaaatcatatagaacatttccagagccaaagaatttctaagctatagtttaaaatgatagcattttggaagcaagcctgaattcacttcctataatgttttccagattgtataagcaaaggctattattgctgctgtggtatagtcactttggtggtggtggtagcaggctagagagaatctcctttgccctgaagtctagaatgtaaatttgtaccaccaaacacaatagccaatattataaacaggaagtaagaaaaaaacctcatctcacttgcaaaagatcagcttattttcaattgtggaaattaatttgttatagataacagtagatttgagtgactttatttacttttcctcttcagtataaaaaataatattagtataatctcattacatcaatatattgaatagttaagttttttcctcttttaatatttaatatttgccctactgggcatgagttggccattattgaagccaggtggtgagtacctaagaattcattctactatttttctattttcatatacctttggaatttactatcataaaattatttttaaggtatatattttaaaatcttctctgttagctagtccttctcttgaaccacattcttcaaaagttctcccacagctaagttataaagagcggaccacttttggcagaaaaaaaaaaaaaaa

SEQ ID NO: 1358 - DNA, 651 bp, Homo sapiens
gttaaacaaaataagatttcaaattcagtacaaactacataatccagtgatttctcaaagagcactctttgctagcttcttcctaaacaaaatctactctaggaagatggcccacctggatgatggttccaggagggccagctcccttattgctttgctttctcttcctcctcttctggtaccttggggaactgatcacaaagagccttttgagggtgatggaaagctacccctccattcctcaggcagttttccaaagatgacacttggctaaatgctcagggtatttacagtcataggagataaactatcaacttgttactgttaaaaaaatcttgagatctgggatcttgatgcctgaaaatcccaagattggtacttggcaaactgaaagaaatctagaaaaccctagagatcaggcatctgtggccagctaactggtcatacaaatggattgttgtggtgaacttgtatagtattaatcctgagatgctgtccccctccacccccacccccacaaaaaaaataaataaagtagtattaagttagcctcatacaaatgctggcaccatgctcctggacttctcagcctccataactgtgagccaaataaacttcctttctttataaattaaaaaaaaaaaaaaaaaa

SEQ ID NO: 1359 - DNA, 1270 bp, Homo sapiens
  misc_feature (553)..(553): n equals a,t,g, or c
  misc_feature (1070)..(1070): n equals a,t,g, or c
  misc_feature (1208)..(1208): n equals a,t,g, or c
acgtatagggaaagctggtactcctgcaggtaccggtccggaattcccgggtcgacccacgcgtccggctgaatgtttttttcattttcctgagagatgcaaatgttcattcattcatctcattatacaacacagtacataaatgtagcttcagagcgtattaagtgcttttatacacaagtgctggctgtgtggaccaggtggtagctcatttaggccccaaattcattaagggcagggtctgactcttaggcttcttaatatttggtttggtgcatggtcaagagctggacccacatgttgcatagcagcagggctgatatgtttaaagacgctgggctttttctgctctggggccctttcccgggggttccggtgagtccctccccaggtgggtctgcccccacccgtgtgggcgggattagctcccagaggctggccaggccccacctgggggargcttgagggcagggccccaaggctgagattcaggcttgggggaacagagcaggaaagagacccggtaccgaaagtgagcggggcaggcacctantcacatgggtaatgggcaggggtcggtcactggctttggctccagggccaragcagtctgacttagtgttgagctccaagcatggaacactggagtggttcattttgaccagcaagcctctaaatgggtgccttgattacccaccgcaaggagagggcagttgcctttttatgacatgttaattccagccaggtgagtcaccaggtagctctcatcctcctgccaggctcccctgcctgtcggtttggcattgtcagataatgtgatcattcattgaagtgacatttgagttccaaaccagttttctcctttaaccatttcaccctcaggagtgattctcctttgtttggcattgtcagggaatgtgatgatccattcaaatgacttttgagttccaaatagtgtttctactttaacttcctaaatgaaaaaaaaaaaaaaaaaaaagggcggccgctctagaggatccaagcttacgtacgcgtgcatgcgacgtcatagctcttctatagtgtcncctaaattcaattcactggccgtcgttttacaacgtcgtgactgggaaaacctggcgttacccaacttaatcgccttgcagcacatccccctttcgccagctggggttataacgaaaaggccgcacgatcgcccttcncaacagtttgcgcaacctgaatggcgaatgggaccgccctgtaacggggcattaaacgcggc

SEQ ID NO: 1360 - DNA, 3145 bp, Homo sapiens
aagtgaaaggcgaggttgctgtaagcggctaatcataggctgtggggacaagcaatgttaaaaatgaagaaaaactaagacgcagtcttccaaacctgtcccgaacatctaatacacaagttgactcagtgaaaagcagcagaagtgactcaaattttcaagtgccaaacggaggaatacctcgtatgcaacctcaggcttcagccataccttctccaggcaaattccgttcccctgcagcaccatctcctttggctcttcggcaaccagtgaaagcatttagtaaccatggctctggttctcctggtagccaagaaataacacagctcacacaaaccacctcytcacctgggcctcctatggttcagagcacagtctcagcaaatcctcccagcaatatcaacagcgctactctaaccagacctgcagggacaactgcaatgagaagtggcttgcccagacccagtgccccttctgctgggggcataccagtgyctcgcagcaaacttgcacagcctgttcgcagatccttgccagctcctaaaacctatggtagcatgaaagatgacagttggaaagatggctgttactgaccagcaaagacaagaatgcagaagtccacggcttcatggatacccttcaccaggctaaaaaacaacttttatatgcagactgttcagataagactcttgggatttataaaatcccagccctctctgtcttaattagcacaaaccgacagagatcatcaaacagcactttaatgacatttaacatcagatgtgtttggtaatcatacaatcactctccatagaatcacttttagttttgtttaatagaaactaggttgatttttaaaaaatatttgacagaggccaatatctgggcaaatacctaatggatgccaaagagaaatgcccatttgtaaatgagaaaaatgcccatttgtgcacaagaaaatggtgaattcaggctatccaaaacttcacattcaacctaatttactgtataaatagtatcaataaatatttgtgttaatgagaactaatattctgactaattatctaaagtgtttcactagtacaccaggaaactacagattgagattagggggtgggaggaaagaaacctgggctagagattaaaacattcctaaatttagcagaatttcagaaatgatttttgcagattcattagaaaagaaaaattgtcatttaatcttaagttttggatgtagctcacatgtcaccaccaccagatagtgttacagcatgtatccatcatgttgcattgacacatcaaacttgtgtgtgtttgttttgattgccaaaagggcttaatatcagttgtacaatctttctgaactttatagttcctggctcaggaaagatggcctttgctattgaagccaacttcttcacatgctgttatctttacagaactaagagatcttgtttctattagcaggttttcatgataggaaagaacaagtagtgtgtgtctttattcttgatacaacaccacctcggtgcttgcaacctggaacaaaaccataccatgagakagagggggaaaaaaatctatgcacttaacctacaaaatctctggtgatgacagttgtattgttgctattacatggcataacggtctattatgtggtaggaaaatatagcctgctaaatcctacttaagttgatccactttaaactgagtaactgtataaaacatctattgaaaattcttttccttttgacttagattctgccttacatcaatttttgcatttttggtaaaaaaaaaaccctactacgtatgactctaacctgatacttgctctctaatggctcttaatatatccttgaaatcggctatttcaattttatcagacttttaccagagtaaaacttgcttctgtagcaggcctctcattttttattatgaggtctgtttttaaatacttaatttgaacagctctaagatattgtcacttaggtcatctaaaagcttttagagatttgaacataagttcatttcctgttaatcaaagacattccgtaagttggcaaaagaaattgggagagagaaatagaaggcttgatattctggacagcattaaggttgataggttgatgataaaaacttaaaaccaggacctccattctgtcatgactgacaccatggtagtctgtcagcttgaccagtggagagtcattcatttagcacaagcagctggagatttaaactgccagtactatgtatttggtgtataatgcaaggaagaaactttatccttgaatttgagggtgatggggtgggtcaggaaaggatggcgccagaattctacatgataatgaactaaaaaatgttgcttttcagaggaagataaagcatcttcttttgggaggggggtatctcatgtctaagtaagtaaaagaaagaagtagctactgtctcttttaaaaaccacgtacaaaacagaacaagtctcagttttcagtgcaacatttcaaaaaatatatatgctgcaatctaataattaaaaggaattttacctattatgaaacwtattacattttttaagttagataatcagtttcaaaaggagtattcaggttatttaactttgtttttaaatggctgcatcagaaaaaaatgtctatttttttttattaaaatatttcatcacttgttaaaacatatttttgatctgagtttggtaaagtattattttacctgctgttgtactaccacagactgttgacttttagtttcttaaagagaaaaattgcctttttactagaaagcctttgtatattgcaatttttctgtttgggaaaatctaaggatttactgtggttagtcttacagaagaaatgtggatttgataaactagtgcctatgattttaacttatgtttgatatatagtagtaagggttttatgaatgttgattattttgtgccaacagcccagaattgtcacttatatgtaagcagaaaacaatgagctctgcttccaaagttatttaattttctcagtgtttgaatgttattttttgtaagtgtgttaataaaagtgtaaagaattggaaaaaatataaatattcttaactcaagcaaaaaaaaaaaaaaaaaaaaagggcggcc

SEQ ID NO: 1361 - DNA, 3145 bp, Homo sapiens
aagtgaaaggcgaggttgctgtaagcggctaatcataggctgtggggacaagcaatgttaaaaatgaagaaaaactaagacgcagtcttccaaacctgtcccgaacatctaatacacaagttgactcagtgaaaagcagcagaagtgactcaaattttcaagtgccaaacggaggaatacctcgtatgcaacctcaggcttcagccataccttctccaggcaaattccgttcccctgcagcaccatctcctttggctcttcggcaaccagtgaaagcatttagtaaccatggctctggttctcctggtagccaagaaataacacagctcacacaaaccacctcctcacctgggcctcctatggttcagagcacagtctcagcaaatcctcccagcaatatcaacagcgctactctaaccagacctgcagggacaactgcaatgagaagtggcttgcccagacccagtgccccttctgctgggggcataccagtgyctcgcagcaaacttgcacagcctgttcgcagatccttgccagctcctaaaacctatggtagcatgaaagatgacagttggaaagatggctgttactgaccagcaaagacaagaatgcagaagtccacggcttcatggatacccttcaccaggctaaaaaacaacttttatatgcagactgttcagataagactcttgggatttataaaatcccagccctctctgtcttaattagcacaaaccgacagagatcatcaaacagcactttaatgacatttaacatcagatgtgtttggtaatcatacaatcactctccatagaatcacttttagttttgtttaatagaaactaggttgatttttaaaaaatatttgacagaggccaatatctgggcaaatacctaatggatgccaaagagaaatgcccatttgtaaatgagaaaaatgcccatttgtgcacaagaaaatggtgaattcaggctatccaaaacttcacattcaacctaatttactgtataaatagtatcaataaatatttgtgttaatgagaactaatattctgactaattatctaaagtgtttcactagtacaccaggaaactacagattgagattagggggtgggaggaaagaaacctgggctagagattaaaacattcctaaatttagcagaatttcagaaatgatttttgcagattcattagaaaagaaaaattgtcatttaatcttaagttttggatgtagctcacatgtcaccaccaccagatagtgttacagcatgtatccatcatgttgcattgacacatcaaacttgtgtgtgtttgttttgattgccaaaagggcttaatatcagttgtacaatctttctgaactttatagttcctggctcaggaaagatggcctttgctattgaagccaacttcttcacatgctgttatctttacagaactaagagatcttgtttctattagcaggttttcatgataggaaagaacaagtagtgtgtgtctttattcttgatacaacaccacctcggtgcttgcaacctggaacaaaaccataccatgagakagagggggaaaaaaatctatgcacttaacctacaaaatctctggtgatgacagttgtattgttgctattacatggcataacggtctattatgtggtaggaaaatatagcctgctaaatcctacttaagttgatccactttaaactgagtaactgtataaaacatctattgaaaattcttttccttttgacttagattctgccttacatcaatttttgcatttttggtaaaaaaaaaaccctactacgtatgactctaacctgatacttgctctctaatggctcttaatatatccttgaaatcggctatttcaattttatcagacttttaccagagtaaaacttgcttctgtagcaggcctctcattttttattatgaggtctgtttttaaatacttaatttgaacagctctaagatattgtcacttaggtcatctaaaagcttttagagatttgaacataagttcatttcctgttaatcaaagacattccgtaagttggcaaaagaaattgggagagagaaatagaaggcttgatattctggacagcattaaggttgataggttgatgataaaaacttaaaaccaggacctccattctgtcatgactgacaccatggtagtctgtcagcttgaccagtggagagtcattcatttagcacaagcagctggagatttaaactgccagtactatgtatttggtgtataatgcaaggaagaaactttatccttgaatttgagggtgatggggtgggtcaggaaaggatggcgccagaattctacatgataatgaactaaaaaatgttgcttttcagaggaagataaagcatcttcttttgggaggggggtatctcatgtctaagtaagtaaaagaaagaagtagctactgtctcttttaaaaaccacgtacaaaacagaacaagtctcagttttcagtgcaacatttcaaaaaatatatatgctgcaatctaataattaaaaggaattttacctattatgaaacwtattacattttttaagttagataatcagtttcaaaaggagtattcaggttatttaactttgtttttaaatggctgcatcagaaaaaaatgtctatttttttttattaaaatatttcatcacttgttaaaacatatttttgatctgagtttggtaaagtattattttacctgctgttgtactaccacagactgttgacttttagtttcttaaagagaaaaattgcctttttactagaaagcctttgtatattgcaatttttctgtttgggaaaatctaaggatttactgtggttagtcttacagaagaaatgtggatttgataaactagtgcctatgattttaacttatgtttgatatatagtagtaagggttttatgaatgttgattattttgtgccaacagcccagaattgtcacttatatgtaagcagaaaacaatgagctctgcttccaaagttatttaattttctcagtgtttgaatgttattttttgtaagtgtgttaataaaagtgtaaagaattggaaaaaatataaatattcttaactcaagcaaaaaaaaaaaaaaaaaaaaagggcggcc

SEQ ID NO: 1362 - DNA, 3195 bp, Homo sapiens
aagtgaaaggcgaggttgctgtaagcggctaatcataggctgtggggacaagcaatgttaaaaatgaagaaaaactaagacgcagtcttccaaacctgtcccgaacatctaatacacaagttgactcagtgaaaagcagcagaagtgactcaaattttcaagtgccaaacggaggaatacctcgtatgcaacctcaggcttcagccataccttctccaggcaaattccgttcccctgcagcaccatctcctttggctcttcggcaaccagtgaaagcatttagtaaccatggctctggttctcctggtagccaagaaataacacagctcacacaaaccacctcctcacctgggcctcctatggttcagagcacagtctcagcaaatcctcccagcaatatcaacagcgctactctaaccagacctgcagggacaactgcaatgagaagtggcttgcccagacccagtgccccttctgctgggggcataccagtgyctcgcagcaaacttgcacagcctgttcgcagatccttgccagctcctaaaacctatggtagcatgaaagatgacagttggaaagatggctgttactgaccagcaaagacaagaatgcagaagtccacggcttcatggatacccttcaccaggctaaaaaacaacttttatatgcagactgttcagataagactcttgggatttataaaatcccagccctctctgtcttaattagcacaaaccgacagagatcatcaaacagcactttaatgacatttaacatcagatgtgtttggtaatcatacaatcactctccatagaatcacttttagttttgtttaatagaaactaggttgatttttaaaaaatatttgacagaggccaatatctgggcaaatacctaatggatgccaaagagaaatgcccatttgtaaatgagaaaaatgcccatttgtgcacaagaaaatggtgaattcaggctatccaaaacttcacattcaacctaatttactgtataaatagtatcaataaatatttgtgttaatgagaactaatattctgactaattatctaaagtgtttcactagtacaccaggaaactacagattgagattagggggtgggaggaaagaaacctgggctagagattaaaacattcctaaatttagcagaatttcagaaatgatttttgcagattcattagaaaagaaaaattgtcatttaatcttaagttttggatgtagctcacatgtcaccaccaccagatagtgttacagcatgtatccatcatgttgcattgacacatcaaacttgtgtgtgtttgttttgattgccaaaagggcttaatatcagttgtacaatctttctgaactttatagttcctggctcaggaaagatggcctttgctattgaagccaacttcttcacatgctgttatctttacagaactaagagatcttgtttctattagcaggttttcatgataggaaagaacaagtagtgtgtgtctttattcttgatacaacaccacctcggtgcttgcaacctggaacaaaaccataccatgagakagagggggaaaaaaatctatgcacttaacctacaaaatctctggtgatgacagttgtattgttgctattacatggcataacggtctattatgtggtaggaaaatatagcctgctaaatcctacttaagttgatccactttaaactgagtaactgtataaaacatctattgaaaattcttttccttttgacttagattctgccttacatcaatttttgcatttttggtaaaaaaaaaaccctactacgtatgactctaacctgatacttgctctctaatggctcttaatatatccttgaaatcggctatttcaattttatcagacttttaccagagtaaaacttgcttctgtagcaggcctctcattttttattatgaggtctgtttttaaatacttaatttgaacagctctaagatattgtcacttaggtcatctaaaagcttttagagatttgaacataagttcatttcctgttaatcaaagacattccgtaagttggcaaaagaaattgggagagagaaatagaaggcttgatattctggacagcattaaggttgataggttgatgataaaaacttaaaaccaggacctccattctgtcatgactgacaccatggtagtctgtcagcttgaccagtggagagtcattcatttagcacaagcagctggagatttaaactgccagtactatgtatttggtgtataatgcaaggaagaaactttatccttgaatttgagggtgatggggtgggtcaggaaaggatggcgccagaattctacatgataatgaactaaaaaatgttgcttttcagaggaagataaagcatcttcttttgggaggggggtatctcatgtctaagtaagtaaaagaaagaagtagctactgtctcttttaaaaaccacgtacaaaacagaacaagtctcagttttcagtgcaacatttcaaaaaatatatatgctgcaatctaataattaaaaggaattttacctattatgaaacwtattacattttttaagttagataatcagtttcaaaaggagtattcaggttatttaactttgtttttaaatggctgcatcagaaaaaaatgtctatttttttttattaaaatatttcatcacttgttaaaacatatttttgatctgagtttggtaaagtattattttacctgctgttgtactaccacagactgttgacttttagtttcttaaagagaaaaattgcctttttactagaaagcctttgtatattgcaatttttctgtttgggaaaatctaaggatttactgtggttagtcttacagaagaaatgtggatttgataaactagtgcctatgattttaacttatgtttgatatatagtagtaagggttttatgaatgttgattattttgtgccaacagcccagaattgtcacttatatgtaagcagaaaacaatgagctctgcttccaaagttatttaattttctcagtgtttgaatgttattttttgtaagtgtgttaataaaagtgtaaagaattggaaaaaatataaatattcttaactcaagcaaaaaaaaaaaaaaaaaaaaaaaaaaaaaaattaaaaaaaaaaaaaaaaaaaaaaaaagtacctcggccgcgaccacgc

SEQ ID NO: 1363 - DNA, 3195 bp, Homo sapiens; identical to SEQ ID NO: 1362

SEQ ID NO: 1364 - DNA, 1262 bp, Homo sapiens
cccacgcgtccgcagatatgcttcatgattgtgaccagtcatgttatttctttcaaattcttccagtggtttgtccctgtgcatctgttaattcagttcacgtacagcagagcatgtagttatgctgtctctctgtcatctacttgacattctatagaagtgaacactcgaaagaactggtcaacaaagatgaaagtgcagcaaagcaatgaaaaatgataacactggaagtgaaattttaatcaaacataaatgaatttgtagaagaagtcactgaccatgggaatgttgttcttgctgctgtgtattcataggagcttagtgaaggcaaacttaccaacacaaataagcaaagtggttgcaataaagacagatacgtcccagaggaagtgatggttaaaaaaaaaaaaactttacattaaaagatatttaatgtgaatatagaaatatttcacaacattgaaagcacaagcaataaaagggtggaagctgacccaaacttagaaggagtatggcagtttgccgtgaacataaaagatgcttactcagtatggtaagttacttgccagaaaaaaaggcaagccctattcaaactactttgtttttacaatgaaataaaacactttaattctatttctaatgttttaaattacagtgtactaaatatttttaaacatttttgcatttttttctacatttataactggtcttaagagtttttaatatttgagcagaaccttaaaggtcatggaacaatcatcattttccctattgaatattaagattgcaggaccatttttatggtcccacagtaccatgtgaaatgaggatcgcttgtagctgggaacagtgcttacttcagggaaaactgattttgatagaaccgactagttgagtattaaactgttttggaaataatttatatatctaagtgctgaaatatatttctcttctccccacttattcaaataaaaaagttttaatactataaacttttcattgttagcgccacgcagtccttgtcaagattgttctgggggacaaaaacttgatgtataaagcatgaatatacacacagtacttaaacagataccatatctgtggtattaaaattttgggggtggttgattaggattgtaaaaagactccttagggagtgaggatggaaaagagaaacactggttaatacagagtataaataaattttttggaaattgaaaaaaaaaaaaaaaaaaaaaaaaaaaaaaaaaaaaaaaaaaaaa

SEQ ID NO: 1365 - DNA, 388 bp, Homo sapiens
  misc_feature (388)..(388): n equals a,t,g, or c
ggtgcccagtagaggtgcagtgcagcagccagctcgcagcagtgctcccgtagagctgatggcattggcaggagtggcggctcagcacagggaagttctccagtgcccaggcccaggcttgctctcggtttaggtcccatggcacgtggggctctggacctgcctgcctccaagacagctcttccaaggttgagggttggaactccacagcctcagcctcccaaagcttgaccaggcccagccatagctagtctaggaaaagagcaaatggccgtgtttttatattttgacttttgcatttcaatattaatttttttggtaatgtaatgcattcaaaacatggtccccccccccccaaaaaaaaaaaaaaagggcggccttaaaaggn

SEQ ID NO: 1366 - DNA, 408 bp, Homo sapiens
gccgctgctgctggcgctcctgtcgttggctctttgccgagggcgtgtggtgagagtccccacagcgaccctggttcgagtggtgggcactgagctggtcatcccctgcaacgtcagtgactatgatggccccagcgagcaaaactttgactggagcttctcatctttggggagcagctttgtggagcttgcaagcacctgggaggtggggttcccagcacagcactggcctttcggaagcatcccagtagggttttctgaggctcgctggtgactcatgccctaattgcaatcctctgcttttatcttgactttgaaggatctaacactgctctctcttccaaaggggaaaaaaagattcatttgttttgagcaataaactaatacaaaatgaaaaaaaaaaaaaaa

SEQ ID NO: 1367 - DNA, 3014 bp, Homo sapiens
  misc_feature (614)..(614): n equals a,t,g, or c
  misc_feature (619)..(619): n equals a,t,g, or c
  misc_feature (2968)..(2968): n equals a,t,g, or c
  misc_feature (2989)..(2989): n equals a,t,g, or c
  misc_feature (2998)..(2998): n equals a,t,g, or c
cccacgcgtccgcccacgcgtccgccagtgttatcccggagatggattgatgtctccattgtatttaaaccaaaatgaactgatacttgttggaatgtatgtgaactaattgcaattatattagagcatattactgtagtgctgaatgagcaggggcattgcctgcaaggagaggagacccttggaattgttttgcacaggtgtgtctggtgaggagtttttcagtgtgtgtctcttccttccctttcttcctccttcccttattgtagtgccttatatgataatgtatggttaatagagtttacagtgagcttgccttaggatggaccagcaagcccccgtggaccctaagttgttcaccgggatttatcagaacaggattagtagctgtattgtgtaatgcattgttctcagtttccctgccaacattgaaaaataaaaacagcagcttttctcctttaccamcacctctacccctttccattttggattctcggctgagttctcacagaagcattttccccatgtggctctctcactgtgcgttgctaccttgcttctgtgagaattcaggaagcaggtgagaggagtcaagccaatattaaatatgcatnctttnaaagtatgtgcaatcacttttagaatgaatttttttttccttttcccatgtggcagtccttcctgcacatagttgacattcctagtaaaatatttgcttgttgaaaaaaacatgttaacagatgtgtttataccaaagagcctgttgtattgcttaccatgtccccatactatgaggagaagttttgtggtgccgctggtgacaaggaactcacagaaaggtttcttagctggtgaagaatatagagaaggaaccaaagcctgttgagtcattgaggcttttgaggtttcttttttaacagcttgtatagtcttggggcccttcaagctgtgaaattgtccttgtactctcagctcctgcatggatctgggtcaagtagaaggtactggggatggggacattcctgcccataaaggatttggggaaagaagattaatcctaaaatacaggtgtgttccatctgaattgaaaatgatatatttgagatataattttaggactggttctgtgtagatagagatggtgtcaaggaggtgcaggatggagatgggagatttcatggagcctggtcagccagctctgtaccaggttgaacaccgaggagctgtcaaagtatttggagtttcttcattgtaaggagtaagggcttccaagatggggcaggtagtccgtacagcctaccaggaacatgttgtgttttctttattttttaaaatcattatattgagttgtgttttcagcactatattggtcaagatagccaagcagtttgtataatttctgtcactagtgtcatacagttttctggtcaacatgtgtgatctttgtgtctcctttttgccaagcacattctgattttcttgttggaacacaggtctagtttctaaaggacaaattttttgttccttgtcttttttctgtaagggacaagatttgttgtttttgtaagaaatgagatgcaggaaagaaaaccaaatcccattcctgcaccccagtccaataagcagataccacttaagataggagtctaaactccacagaaaaggataataccaagagcttgtattgttaccttagtcacttgcctagcagtgtgtggctttaaaaactagagatttttcagtcttagtctgcaaactggcatttccgattttccagcataaaaatccacctgtgtctgctgaatgtgtatgtatgtgctcactgtggctttagattctgtccctggggttagccctgtkggccctgacaggaagggaggaagcctggtgaatttagtgagcagctggcctgggtcacagtgacctgacctcaaaccagcttaaggctttaagtcctctctcagaacttggcatttccaacttcttcctttccgggtgagagaagaagcggagaagggttcagtgtagccactctgggctcatagggacacttggtcactccagagtttttaatagctcccaggaggtgatattattttcagtgctcagctgaaataccaaccccaggaataagaactccatttcaaacagttctggccattctgagcctgcttttgtgattgctcatccattgtcctccactagaggggctaagcttgactgcccttagccaggcaagcacagtaatgtgtgttttgttcagcattattatgcaaaaattcactagttgagatggtttgttttaggataggaaatgaaattgcctctcagtgacaggagtggcccgagcctgcttcctattttgatttttttttttttttaactgatagatggtgcagcatgtctacatggttgtttgttgctaaactttatataatgtgtggtttcaattcagcttgaaaaataatctcactacatgtagcagtacattatatgtacattatatgtaatgttagtatttctgctttgaatccttgatattgcaatggaattcctactttattaaatgtatttgatatgctagttattgtgtgcgatttaaactttttttgctttctccctttttttggttgtgcgctttcttttacaacaagcctctagaaacagatagtttctgagaattactgagctatgtttgtaatgcagatgtacttagggagtatgtaaaataatcattttaacaaaagaaatagatatttaaaatttaatactaactatgggaaaagggtccattgtgtaaaacatagtttatctttggattcaatgtttgtctttggttttacaaagtagcttgtattttcagtattttctacataatatggtaaaatgtagagcaattgcaatgcatcaataaaatgggtaaattttctgaaaaaaaaaaaaaaaaaaaaaaaaaaaaaaaaaaaanaaaaaaaaaaaaaaaaaaaanaaaaaaaanaaaaaaaaaaaaaaaa

SEQ ID NO: 1368 - DNA, 1572 bp, Homo sapiens
  misc_feature (1516)..(1516): n equals a,t,g, or c
  misc_feature (1561)..(1561): n equals a,t,g, or c
  misc_feature (1567)..(1567): n equals a,t,g, or c
atgggggaacgtaattktragcgggatgcgctctctttagaatcgcgtcctcccaaatgctcccgccgtcccattaccggaatggggaccattcggctgctgcagataggactttctctcccattctttacttttttattagccaatcaaagtggcttccgaaagccatttgtgatttgtgaaaaatagtatctttcaaaatgctgagttgaagcatctcgctcattgctccttgaatttattattctaatctcaaccgtagagctggaataatgcagctattaagttggggggcaaattcgtttctctggattaaattttttttcctccccactccctcattgcatcagccaaggaaggtgcggacctgcaagagatctgggggtgggtgagagaggtagtgagcgtcctgaagggctccttgagggacccttggataggcgagtggtttggtctccccagtcttatcttccccagataagatgccctaatgactgcctgctggctgggaaagttaccccgcccaattagggagaattcaggacaggttgtgccacagtctagaagtaaaatttccggtgagctgcccgcagcgccgtcccattctccccgctgcccattgtgaaaagctgggccagcgcttccttgtcgtaatttttaactacctgttataaaatttatgggtgggtttgtgaaaagaaacgaggtccctgcatccggcctagggaactgcttttcttactatggaggaagtctggggaaggcatgaggtatcccctcttggtcagggwtgaggyacccaaccattgagattcccatgccagcttgatgcgggaccaagtggagagatgccggccttcaaatctcgagcccgtggggagagtgacctgcctgcaacccctcccccggcaaatagtctctatgggggaatttattctggactacccwamattaggggtctggaaaaacaggctgctcgaaattttagcacagawkgtgkaattcagggcagtaaaaggttattttttcaggcctcggtagtacatcccagctgcccagacattgaatcaggaaatttttctgagaaaggcaggtgggtatgggcaatctgacacgatccaaaaggcttactgccttgcacccctccccgcaaaaaggaagtagagaccaagatcttgggctttaattttatttttaattgtaaaaagatttcaaataagccaccatttgaactgggaagggaaactagggatggtcttgggggaaaatgtcattctctctaagaaagggaccccggggatgtgggtcgttttgagggtcctagaagttgaccccaattctcacctctcctgctgcactgcaggattgcccagggtaggtctagtcccctaggttcttcagaccactccaggtcaggtttggttgggtggctgccagtggtcttccactactgttcctgtctagggtggagtaggagctttcaggggtacggcatagaggggatgttgttctcttnacttaaaaaaaaaaaaaaaaaaaaaggggggcccccccaaggggncccaanttaac

SEQ ID NO: 1369 - DNA, 1207 bp, Homo sapiens
  misc_feature (1206)..(1206): n equals a,t,g, or c
tccagaatgagtgctatgacagccccaaagcattctggtgggtaagtgtaggttttgaacttgtccttgaaagatggggctttggataagcaaaggagagcagcaagggcattctaggtaggaggaatgatatggggaaaggtttggggataagaaaatacaaaatatttaggaaagatagcagatcacttttgacatagaagaacggaaaataggtcagaactttaatgcttctgatcaaagataattgacaatcttctagaattaaaatagaccatggtgtgattagcgggaaagaagtgactatggaactaatgaatgttaggaccagattgtggagagttttgagtgtcaggtttttgggattcatccacgttgttgtgtatgacctcctcccttgctgaggagtattctattgtaatacacacaatttatccatctgctctcctgttaattaattaacaagggtcatttccaggttagaggtattacacataataaagttactctaaatattcttgtataggtcttttttgtggttttacggtctcatttctcttgagttgatacctagaaatgaaagggtcatagcacaggtatatgtttagtttcataggaaactgccatacgatttcccaaaggagttgtaccattttacactccttccagcaatgtatgaattttggtttgggagcacatatatttaaatcaggaatctgaaagatcgatttcaccatagtgtaaatggatggagtggaaggaactgaaggtaaggggtcaatgcaggagtccacgcatgagctactaagggtctgcactcaagcggccacacagggtgagaaacgaatgagctattttgggagtgaaatttaagtgaaattctatagaaatagaggaatcaaagttatctcgatttcaagcttgagggaagcctctgttggcggaaaagatgggtttcttctggggtgtgtttacagtgaggggccatctcactggcaatgtggaagaggtcggatctagagaccaatctaaaagtcacctggctagagaagacaatcaaatccagaagttcatagaacaaaataaaggtgaacatagggcagctaaagcctaaacattttgtaattagaaagcagttagggtgtgttaaaaaaaaaaaaaaagggcggccgctctagaggatccaagcttacgtacgcgtgcatnc

SEQ ID NO: 1370 - DNA, 839 bp, Homo sapiens
  misc_feature (833)..(833): n equals a,t,g, or c
ataaacatcttcattgtcagttctcaaaatgactgaaattgttttcatggtaaaagttaatatactaaagggttcctttttttttaatgtttacatttatctctatgtttacctttttagtcacattgacctgctggctgaatacctcaaatagtccagtagagggcagtccaccaggcagaaaaggttaggcgttttggtttcacatctttgctggggaataataggggaaatggctgtttttgctaatttttagctaatatctagccaggagagcaagcacataggacagactgaaagactgtaattttacacaatacacatggcttaattattttattgggatacagaaaaatataaattctggacaaataagtcatatacctgttttcagtcctaacatttaaggattcttgagtcccaatcacataactgtggtgttactctgtcatttatatggtgtcaaaagcacttgatgagtaaacccagtaacatctttttgagtgtttccataatgcattttccaacttgaaaacaataattgaaaaatagccttattgtatattttatgccatgactaaaagtgccatttttactgatgctattagactgataatttcttgaagtgaaatttaacctttttttctctttagtattatgtttataatgccatatttttagaaagcattccagatcaggcatggtggcttacacctgtaatcccagcactttggaaggctgaggtgtggggattgcgtgaagccacaagtttgagaccagcctggttagcaaggcaagatccccaactctacaaaaaaaaaaaaaaaaaaaanaaaaaa

SEQ ID NO: 1371 - DNA, 1332 bp, Homo sapiens
taatctatgactttttggtacaagaacaatggaaaaagtgaattaaggtaatgaacaaaacctttcacccacttaaacattttccagttttgagattcctcttcgtgtttgtggtgtcttccccttgttaccccttctgccctttttctctgactatggtaatttggtctttaggctcatatcagtctccccgagacattctgcagtcattatcacctttttgggtggattttattttgttttattttgttttttttaaaaaaataactttttaacattggtgcatatttgcttgggatagagcttgtgtaatttaccaatcgtattgattgtaagtgattgtgccctgcagaggtatatttaacaagacaaaaataatcttgggtaataaaggagcccatgagatttgagtcaggttgtaagtgaaatcacttacacttttggatagaatttatactcctgctcttataaatcagtggtagacttaccattttttaaagttttcttgcatttttttgtttttttattgccacagctccctattctttcttgcctgcctccacccccctgttcaggaaaaaaaaaaattgagccttaaagtgacagctgattttttaattgctgaattttgtgaaattttactttttccaagtgtttccaactttaaaaagagaagtgaagacaaataggttggaatggtgaagacaaatgggttggaatttcacaggctgtgaataattccttaggatctggcaaaccgtgaagtcttatttgaagaccttatctcctgagagttcttttggagtaggaaaaagaacctatttgaaatagaccgtttttctcttgtttttaatctgtttaatatttctgatttttaagcagctttcaaaacaagtgtggtggaaaaaaagaaatagtagtaggaagatgtttagggcagcagaactctgggtctaaataagtacatgttcccacttgttgccgatttttgagagtactagggccatctttctcaattttgtattatttgtgtgcatgtttatatcaaagatgcccattttgttaaaatgctatttcctttattaccttggaaactgactcagcctcatgttgctcctaattagtgtttaaggctcccatgagttgcagataaaatgatttattttaacaagtagaaggaggtgattcaccttttggattgtaaatatatgaaaatgtctacaaggtctttatctgctttctgtcagcatttatattaaatgataaattaatgaggaaaaaaaaaaaaaaaaaaaaaaaaaaaaaaaaaaaaaaaaaaaaaaaaaaaaaaaa

SEQ ID NO: 1372 - DNA, 1978 bp, Homo sapiens
ggcacgaggagagagttgaaggagctgagacacttgcctatctgattgaaccagatgttgagctacagagaatcgctagcataactgatcacctcattgccatgcttgctgattatttcaagtatcccagctcagtgagtgccatcactgatattaaaaggcttgatcatgatttaaaacatgctcacgaactccgccaggctgcattcaagctctatgcctctcttggagcaaatgatgaagacatccggaagaaggtgagtctgggagaggggcgtcccccagtcctgacagccagcaggcagggagtgacgtcaacctgaaagtcgtggtgaagagcactaacagtgactgtttgaatataataaagcagagtgactaaaggcataattgaagaatgaatgggacccggatttggggggttgtttgtttgtttttagaacatagagtggcatggccgtgctggaatgacaaataactggcgtgctttttttttgtgtcattaatatgaattattatgttgcacatttttgcatgtgttctgataaaaatcaattctagcactgtgaagcttcagacaccttgaaagtcctaacattagaattgtaaatgttatttatggaaataccttccaatgctattgagaaattcaaatctctattgtatattgttctttgatatgtggcttagttttatgttttgattttttttgctactgtgcaagtttaatgtgaataaaatctttgtggaatgatgattttatgtttagtgagtggtcatctgaattttccagctccccagaaaatgtatgcactggtatagcacccttatgttactaaagcctagtctaacactgaactcatgttcttgatgagaatacttctagatgaggagtatagtggtaagtaagctctgacttggctccttccacaaaccaaaaagctggaacttaccactcaaaaacatgtataacctaataaattctacacaaggctttcaagaccatcagagagcaaaaccacatgttctgtcttgaggagccatagcagaaagagcaaattagtcattatttactgaacatgatgatttactaaatctctccatctgcattagtattttaaggagcactgtgagagaaatcacaaagtattagagtttaccatgattcagagaagttcttcagscctgtagaaagaggagtatggaacaaccttacatttgttgaaatwacttgaaaaggaaccawttcttgaagaaactgaagtaatagcaataagatttgatgtgtgagtagctttgatttaaaatcaatgcaaaaagcacaactaataaattgaatgtttccatgtacctcactttatttcagttamcaagatactttgacttgaagtgtttttagtgtatccctatgaaaatcatttttggtacatctaagttttcacttataaactgttatttcaaagcaaacatactagtgatatatatatgatttatggatgttgacgccaatgttcagtttgggtacgtkggtgtattgcaaggggagaggcttttataacaatagatttgaacatttttaaaaaattggactgtgtaacttaaatacacaattatttggtttaggatggttattagggcccattagaaacaggagaagtattttacccattcttaaagctctaaaaaaccatctcatggactgaaaggtagatagacagatggaccacaatgggaaataggatgtccatttgtacttctttgtacttttttgttaataaactgttttggaattaatggcttaatttgtgatatcatgttctagaaatacctgcaacatgacagtctaatcagtagtctattaaaacttgtattcataatgtgtataatttcctggtaaggctaactcctgatcgtttctgtagaaagatgacaaataaagaaaaagttataattaaaaaaaaaaaaaaagggcggccgc

SEQ ID NO: 1373 - DNA, 626 bp, Homo sapiens
  misc_feature (617)..(618): n equals a,t,g, or c
ccacgcgtccgcttcactaggattgtcttatcacctttattagataaatcatgaagtgtccctgtgaaattgaagtgaaactatctctgtaggacttaagagaatagctaaaaggtgtgacttgccttattgaactgatactggcatatctgactgtaagcagtaggttgaagatatcattttatgaatgtggagaattctacattgaaacagaaaatacctgggaatgaagattaaaaatgtagctgctgttatttgcttggtgattcccctcttgctcttctttagtttgaaaaaacaaaaacgtggccttggaattttcattttgatgcagaaattttgaaattgaaaatgtgcatgttttggtgcacaaaatccttctgtgggcaaaactttgtttttgttttgcacagtaagaaacaataggcaagcgttatgtttttggtaagttaactatgaaagctttcttatttttattattaaaaatgtaacaatttaacccacaggaaaaaaaattactttgtatgcttgtttgaaccctatgggttcgttttattaataaaattattacactaaaaaaaaaaaaaaaaaaaaaaaaaaaaaaaaaaaaaaaaaannaaaaaagg

SEQ ID NO: 1374 - DNA, 1882 bp, Homo sapiens
  misc_feature (1270)..(1270): n equals a,t,g, or c
aaaactataaagattttttaaaagctctgtctcagctagaatttttaagattataactgaacagtatagcccttttagttgtttgaaaattacataatgattcaaaagcttgtttcactgcctttcccagcactaagaaaattaacaatcatttcttttaatwtccttgaatcagagccattctaaagtgactctggaccagcaattctgagctatgatttcatgatacatgtattaatatctaaatgagttgtgagttgacataagaaccatagttccataataattatcttcaaatcaatggatatcttaaatgtgtttttttcttccttagagattattattaaactgatgtatttgataataaagaattttaggactgagaaagttaagtttttcttaccaataataagatattgaaatatataaattataaaacagaaataaaatgaaataaaggaggttatccctaaagtcatttaccttagtcacttgcaattaaatatggktacttcggragragaagtktggccctaaagctactgtaacatgaatcatgccctaatgtgcactatatatgaactactttggtcagaaggcagcggcgggtaaggatggcttcctctcacagtgcttcttaggctatccatttaccaaggaattctaatctctttctctcacttcaccaggaaaggagggagtttaagatatagaactgggcatgctagcctcttttttcccttttgtggatttgtcataactgcagagaaccgatgttgtggtctcttgccagctacattgtgaaccttgcagtgaaagttctttgcctctgcaaagggagatttgtgcttgtgcagaactgcccatgccttagtaagcaggtctgtctaattctaagttcaatatctggtggctattgttggcataaacttaaagtacatcctctaacctagcctttttcagcagtaaacttaaaatattgaatctccatctgtctgtgtctcaagtggttcagaggtcaggagaggagarggacattawtttatgactccctccaaactttaacaagactagtgcagatwawatttcgaagtaagcatgagrtatattaaaaaccacatgtgggaatycttycctaattttagaggttttttttaaataatggaaattctattgaaattgagtagtgttaattacaaggcaacaggtaaacatttgttcaggatatttaaaaggtctgctgagttggaattgtgacagaccacattgntgactctagattgaawtggaagggaagaatgtgaaatgaattaggatatcctctgttcacctctattaactttcttaaatgagtataacttagaaataataaaatgcaagtattttaacgttatagttgggagagttttgacaaatgtaaacacccacttcaccaccactaccatcctgatatagtgtgtgtccatcacccaaaaagttctctaaagcccttttgcagttggttcccctccacctgaacagccatccctagtcaactacttttctgctttctgtggctatacgttagatttgacttcagaattctagagtttgaaataaataggccatataatatgcactctttttgtgtctgactttttttttgcttaacatgatgcttttgaaacccatccatgttgagattcatccatgttatcatgtgtatcaataataagttcctttttattgctgaatagtattctagtatatagatataccacaatttgtttagctgttcacctattgatggacatttaggttgtttcaagttttgatctattatgaataaagctgctatatatataaatcacaaaaaaaaaaaaaaaaaaaaaagggcggccgc

SEQ ID NO: 1375 - DNA, 820 bp, Homo sapiens
cccgggtcgacccacgcgtccgaacaacgatatggcaggagccagtcttggggcccgcttctaccggcagatcaaaagacatccggggatcatcccgatgatcggcttaatctgcctgggcatgggcagcgctgcgctttacttgctgcgactcgcccttcgcagccccgacgtctgctgggacagaaagaacaacccggagccctggaaccgcctgagccccaatgaccaatacaagttccttgcagtttccactgactataagaagctgaagaaggaccggccagacttctaagccaggctgggctgccagtgccatgcaagccacagccagccagcccatccacttcttccactcctccccgcaggccccaaggcatcactccggccaccctgtcccgctactgcttacacaggccgggttcccacgcagaggggaggctgctccacccctactctcctcccttgctcccagcagcggaagcgcctctgacccttggcttgagtcccacgtgggggaggaggaggcaggcagcaccagcagggcctgcccaggctggggcacctttgcctcctgaggcgcagcgcactcctcccctgcccaagcctactgcctcccgctgccgccagtaccccctccagccccacacctgggcctccccctgccactcccctcccttgctcccctctgtccccagggatcaaacagaagcagccgtgggcaaaatacaatttcatttaacaaaaaaaaaaaaaaaaaaaaaaaaaaaaaaaaaaaaaaaaaaaaaaaaaaaaaaaaaaaaaaaaagggcggccgctc

SEQ ID NO: 1376 - DNA, 2485 bp, Homo sapiens
  misc_feature (2479)..(2479): n equals a,t,g, or c
gatttacacagcatcatgtattgaatattgatttctcctttttcatagcattgaaaaggtgattatatatgtgttggtctagttctgtgctattttttttccactggcctgtttgtctatcctttgtttactaccaccaagctataactcttgatagctggtaatgaagtcttccaattttgttcaccctcaagattgtcttctggcttttcgtatttccaaataaattgtaaaattgatttgccatttttcacacacacaccccttgctggtttcttgattgggattgcattaagtcttttgatgatttgagaattgacatccttacagtattgagtattctaacctgtgaatatggtagaaaccattgtgtattcagttatttgatttctttcagttatgttttataattttctgtgtagaggtcttgtatatgtttcattagatttattctttggtatttgttttttgatactattataaatggtattgttttaaatttttattttctaattatagcaacttgtatgtagagtcatgtgccactttatgatggggatatgagaaatgcattgttaggcagtttcatcatgcaaacatcatagagtgtacttacgcaaatcatgcaaacatcatagagtgtacttacacaaacctaaatggtacatgctgctacacaccttagctgtatgatatagccagttgctcctagactgcaaacctatacagcatgttactctactgaataccgtaagcagttgtgacacaatgatgagtatttgggtatctaaacatatctaagcatttttaaaatgtacagtaaaaatgtaaaaagtaaaacatggtacacctgtttagggcacttaccgtgaatggagcttgcaagactagaagttgctctggaagaatcagtgaatgagtgaatkcttaggacatcactatacactactgtagactttataaacactgcacacttaggctacactaaatttatttttaaaataaagtaattgcaatatgatgttatgacagctatgatgccactaggcagcagaaattcctgagctccattataatcttataagaccaccgttgtatatgtgatccttcgttatgtgggacatgactcgatataaaatggattgttatattgaccttttatctgatgacttaactaaatttacttattaattttactagttatctatagtctcatttttcctgtgtacacaattaatttatttgtaaatactaaatgtttccttttttcattactcatatatttttttcttgccttactacactgcctagtaaaatatataaaatatgtgcttcacggaaaggggactttgattaaggacatgcctccttcagagctttttcttttccccctagtatttccaacttggggatgtttggcatcgacgaatttactgcagtgattaaccctcctcaggcctgcattttggcggttgggaggttccgacctgtgctgaagctcactgaggatgaagagggaaatgccaaactgcagcagcgccagctcataacagtcacaatgtcaagtgacagtcgagtggttgatgacgaactggcaaccaggtttcttaaaagttttaaagcaaacctagagaatcctatccgacttgcctagtcctcaaagataagaagttggtgttcagcttagttgattcagtagttgttaccaagaaacatatgttataggaaaacaacttggtatttaagtatgaagtggatgaaatgtttatttatttaaggtgaaagcatttgacccagggtgtcttcatcttcaatttgggtttaatgttatagaaataaatgatgataaactctaactaataaaggaaagagaatatttggttactcagatccatttttaacctctggtgctgtataaagggaatattaaactagatgtaaatcaaagtatatgtttggctcatttgagcattttggaatatttgagaatgtatgatacatgtaaaattaaaaaaactattagaactgtaccataattatgttgaaggtagaagtgatcttcaaagagatggccattaacttagcagtgggacctcacttttacaagcactgctctagatatacttgaagaatttaatakgtacagaagtttattctggataataaataaataaggatcacactgtattaggggttatggcaacattattgaattttttatgtacataaagccatatgtttagggtggtttctatctgtcttgtttttcacttatataacactgtgaacttctaaagmaagaggataaaagaagcatgaatgaaaagaatgacatttcaaaaaaatggttcaatgaaaaactatagctaaaatatgtaaacctttctaggtaaaccgcttgccttcatcttgagtcggaatatatttaaataaattgtgttatctcttgccaaaaaaaaaaaaaaaaaaaaaaaaaaangggggg

SEQ ID NO: 1377 - DNA, 1793 bp, Homo sapiens
ccacgcgtccgatttgtccctattgttctatttttaaataaatatacaatcattgttttgcattgaaatgcatatttgtacattttatttgataatattattttgggaaattgtaatctgttgttttgtttgtttgttaagggaagcacgaagaagaatttacaaatgtgaataaaattgtttaagattaccaatagtttcttttctggacttgaaatagttacgtttctaaatatgagaaaaataactttgcctaaaatttcagtataatgaccaggtcttctctccattttagagaagcagtccaatgtggaacagataagacggcagcgatccagtgaggtcaattccccacagaggaaagctatgcatacctaacttaatggaaggtaaacttctcttcaattaatgatgtcctccttttctcaaggtgtccaaagacaggaggtggtctgtaaaaggttggatgacaactccattgtccagaacaattactgtgatcctgacagtaagccacctgaaaatcaaagagcctgcaacactgagccctgcccacctgagtggttcattggggattggttggaatgcagcaagacttgtgatggtgggatgcgcacaagggcagtgctctgcatcaggaagatcggaccttctgaggaggagacgctggactacagtggttgtttaacacaccggcctgtcgaaaaagagccctgcaacaaccagtcatgtccaccacagtgggtggctttggactggtctgagtgtactccaaaatgtggtccaggattcaagcatcggattgttctgtgcaagagcagtgacctttctaagacattcccagctgcacaatgtccagaggaaagcaaacctcctgtccgcatccgctgcagtttgggccgctgccctcctcctcgctgggtcacaggagactggggccagtgttctgctcagtgtggccttggacagcaccttggctgatgctggaagaggagggcagtcagtgtcacttctgggatgtgccccagcactgagaacaaaatgcaggcatcccccggggcagcatcagagtgcctttctagagggagccacgcacagaatgtaacaggatgaaacagtttcaagtaagccttgaattgaaacctgagtaggttaaaacaattctatttcatagcacatcacaatactgctgctactctgtagccacccccatggctacatgatgccctattcctaaataataacaatagcattgtcagtggaggctgggccaccatggcagaccttccaaaagtagtgagctacatagactacttagggaaccccagggaaactggtaccctacacctgggagcagtatctgccactgggataaagtcctactaaaaaaggaacggtaaatgtaccctaatgattaaaccccgtgagatacatatgatttccaaatagtccatttcattaggaacttttttgtttgaatgaatgtcacataggtatcctcagtaacacagaacgaaattacctttgtattattgtgattagttgttgcttattattttatactcagtaataatgtggtacactgttaatttttttgcttttgtaaattatattctaatttattgccatgtttcctaacacttgtcctacattcattctcctgcttgtaatgaaaatgaaaaaatcattgtaacacttgatggagtgaaattccacgccaggcacagaatttttttgacatagataatttagtaaaataaaaattcagcttataataaaaaaaaaaaaaaaaa

SEQ ID NO: 1378 - DNA, 1005 bp, Homo sapiens
ggcagagccagattaccctttcttaataaatatctcagggtaaggaaagaaagaaactgtatagatatatttaaaatagagaatactttccaagcaatacatgatacttttcctaaaagactctaaaagaaaaagattctgtaactctcttttagcaccaaattattgtttatcttgctggatattttatatgaacagtgttaatttagatgcactaaagcaaaggtaggcaaactacaaccatgagtcaaacatggccacacccattcatttgctattgtctaagctggttttgcactacaactgcagagttgaatagatgcagcagatcctttacagaaaaagttttctgacctcaattctaaagtaattgtagtagggagctggaggactttctttccctttatggtaattttttgagctacaaaagagccttgcagaaatgggtgaagggattaatcttttaaaaataaatrctatatattaggaaaataaaaaatattttagagccaagttaacaagtacttcagcaaaacatgctagttttatgcaggggattctgtattccaaatggatacaatccgacatatataaaagaaacagattcttaactattgactcttatttagcaaatgcaacagacaagaatatccaacttgatatttataaaaggtagactttttccaaaagtgtataagctcaaagaaaaaatgcaacctgtcaattaatatatactatgtaatatatattattgtgtatttatgattagccatcataaatgcccattgcttggcctttaagaataatcacaaaatatttatattaaattatacaaatttgttgcagaagtgcctgtgagagaaatcttcaaaagacaaacctggtcaaataataataattttaatgtcaatgattttttttgtctgactcatctgagttatatttagttttcaagtggcaataaatttatctaccttcwwwaaaaaaaaaaaaaaaagggcggcc

SEQ ID NO: 1379 - DNA, 384 bp, Homo sapiens
gacccacgcgtccggcaagaagctagagagtgacttaggatacagtgtaaatatattagtaaattaagacagttctgcaagatttttaggacttctatttttcttctattcatcatttatgaagtattcttgctagaaatagtttatgtctctctatcttgctgagtgatgaatactcggccaggatgctaaaatgtggtttcatgaagtatgttgtgtttctgtctgttcttgtttccttccttgaaatgtgtaaaagtgaaaaacatactaatcataaatcaggtattcatcataagcctaaaaaaaaaaaaaaaaaaaaaaaaaaaaaaaaaaaaaaaaaaaaaaaaaaaaaaaaaaaaaaaaaaaaaaaaaaaaaaaaaa

SEQ ID NO: 1380 - DNA, 548 bp, Homo sapiens
  misc_feature (537)..(537): n equals a,t,g, or c
  misc_feature (539)..(539): n equals a,t,g, or c
cagggctggatcattccttgttcataattctttatattatttagtgtgtgtgtgtgtggggttgcatttaggatagtcagtagcatcctggcctctagcctacagagaccagtagcatctcccatcatgacaaccacrmatgtccgccagacattgccaaatgtcctctggggacacagttgcctccagttgagaagcactagtttaaatttagaaaacaaattgggaaggatatataacaaattcgtaacagtaccctttgggatatgggattggaggaatggctttcactcctcttttaacataaaatttttaaaactggattttgcctccccctacagacattttttttttattttcaactgtggttttttttcccattttataaaaagattaaccttgaaaggtaatatcacatttcaattttagtcattatggattttactgtggaaggcagttctatacacctatggctgcttttcaacctagttttattggattttgtttgacattgkgaatgkccyttttcccaaagangnggatagaca

SEQ ID NO: 1381 - DNA, 499 bp, Homo sapiens
cccacgcgtccgctctagcaagtcacagcagtttagggttgacatagcagagttcaaatgtctgacttttctcactgttgtgtacttgttggccaggatgcctcatttgactttgtctcacccatagtcattttcagatccaatggcccagtggcattctggcagctcttttctattcttcattcttggttggaacctgaaggtagtatgctcctctggctttggtctaatatttgaggccactctgccttcctagtatttgtataatatggccccttaagcccctaccgtgatggctaggaagtgggagtgaaagttaaggctcttgggatggtgggaggaaagacaattgatttatttttgagcacgtatccaaaataaataaataatatatttataaacataaatgtatatgtctatgtgtgtatgtatgcatttatgtatgtattatatataaaatgatttatataaaaaaaaaaaaaaaaaaaaaaaaaaaaaa

SEQ ID NO: 1382 - DNA, 1289 bp, Homo sapiens
  misc_feature (433)..(433): n equals a,t,g, or c
  misc_feature (538)..(538): n equals a,t,g, or c
  misc_feature (598)..(598): n equals a,t,g, or c
  misc_feature (629)..(629): n equals a,t,g, or c
  misc_feature (710)..(710): n equals a,t,g, or c
  misc_feature (1177)..(1177): n equals a,t,g, or c
caagcgcgcaattaaccctcactaaagggaacaaaagctgggtacgggccccccctcgagttttttttttttttttttgtatttatctagctaaactttttgttttgcaattaacctaaatgctcttcttcaatttattttgttatctaggctcagtattaatttcaggtcagattttcactgttttaagccaaaatatcacaaaacgcagagtaacaacaacatgatctttaaaataagtttaaagagggtgtagccagaatctcccttactcctgatgtttcttagtaattttcttagtaatttactgactttctaatctgctccttggctattaattcccacttgcccatgctgttgaacccaatctctctcagacattgcaaaatcccattgtagtggtccctatacctagaacgattgaataattttnctttaacaaatctcatcatccagatacacctgttgatgtgtaaaatattacacaaacaaaaatcaaaaatttcaagtaaaaagtaaacccaaacattaaaggaanggctaaaataagaagttcttctctctaaactcagtctaaccatcctttccccaaggtaancattgttttcctgacccttccaaataaatgngtatgaaatccggycctggaatttgcactaaaagamtggtactatatacaccattcagcaacttggytttccycatttaanggawatayctwatagaccttycwawayctgcacatacagacccacytcttccggtttcatagaagtgacataattcaactagtyccycattgatgwakgtcctgcttttttycctattgcaaataatactgcaatatcattgtgtgtatgtattatgcatgtatgttcatcttggcaaactttgaaaatatatccttatagtaaattacatgcatttagaagttttgatgcaagtggagaattgccattcacaatgttcccatcaatttatatatccataaaaattgtatgaaagtacccttttgcttatatcctagacaacattggtatcaaaacgtttttattctgaaagacaaaaaaggaagaaaagatataaaactgtttttatttgtgtttctttttttttttaacaacagaaacataacactttcccaggggagttgtcgatacatttcccactatcctcnagactagttctctcctcgtgccgaattcctgcagcccgggggatccactagttctagagcggccgccaccgcggtggagctccaattcgccctatagtgagtcgtattaccc

SEQ ID NO: 1383 - DNA, 1182 bp, Homo sapiens
ttttttttttttttttttcagctttccaacatttattccatggaatgagtgcacagcattttcatgaactacctcagggctacatcagtacaaaatagtttaaattagtaaaataaagtagtttcaaagggaaatcattgacgacttcaggataagtgccaccaccatttgggaacagaggatagaaggtagccatgtggttattccatgatgcaggaatcaggtcggcaggtggactgtcattgctgtcttgcggcagctggcctctgccttcagggtaccaccgtctccaggacacaaatgggcagcagaaaaatgtcaccttgttgatttcttcaaagaggttgggtgacacctcaccattccatatgaacatgtacccctcaggaaggccagccaccagctccagcagctcaatgtcaaacactaatacggcactgccgggcacttctccatccacgccagcttccccatagcccaggtgaggcggaatgatcactgtccgtttctcgccaacgcacatctctctgagacccatgtccatccccaacacaacttgcccagatcccagaacaatattgtaagttttgcctaaattccacgtggagtccagcagggtcccatccagaagtgaggcattgtagtgatatttgaggtaatctcccttcttactcagcactgagcagtcagggggtttgtagtgggaggtgatgctgatggagtccgaagggttgtggaagtcgatcacatggatgtcaaacaccagcacagccgagccggggatattccctcttccttcctctccataccccaggtgaggcgggaccacaatccttcgcttttctccaatgcaaacaccaagtagaccttcatccatcccaggaatcacgtagccctgcccaatgtacgtgtcaaacgtgcggttccgagagtagctggaatcaaagagggtgccatccagaagcgtgccattgtaatgatacctgagaaagtccccactttgacttatccgctcacagttttcaggtactaccttgttctcaatggaaatgctgtccttggggttatggaggtccaataatgcaacatcaaacaccagagatgcctgaccgggaatgtctttcccatctccatcctctccataggccagaaaaggaggaatggtgatgatgcgctcgtgcc

SEQ ID NO: 1384 - DNA, 1648 bp, Homo sapiens
ggcacgagttgcgttctacatccaactccaagaggaagtcacctcatgtgtcaccagcagaagggctgaagtgacaggatgttcattgacctgtcagtggatctgaaagttctctaaggagagcctgggcaagcattcttaggttgatgctggggcccagagtagcagtgagcatcctgtgtgaagatggcatttctcactgattattggaaaagcactagaagagccacgtgctggagccattgtccagccttgccctggaggagcagtgtctggctttgtccctagattggtccactgggaaaactggaagggctgtggagaccgtctctcaggacttgtttgggaaccagaagaggctgacgaataacattctgccgggcttcttcatgggttccctgtgtctagggccggggaccagcccttgaagatcatcagcagtgactccacagggcagctccacctcctgatggtgaatgagacgaggcccaggctgcagaaagtggcctcatggcaggcacatcaattcgaggcctggattgctgctttcaattactggcatccagaaattgtgtattcagggggcgacgatggccttctgaggggctgggacaccagggtacccggcaaatttctcttcaccagcaaaagacacaccatgggtgtgtgcagcatccagagcagccctcatcgggagcacatcctggccacgggaagctatgatgaacacatcctactgtgggacacacgaaacatgaagcagcgttggcagatacgcctgtgcagggtggggtatggagaatcaagtggcaccctttccaccaccacctgctcctggccgcctgcatgcacagtggctttaagatcctcaactgccaaaaggcaatggaggagaggcaggaggcgacggtcctgacatctcacacattgcccgactcgctggtgtatggagccgactggtcctggctgctcttccgttctctgcagcgggccccctcgtggtcctttcctagcaacctaggaaccaagacggcagacctgaagggtgcaagcgagttgccaacaccctgtcatgaatgcagagaggataacgatggggagggccatgccagaccccagagtggaatgaagccactcacagagggcatgaggaagaatggcacctggctgcaggctacagcagccaccacacgtgactgtggcgtgaacccagaagaagcagactcagccttcagcctcctggccacctgctccttctatgaccatgcgctccacctctgggagtgggaggggaactgagcttgaaatcatgaagccccttcccacaaggaaaccaggagggagactgcgagtgagtgcccgggaccacctcatcagagatgcttactgcagccctgcaggtgcctgtgcactgatggaatccacagtgtagtcagaaaagctgttgacttctcttaaatcagcttccctgctgggcccctgaaagtggactgggtgattctgtctggcagagagtggggaaaagacgcggtttccagcttgcagatttgttaagtttctcaggcagattttgactttcagcctttcatacttgtttaagcaactatttgtattaaatgaagttttttgaaaaaaaaaaaaaaaaaaa

SEQ ID NO: 1385 - DNA, 1058 bp, Homo sapiens
ggcacgagtgatgatgcacggaggaccccctacccaccctggaatgactatgtcagcacagagccccacaatgttaaattctgtagatcccaatgttggcggacaggttatggacattcatgcccaatagtataagggaactcaagggaaaaggaaacacacgcaaaaactattttaagactttctgaactttgaccagatgttgacacttaatatgaaattccagacagctgtgattattttttacttttgtcatttttcatcaagcaacagaggaccaatgcaacaagaacacaaatgtgaaatcatgggctgactgagacaattctgtccatgtaaagatcctctggaaaaagactccgagagttataactactgtagtataaatataggaactaagttaaacttgtacatttctgttgatcacgccgttatgttgcctcaaatagttttagaagagaaaaaaaaatatatccttgttttccacactatgtgtgttgttcccaaaagaatgactgttttggttcatcagtgaattcaccatccaggagagactgtggtatatattttaaacctgttgggccaatgagaaaagaaccacactggagatcatgatgaacttttggctgaacctcatcactcgaactccagcttcaagaatgtgttttcatgcccggcctttgttcctccataaatgtgtcctttagtttcaaacagatctttatagttcgtgcttcataagccaattcttattattatttttgggggactcttcttcaaagagcttgccaatgaagatttaaagacagagcaggagcttcttccaggagttctgagccttggttgtggacaaaacaatcttaagttgggcagctttcctcaacacaaaaaaagttattaatggtcattgaaccataactaggactttatcagaaactcaaagcttgggggataaaaaggagcaagagaatactgtaacaaacttcgtacagagttcggtctattaattgtttcatgttagatattctatgtgtttacctcaattgaaaaaaaaaaaa

SEQ ID NO: 1386 - DNA, 1332 bp, Homo sapiens
ggcttcctgtctgccatttcttcctgcagtgttctgcccagaatgcctgcccttctgttactccatgtggaaatgctctacatttttaaacttaatttccttcattaatctttctctaatctgaggaggatataactctgtcctttgaatacccctgtagaacatcatgcctctcttagggcctttctctggctctgcattgtcttatgaaattctatcttacacctccctttttggattgagctcctgaaggcaaggactgtcttactcacattatcttcatcatggtgccttgcacctagatgctcaagaaatatttgtatgattgaattaaagttgaaagttgcagtcaatctttttgaagattattctggcaacagtgtgtatcagagaataaagagcctgaaatcagaaagtacaaatagcagaaggtcttgggggatggtgcccagtaagaacaggaaagatcagaagagtcaggaacttactgcatatgggggaggaggtaataatggtctaaggcgcgtggatcctcaaggcttagakaactgagamgccmgcaggaaataaaactgtagcacagttgggttattgccattttggtgacagtttcatgtgtttttttttttttttcctgtgtgagtgtgattttgctcaacatgagtttggtaactgggatcagaaaggttttgttccttggtacattttacagaatggttgctaagccaacagaactcagaattgagttcaaatcccagctatcccacttattctctgggggtttggggtaagtctcttagatgctgtaaaatttaagttcctcagtaatgaaatgggggcacaaatagaacctccctcagagtcgtagtgaaagtcgaataaggcagcagtgattgagctcttattatgcactaggcactgttctaagcacttgaacttacttaaccttcatagcatctccatgaggcaagtggtggtgttgccatcacaatacgtgtgaagagaaaggaggcagagagattatgatgacttgcccaaagaacacagagttcacactgaattggaactggaacttgggcagtgtggttgcagagcacccagtcttagctgctgtgctgtttctgactcagtatctgtcacatagtaaacattccattagaatcagggacagactggaaatttttcaaccatttaaaaatgtagaaactatggggcatggtagtccatgtctgtgatcccatgggaagatcgcttgaggctgggagtttgagagcagcctgggaaccatagcaagtcccctcctctaccaaaaaaaaaaaaaaaaaactcgag

SEQ ID NO: 1387 - DNA, 2010 bp, Homo sapiens
gcacgagtagaagtcaatcctaaggtttctctgctctggctaagaggatgtaaatttggattcttagagggcatggcacccccagtccctgcccagataaagtagcacagtggcaggcagcacctctgtctgttgctgacgttggggggcttacacacccacctcatctccgtgcacagccatgactggccctgccggcagctggggtgcaggtaagggtctctctcatagaggggagctgcagctgagaactggcgaggccccttcctccaaggccctagctggcccccgggtgaacctgaggtggcaggttcaggttttcaagatggtgaggtctcgctgtctgctggacagtacgttaggctctcagaactcatgggtgtggagctggacctgtcccgggccagtggacccctgtgtgtgggggatttggggtgctgtgggcctggttatgcactggcagatggaccttgctttggtccagctcttttccttaccctggctctgacgtgggaaggcttggagggcccgtctcatcacccccgttcgccctcagctgtccctttcccttgtcgcctggccgctgcctcgcccgcctgaggcctcctagcaggcagcctgggtgtgagttgagcctctctcttttccctctggtgggaaagtggcctttccctcaacacctgctccccggccccagaggaacccacctgttttggagctcagcttggcccagcgtttccttggggaagggaaaggagggctggacagcactgatccgggcaggcagcgtgtgcagcagtggccagccagagtgccaaagatgcacggggatgtggtgtgtggctccgggccctcgacatctctgctttgggggatttttaccttgtctgcacacttgtcaggggagaggggacagcaaggtgggaggttgaagagctttgaggctcagcagcatgtttgtggcattcggtggacaccatggccttgggcggctggacaggtttttgtgatgtgaaggacatgcatggggcacatggtaagcttggcaagggctccaggaacgctgacgaagggttttaggacccccacccccatgcctgtaccagggctggcctccagagcgggtgaggacagagcagctgtgggcttttcattctgaggtcttggcccccctggccaccgcaagggactctttgcttgtcagggcttgcaaaaaccaaccttcgagaaagaaaagggaactcttcacgttgaatgttgactttgtgtgtatgcgtgtgtgtgtgtgtgtgcacgcgcgcgtgtgcgtgtttacttcatggaattttgttttgtgaaattcccctccaatcgtgtcagaatttacctccatgccccagtcacactgttggttctgcgctctgaacctgggtgtagctcatttgaaggactctcttctgcgtttcctaacagttatttggtggtctcaagagttgaggttgtggagggttgggagaaactgaagttctatacatttccatagagtttacatcctgcagttaaaaggcagggagggctcagcccgggccccacagctccaggccatccctacgggctgcccacagtgcccccttttctctagccgaatctttttcgaacagcccgggaaaggaaaacggattcacttgctgattttgttcacggcggaagcaccatgttccgttcctttttcaggttcagtttgttgtgtaaatggcggttttttctggtgtgagctttggtgatggtggcagggctcctttgaagagatggttccacctcgtggtctgaagaacaaaccagagaagagtctggtttggccagaggccccctccggcccacgtcaccctgagtacacccctctgattgctctgctgtcaagaagcacgtttccaccagctgtattcaacactacaatgcattttttaaactatatttgcatccaagacaataaagacaccttattttttttgaaaaaaaaaaaaaaaaaaa

SEQ ID NO: 1388 - DNA, 2059 bp, Homo sapiens
gcacgagtagaagtcaatcctaaggtttctctgctctggctaagaggatgtaaatttggattcttagagggcatggcacccccagtccctgcccagataaagtagcacagtggcaggcagcacctctgtctgttgctgacgttggggggcttacacacccacctcatctccgtgcacagccatgactggccctgccggcagctggggtgcaggtaagggtctctctcatagaggggagctgcagctgagaactggcgaggccccttcctccaaggccctagctggcccccgggtgaacctgaggtggcaggttcaggttttcaagatggtgaggtctcgctgtctgctggacagtacgttaggctctcagaactcatgggtgtggagctggrcctgtcccgggccagtggacccctgtgtgtgggggatttggggtgctgtgggcctggttatgcactggcagatggaccttgctttggtccagctcttttccttaccctggctctgacgtgggaaggcttggagggcccgtctcatcacccccgttcgccctcagctgtccctttcccttgtcgcctggccgctgcctcgcccgcctgaggcctcctagcaggcagcctgggtgtgagttgagcctctctcttttccctctggtgggaaagtggcctttccctcaacacctgctccccggccccagaggaacccacctgttttggagctcagcttggcccagcgtttccttggggaagggaaaggagggctggacagcactgatccgggcaggcagcgtgtgcagcagtggccagccagagtgccaaagatgcacggggatgtggtgtgtggctccgggccctcgacatctctgctttgggggatttttaccttgtctgcacacttgtcaggggagaggggacagcaaggtgggaggttgaagagctttgaggctcagcagcatgtttgtggcattcggtggacaccatggccttgggcggctggacaggtttttgtgatgtgaaggacatgcatggggcacatggtaagcttggcaagggctccaggaacgctgacgaagggttttaggacccccacccccatgcctgtaccagggctggcctccagagcgggtgaggacagagcagctgtgggcttttcattctgaggtcttggcccccctggccaccgcaagggactctttgcttgtcagggcttgcaaaaaccaaccttcgagaaagaaaagggaactcttcacgttgaatgttgactttgtgtgtatgcgtgtgtgtgtgtgtgtgcacgcgcgcgtgtgcgtgtttacttcatggaattttgttttgtgaaattcccctccaatcgtgtcagaatttacctccatgccccagtcacactgttggttctgcgctctgaacctgggtgtagctcatttgaaggactctcttctgcgtttcctaacagttatttggtggtctcaagagttgaggttgtggagggttgggagaaactgaagttctatacatttccatagagtttacatcctgcagttaaaaggcagggagggctcagcccgggccccacagctccaggccatcccctacgggctgcccacagtgcccccttttctctagccgaatctttttcgaacagcccgggaaaggaaaacggattcacttgctgattttgttcacggcggaagcaccatgttccgttcctttttcaggttcagtttgttgtgtaaatggcggttttttctggtgtgagctttggtgatggtggcagggctcctttgaagagatggttccacctcgtggtctgaagaacaaaccagagaagagtctggtttggccagaggccccctccggyccacgtcaccctgagtacacccctctgattgctctgctgtcaagaagcacgtttccaccagctgtattcaacactacaatgcattttttaaactatatttgcatccaagacaataaagacaccttattttttttgaaaagaaaaaaaaaaaaaaaaaaaaaaaaaaaaaaaaaaaaaaaaaaaaaaaaaaaaaaaaaaaaaa

SEQ ID NO: 1389 - DNA, 1284 bp, Homo sapiens
  misc_feature (47)..(47): n equals a,t,g, or c
  misc_feature (277)..(277): n equals a,t,g, or c
ggagccccaccgcggtggcggccgctctagaactagtggatcccttngggctgcaggawttcggcacgaggcgccagatcccggttggagagccggggtgcaggcgctgagccgggattggagtgtggttggagttggggagccaagggtgtgtgccggtggccggggttggggtctccgccgcgccctccggccggctcccgctcactgcgctggctcctccgcaggatgcagggtgccgggaaagcgctgcatgagttgctgctgtcggcgcagngtcagggctgcctcactgccggcgtctacgagtcagccaaagtcttgaacgtgtaagtgtagacgcggcccaggctgggagacaggggcgggggtgaatggcgaggagactggcggatgggaggggtggcggcgggagaactcggctagccggttctgacctaggtccccgccttgccctcgcagggaccccgacaatgtgaccttctgtgtgctggctgcgggtgaggaggacgagggcgacatcgcgctgcagatccattttacgctgatccaggctttctgctgcgagaacgacatcgacatagtgcgcgtgggcgatgtgcagcggctggcggctatcgtgggcgccggcgaggaggcgggtgcgccgggcgacctgcactgcatcctcatttcgaaccccaacgaggacgcctggaaggatcccgccttggagaagctcagcctgttttgcgaggagagccgcagcgttaacgactgggtgcccagcatcaccctccccgagtgacagcccggcggggaccttggtctgatcgacgtggtgacgccccggggcgcctagagcgcggctggctctgtggaggggccctccgagggtgcccgagtgcggcgtggagactggcaggcggggggggcgcctggagagcgaggaggcgcggcctcccgaggaggggcccggtggcggcagggccaggctggtccgagctgaggactctgcaagtgtctggagcggctgctcgcccaggaaggcctaggctaggacgttggcctcagggccaggaaggacagactggccgggcaggcgtgactcagcagcctgcgctcggcaggaaggagcggcgccctggacttggtacagttgcaggagcgtgaaggacttagccgactgcgctgctttttcaaaacggatccgggcaatgcttcgttttctaaaggatgctgctgttgaagctttgaattttacaataaactttttgaaacaaaaaaaaaaaaaaaaaactcgag

SEQ ID NO: 1390 - DNA, 1288 bp, Homo sapiens
  misc_feature (1283)..(1283): n equals a,t,g, or c
  misc_feature (1285)..(1285): n equals a,t,g, or c
  misc_feature (1287)..(1287): n equals a,t,g, or c
gcctccgccccctcaaccttcgcggggcgcgggccgcagcttttcggttcacagcgggcagggaaagccgcgggaagggtactccaggcgagaggcggacgcgagtcgtcgtggcaggaaaagtgactagctccccttcgttgtcagccagggacgagaacacagccacgctcccacccggctgccaacgatccctcggcggcgatgtcggccgccggtgcccgaggcctgcgggccacctaccaccggctcctcgataaagtggagctgatgctgcccgagaaattgaggccgttgtacaaccatccagcaggtcccagaacagttttyttctgggctccaattatgaaatgggggttggtgtgtgctggattggctgatatggccagacctgcagaaaaacttagcacagctcaatctgctgttttgatggctacagggtttatttggtcaagatactcacttgtaattattccaaaaaattggagtctgtttgctgttaatttctttgtgggggcagcaggagcctctcagctttttcgtatttggagatataaccaagaactaaaagctaaagcacacaaataaaagagttcctgatcacctgaacaatctagatgtggacaaaaccattgggacctagtttattatttggttattgataaagcaaagctaactgtgtgtttagaaggcactgtaactggtagctagttcttgattcaatagaaaaatgcagcaaacttttaataacagtctctctacatgacttaaggaacttatctatggatattagtaacatttttctaccatttgtccgtaataaaccatacttgctcgtatataccccctgcctccttctgttccagtcagccaacatatgtacataaaagaacacacaaattcaagaagttggaagattaaattatctgcttatttagtgtaggatggtcaggtagctagctataagtgaaaggaaattttgctgaagagactgagaaatgggtagtggaatgactatcaagatgacctcaaactatttaaaaacattttaacttgccatgaagaatcttgatgatttttgtataaatgttgtataaaattcttttacagctacagatttttaaataggatcattgtaargattaatgagataatgttttaacatagtgcctgggtccatgataagtgttaaatttttcaattaccctcagtaactgataatgtagcaagaaaatactctatattcagacagacctgaatttgatcccagctctatactaccntngna

SEQ ID NO: 1391 - DNA, 1980 bp, Homo sapiens
  misc_feature (1356)..(1356): n equals a,t,g, or c
gggccagcagcagaacttccactcggtgcgggagatgttcgagtcacagaggatcggcttgaacaactctccagtgaacgggaatagtagctgtcaaatggccttcccttccagccagtctctgtaccgcacgtccggagctttcgtctacgactgtagcaagttttgacacaccctmaaagccgaactaaatcgaaccccaaagcaggaaaagctaaaggaacccatcaaggcaaaatcgaaactaaaaaaaaaaaatccaattaaaaaaaacccctgagaatattcaccacaccagcgaacagaatatccctccaaaaattcagctcaccagcaccagcacgaagaaaactctattttcttaaccgattaattcagagccacctccactttgccttgtctaaataaacaaacccgtaaactgttttatacagagacagcaaaatcttggtttattaaaggacagtgttactccagataacacgtaagtttcttcttgcttttcagagacctgctttcccctcctcccgtctcccctctcttgccttcttccttgcctctcacctgtaagatattattttatcctatgttgaagggagggggaaagtccccgtttatgaaagtcgctttctttttattcatggacttgttttaaaatgtaaattgcaacatagtaatttatttttaatttgtagttggatgtcgtggaccaaacgccagaaagtgttcccaaaacctgacgttaaattgcctgaaactttaaattgtgctttttttctcattataaaaagggaaactgtattaatcttattctatcctcttttctttctttttgttgaacatattcattgtttgtttattaataaattaccattcagtttgaatgagacctatatgtctggatactttaatagagctttaattattacgaaaaaagatttcagagataaaacactagaagttacctattctccacctaaatctctgaaaaatggagaaaccctctgactagtccatgtcaaattttactaaaagtctttttgtttagatttattttcctgcagcatcttctgcaaaatgtactatatagtcagcttgctttgaggctagtaaaaagatatttttctaaacagattggagttggcatataaacaaatacgttttctcactaatgacagtccatgattcggaaattttaagcccatgaatcagccgcggtcttaccacggtgatgcctgtgtgccgagagatgggactgtgcggccagatatgcacagataaatatttggcttgtgtattccatataaaattgcagtgcatattatacatccctgtgagccagatgctgaatagatnttttcctattatttcagtcctttataaaaggaaaaataaaccagtttttaaatgtatgtatataattctcccccatttacaatccttcatgtattacatagaaggattgcttttttaaaaatatactgcgggttggaaagggatatttaatctttgagaaactattttagaaaatatgtttgtagaacaattatttttgaaaaagatttaaagcaataacaagaaggaaggcgagaggagcagaacattttggtctagggtggtttctttttaaaccattttttcttgttaatttacagttaaacctaggggacaatccggattggccctcccccttttgtaaataacccaggaaatgtaataaattcattatcttagggtgatctgccctgccaatcagactttggggagatggcgatttgattacagacgttcgggggggtggggggcttgcagtttgttttggagataatacagtttcctgctatctgccgctcctatctagaggcaacacttaagcagtaattgctgttgcttgttgtcaaaatttgatcattgttaaaggattgctgcaaataaatacactttaatttcagtcaaaaaaaaaaaaaaaaacggcacgag

SEQ ID NO: 1392 - DNA, 2501 bp, Homo sapiens
  misc_feature (521)..(521): n equals a,t,g, or c
  misc_feature (548)..(548): n equals a,t,g, or c
  misc_feature (550)..(550): n equals a,t,g, or c
tcactaagcctcccagctcggtagacatggaagaaaaggtgtccttcctgcattatagaaaaagcacagatatgccagatgtgtgcttcaggcctggttcttgatgtgttaattgaggctaacaggttttagatgattcgtttcatttctaacagaaccagttgttcaaaactattgtcttgtttccagtgccaaagctgtggatattcaatgatgtttatcactctccccctgccgctgcagtcctaccctgcactgctaatcctccctcagcaaacagatgcccctgggaacaatgtaggggtgagcacaaagaaattcaggagaagaaagtacattcatgtaattcaaaattgttatctctatcataagatagtaaaaagcctttgttcagattttttattgtgagcagtgttgtattttttgttaatgtttcaaggggataggttgatattttgatatcacttagaaccgagtcggtaaactacatatttatctttgatcaactaagattctgtttntaaagaaaagaggacatctttggctantnatgattacgtaacagtgaatggcaggtgccatatggatccttggagcacagacggacatcaaccagcaagtatttctcagattctaccctaaaatatgacagtatgtcaggtgtggactaatatatgtaatagctttcaaaaggaactgaacaactagcaagtaaagagtaatttatattaaaagatcccaataatagatggactatggcaagaacctctgaactagtctctctgcttcttctctacctctttacagtgtattatctacactgcaatcaaaatcttccttccaaatgttaagtaactgttcaatggcttcccatgggactcggaataaaagctcacactctttacaatggccctgcaggttcctcatctcctacctccagcatcttcactgtccctctgctccaaccacactgcctctttcttattcctccagacctcccaacacagccctgcccccaagacccttccaatgactctgatcctcttccctgcgctacccagtgtctcactccatcgattcctccacatcctgccaaatgtcacctaaccagaaaggctttgttgaaccaccccagataaaataaagtcccctgcctttacccatcactctctcttgcccggtttaattctttctagcacttacattgtgataatttcttttctgcctcctgcctcttttcattggaaaatatattacatgagaggaggtttgctttattcattgctgaatgttcagcacctagaataatacctggcacaaaataggtcctcaattattatacccaattcctcccagttctcttggaagtttctccattttaccattgaaaattccacatccttgtgattcactttgtcccagtgaattccaaacagttggccatcctacccttaatagatagttgttgaatgaaggaaaggaatgaagaaaaaagaatgaggacagggaaggagggaggaatctaggacagaaaagaagggagagaggaaaaaaaggatgttaatattttcttgttctatatgtagaaagcaaaagagtatttttgtaatcttttttcagcaaatgcctggatcaaattcaatatgattttaaagccatgagaccttctcattcttggttttgatgttgcacggtatcataatacatctgattggaatttcaatatcaggtttaatatactatgcaagctggtataggctctgaaattatgcatattcatgagagcaatcacacccttacttttgatataactggcaaagtaaggtaccacaagagaacaataatcaaagaaaaagggaggactaccagttgttatttacttatgacattttactggaaaaacttaagcaacatgaaagactatttctaaatgaagtactaaaactaacaagacaatgttataaagtgtcatattttctttccttttatacaataaaacattgaaaagctccaccactatgcagccacttcaccagatgcaataatatccaaatgtgaaagtaattaataatattgtagttttaattcccttggtatttcagagatatcctttgaacagcctaaatcaaatcatactggtacttatgagaaatagatatctcttgtgagtccttatattgtgcttcccaagaacctacagtgcatttcagttatttaccttgaaaattcttcagcccatccagagtgggtttggaaatttgtaatcattttgtagaatgtgataagggaggacctgtcttcctaaattctcaagcttggaattttcaagtcagtgtcaggaccataggctctctaatgcatatatatttgccctgagcaaataattatttatctctgtgcttcggtagttgcatctgtatgttaaaaataagattattgctatgttgatttcttatgacatgagagaagaggctttaaaaattaaaaaaaaaaaaaaaaaa

SEQ ID NO: 1393 - DNA, 672 bp, Homo sapiens
ggcacgaggctctgccttccctggtccccactgcccatatctgtggactgccccttccaaagacccctggggggggtggggcattccgcccacccctttcccccatcacttctcgcctgtcagtgattccatgtttcgtaacgggggattctctgcctttttgtatcaaagaacaagcaaatggacccccgcccgctgcaggcgcccatagccatcgggtctctaaagctgagtggctagcagcgtttgtttgtttgtttttttttttttttctgaaggtgggacagtcacttcctcctccctccccacccctgtcgcatccacgtgcgacctggaggactggtcagaaccgttactgtgaatgagtgaagatcctggaggaccctgggccccaggccagctcccatcgctgggggacggtgaacggccatgtgttaatgttacgatgtttttaaaagacaaaaaaaaaaaaaaaacctcaaaagtttttttaaagtgggggaaaaacatccaagcactttaattccaatgtaccaggtgaactgacggagctcagaagttttcctttacaccaactgtcaatgccggaattttgtattctgttttgtaaagatttaataaaagtcaaaaaacttgcaaaaaaaaaaaaaaaaaaaaaaaaaaaaaaaaaaa

SEQ ID NO: 1394 - DNA, 1947 bp, Homo sapiens
  misc_feature (1947)..(1947): n equals a,t,g, or c
gaattcggcacgaggctaactgaaaggtcaaaaattacatccatcagtcatggttatgtgcaagtccttgtagaagcttttattaaagtcatgctaaatcacaagaattgacatttgtaccaatatctgaaacttcttcatgttttttcaataacatacagcttctgcctgtgtagatattatgccatcagttggttctcaaaagtattttaagtgcttcagatgtgtgttcccattatattttgaaaacatgaaaaatgctttaatgcatgtatgtaccagcagtggttacttgcatgtgtagtgtttttcaagaggtctgggtcttaacaaaatgttttcctttatctcagtgctcttctgcctctttttgttggtgtccttgagaacaatacaccttctattccttcattggttacacctttcctgtgacatttagcgagtttcaaacttacttccatatgaggctaagaaacctcaaawttcaggaattgggaaaaataaaattagcacttgcagaagtagcagcagatgggaaaatgccttgattgacattttctttcagcatttaaaatttttggcattttacagcttcatgacaaacagttttgtgcccataccttagaaaatgtggtgctgagttaaataaaggctgtttgagcactggagcagaaaaatgcattatttgcaaactggtggataattttgtgccttctcttctggccaccaagccagtgtagaaacagcaaaaatgtcataaaaattcttatatttaaaacaaaaacaaaagcaaaaacaaacattgaattaaattaagttttgtaattttaaactttaaaaacttctactgaaaatatttccgccaaatgccatcaatattttagactgtacctcgtttgcaaaactgctttgagagggaagagtggacaactcccatcagccttattctcttgagaactatattttggttcctagtaacagcctttccaaagctctactcttggtttttattactcataaatgtttaaattagaaaagaagggaccttgtacatgtgaaacctaattgactctctatattttggacaatttatgtatctgaaatgtgttgtctctgttatatgatgttatttttgccaggagactacaggttgatttagcttgatagctgaaatttgatggaaaactgatttccatttagtcttaccaagtgttgcttctctcttactagacagatatccacttagtaaaatctaaagcagtatgtaaatgaaaccagcaaagagagtagggtttattttataaacattcttaatgctaagtaaccagttgttcaatttattatatgtgtctgaggacattaaaacaccataagrttgtaataattggttgtgccaatgtgtgagggatttacctttaggctctctgtcaccagtgatttactagtgttagctgtttaacacattatctgtatttagtagtgattatttatttacaagttggtggtaattcagcagtcaggactctaagcttttatagttgaattgaggaaatytcgcttttattcatttagctggcaactgcctttattgcagacctctggtgcttggctttcaaggaagcctatgagatgccaaaatcacacctttagagagcaccttgctctaataggtgatgcatgagcaaacagtgagatttgaaggggttttaacataatttagaatgtgaaaaaaatatcaattcatatctttcaagtactaacccctcaaaaaagcccacacatacaaaatatgtgatgtgataccactttgtcttttaggtctttaagtaactgaagttaagcacagaaaaaaaaatcacttcatggaaatttcagtaagaaacccaaacttctaaaaattgcttgcagatgagctaaaaaaaaaaaaaaaaaaaaaactcgggggtn

SEQ ID NO: 1395 - DNA, 2311 bp, Homo sapiens
  misc_feature (2301)..(2301): n equals a,t,g, or c
  misc_feature (2311)..(2311): n equals a,t,g, or c
catacgcaagtcacatgaccatttaaatgtgcaaatgtaagaagattcaatgtgtttacatcaaatgacatattttattgatttattgcagattcagtgcatatgagccaaattgttgagtgtgtaagagctatattgtgtattttattaaattaatatatagttgtgttgcaaaaatatttgggcttatattgtaaatggcaagtgttgccttggtagctgtcgaactctatgagttttgttttttcctgcttccttttccccatggagtgtgggaagcagtgcctcagagcaaagtctcttgtttaatgtatagtctaccaagtactacagtacataatctgttcaaaatgtgtttgagtgagctgatggagctaactgaaaggtcaaaaattacatccatcagtcatggttatgtgcaagtccttgtagaagcttttattaaagtcatgctaaatcacaagaattgacatttgtaccaatatctgaaacttcttcatgttttttcaataacatacagcttctgcctgtgtagatattatgccatcagttggttctcaaaagtattttaagtgcttcagatgtgtgttcccattatattttgaaaacatgaaaaatgctttaatgcatgtatgtaccagcagtggttacttgcattgtgtagtgtttttcaagaggtctgggtcttaacaaaatgttttcctttatctcagtgctcttctgcctctttttgttggtgtcctttgagaacaatacaccttctattccttcatttggttacacctttccttgtgacatttagcgagtttcaaacttacttccatatgaggctaagaaacctcaaatttcaggaattgggaaaaataaaattagcacttgcagaagtagcagcagatgggaaaatgccttgattgacattttctttcagcatttaaaatttttggcattttacagcttcatgacaaacagttttgtgcccataccttagaaaatgtggtgctgagttaaataaaggctgtttgagcactggagcagaaaaatgcattatttgcaaactggtggataattttgtgccttctcttctggccaccaagccagtgtagaaacagcaaaaatgtcataaaaattcttatatttaaaacaaaaacaaaagcaaaaacaaacattgaattaaattaagttttgtaattttaaactttaaaaacttctactgaaaatatttccgccaaatgccatcaatattttagactgtacctcgtttgcaaaactgctttgagagggaagagtggacaactcccatcagccttattctcttgagaactatattttggttcctagtaacagcctttccaaagctctactcttggtttttattactcataaatgtttaaattagaaaagaagggaccttgtacatgtgaaacctaattgactctctatattttggacaatttatgtatctgaaatgtgttgtctctgttatatgatgttatttttgccaggagactacaggttgatttagcttgatagctgaaatttgatggaaaactgatttccatttagtcttaccaagtgttgcttctctcttactagacagatatccacttagtaaaatctaaagcagtatgtaaatgaaaccagcaaagagagtagggtttattttataaacattcttaatgctaagtaaccagttgttcaatttattatatgtgtctgaggacattaaaacaccataagattgtaataattggttgtgccaatgtgtgagggatttacctttaggctctctgtcaccagtgatttactagtgttagctgtttaacacattatctgtatttagtagtgattatttatttacaagttggtggtaattcagcagtcaggactctaagcttttatagttgaattgaggaaatctcgcttttattcatttagctggcaactgcctttattgcagacctctggtgcttggctttcaaggaagcctatgagatgccaaaatcacacctttagagagcaccttgctctaataggtgatgcatgagcaaacagtgagatttgaaggggttttaacataatttagaatgtgaaaaaaatatcaattcatatctttcaagtactaacccctcaaaaaagcccacacatacaaaatatgtgatgtgataccactttgtcttttaggtctttaagtaactgaagttaagcacagaaaaaaaaatcacttcatggaaatttcagtaagaaacccaaacttctaaaaattgcttgcagatgagctaaaaaaaaaaaaaaaaaaaaaanctcgggggtn

SEQ ID NO: 1396 - DNA, 2311 bp, Homo sapiens; identical to SEQ ID NO: 1395
  misc_feature (2301)..(2301): n equals a,t,g, or c
  misc_feature (2311)..(2311): n equals a,t,g, or c

SEQ ID NO: 1397 - DNA, 779 bp, Homo sapiens
ggcacgagatagaataatgcagtggatttctatcatgctaatttattttgctttggagcaggtacctttcctctatggcattattttcttgcatttctcataaaggggaggatgcatcccaactgaatggctcactggcatgtcttttatgtgttcagttgccattcctagctttggaaagtttctatctgtccatgtgtatacaagtcaatgccccatttttgtttttcttttaaccgaggtgtagataaggaaaagggacatttttaattacttaataaccggaaatgcagatgtgtaaggagaatgagaggaatgagttaaagtggttatgcatttttctatagatgagccattacagcaaggaattttacagttgacttctctgaacctagctttaccacagtgattaaatcctatttagaaaggggaatctgatttaaatgtgtgattccttgtatttgctcctatcacaaagatatattaaaggaggtatgccattaatgaaatccactgtcctgagtattatctttcctcctgttgtactttctcagagactatggcagaatatctggatcttccttggattttgtacacatattgtagtgaaatgtgtcctacatctgaaattgcatgggactcatgcccagcaatctggttctaggcctttgacacctgataatatgagagcaattggccagccaatagccataagcccagaggattttagagcttcatgtgtggcttttaagagcaggtttgaaaaaaaaaaaaaaaaa

SEQ ID NO: 1398 - DNA, 715 bp, Homo sapiens
ccacgcgtccgaatcgatggaactatacatcaggtgtatgtgctgaagcggccacatgtggacgagttcctccagaggatggggcagctttttgaatgtgtgctctttactgccagcttggccaagtatgcagaccctgtggctgacctcctagaccgctggggtgtgttccgggcccggctcttcagagaatcatgtgtttttcatcgtgggaactacgtgaaggacctgagtcgccttgggcgggagctgagcaaagtgatcattgttgacaattcccctgcctcatacatcttccatcctgagaatgcagtgcctgtgcagtcctggttcgatgacatgacggacacggagctgctggacctcatccccttctttgagggcctgagccgggaggacgacgtgtacagcatgctgcacagactctgcaataggtagccctggcctctgcctgcctcccgcctgtgcactctggaacctctggcctcaggggacctgcctgtcctcagctccctgggagctgaaagtgaggatactccgtgctccaggccacagggtgaatgtggccatgcctacctgttttgtttttttaagaacagaaacaactattttaaaagaactcttttaagaaatttcataaagggacatgcattttactgggtttgcttttcttaaaacataccaaaaaagaaaaaaatagaaaaaaaaaaaaaaa

SEQ ID NO: 1399 - DNA, 2053 bp, Homo sapiens
ccacgcgtccgctccaggcccagcctcctgcttcccgagggcatgtacaggcccagcctctgcctcacagcagactctccacacccagctcttccctgtctgcggcctctccagtccaaagctgctgctgccttttggcagcttgtacaggctcagctcctccctcacggtggcctctttcagcccaactcatgcctcttgcaacctgcccaagtgtcagctcctgtctcacactggcctgttgagggccagctcatgcctctcgtggcctcaacaggcccatcccctgcctgtcggcggcctctacaggcccggcctctacctcacagtgggctctccaggcccacctcttcctcaccgtggcctcctggggcaatgctcctccctctcgggagcctctgcgggcccagctcctgcctcccagtggcctctgtagaccaagcccgtgcctcagggcagcctttccaggcctagcgtttgctgctttgcatcctctccaggccctggacttcctccagtcggcctctccaggcccagctcttcctctcggcggcctctgcagggccagactgtcgtcaagtcggcctgtccagggccagctcctgcctcccggcggcctctgcaggcccaagtcgttctcaagtcggcttccccaggcccagctccggcctcttggcggcctctccgggtgcaaaagttcctcgagtcagcctctccaggcccagctcctcctgcctcccagtggcctctttcggcccagcccagctcatgcctcccggcggccttcccaggccccgcttttgactttcggtggcctctgcaggcctcgacaaggcccggcctcctgcctccagaaggcctgcacaggcccagcctctgcctcacagcggactctccacgcccagctagctctcgcctcactgcggcctcccgagtccaaagctcctgcctctcggccgcttcggcaggcccagctcccgcctgccagtggcctcttcaggcccatggggctcattcctcacaacagcctttccaggcccagtttttcccttccggcggcctctccgggcccagaacctcctcaagtcggcctctccagacccacttgcagcctcccggcatcctctccgggcccagctcttcctcccggctgcgtctccaggcccgactttggcctcccaacaacgtctttggactcagctcctgcccagctcccagcggccctggtaggcccacagcttcccgaagccaagctccccaggcccagctcaggcctcacggtggcctctccaggccagctcctgccctctgatggcatctgcaggccccaaacggcctccggttggtgggctcctctaggcccagcttgggcctcctggcggcctctgcaggcccaaatcgtcctgaagtcggcctctccaggcccagctccggcctcccggcggcctctgcaggcccaagtcatcctcaagtcagcctggaattgggcctggaagagagcaagtcggcctccccgggcccagctccggcctcttggcggcctctccgggtgcaaaagttcctcgagtcagcctctccaggcccagctcctcctgcctcccagtggcttctttcagcccagcccagctcatggctctcagcggccttcccaggtcccgcttttgacttttggcggcctcttcaggcccagaacttgacctccagtcggcctttgcaggcccggcctcctgcctctcaaaggcctgcacgggcccggcctcggcctcggcctcacagcggactctccacgcccagctagctctcgcctcactgtggcctccccagtccaaagctcctgcctttcggccacttcagcaggtccagctcctgcctgccagtggcctctttaggcccagctcattcctcacaacggccttcccaggccccgtttttcccttccggcagcctcttggcctctaatttgtttatcttttgtgtataaatcccaaaatatggaattttggaatatttccaccattatatattttggtaggtaaaaaaaaaaaaaaaaagg

SEQ ID NO: 1400 - DNA, 396 bp, Homo sapiens
cccacgcgtccgcaaggctgcagggtgttgtgattgtgcctgtgagtagcagggtgcactcccacctgggcaacagagtgagaccttgtctctaaaaattaaaaaaaaagttaaaaattaaggaaatattctttcagtattcaagaactattctccaagtcagcaaagaagctgctcacatcattgacagatgagttgaagttccaacatatatgtctttgttgtttcacttttgtcttatttgttaatgcaaacaaaaatatcaaccaatactctcatgggagctaacattcttttgtcgattgcaaccataaccataggttggctatggatatgagtttggcaaaagtcaataaaagcattctatgagaaaaaaaaaaaaaaaaaaaaaaaaaa

SEQ ID NO: 1401 - DNA, 916 bp, Homo sapiens
ccacgcgtccggatgaagtttacattaatgttagtaatgtccttggagctaagtcttcgaaaagtactctcaagtgtgtaccctttagggaaatataatcatgaatgagaaactaggtggtctggaagaggaatgatcaatgatgacacttattccaagttctcagcctcacagagcaataggagccagctcgcttaatttctctgtttccatatttgcaaaataaggattatctgtgattatctgtttccatttagtggttgctctgtgaaatatttgaaatcagtgtagtggtgagtggatgataatggtgagaagcgtttgggagctagggaaaatagaagtgtctgccccctctctgttttgctattcagtagctgtaactgtacagattcttcctcagattgaaactccacttcccttgtttcccggtggttagtcccactcctgctcatgcgacataagaacatatataataatccattttaatatatttactaaccaggtccttttgttgtgcaatattttgtatacttaattcagtccttcaacaaatgcttgcctactagaacactgtgttaagtgctgaggttgcaaatggtttcttgtttaactttcattcaacaaatactgtatttcatctgcatctactacataacatttcctgtggtgggtgctgagaatgcaaagttaagatagaaacttgaccttgagaaacatatgtccagtgagagatacaggaggaataaataatacttaaaccgcatttatgtttatcattacattatcatggctttttcctagtaaaagttatgtaaatgttatttgatgtttctgctgaacatatgagcatgataagctgccacatttccaaaataaagataaggaagttgtcattagtaaaaaaaaaaaaaaa

SEQ ID NO: 1402 - DNA, 1860 bp, Homo sapiens
ccacgcgtccgggaacctagaggtcctcattttataaagcttttcatgtaaaattcccctgaacaccataaaccatactttacatatcgttgctttaattccttttctttgtgagagggcttctgcaatgttaagttagctaccatataaccatgacctcagtgttctgcaatatatgccttcaactgtttttcatatgacatggatttgagctctcctaccatcctgatcatcttttctgggtgcgtttcagcttttctatgccacataaaacattgtattagaaaccaaaaatagtactaaaggagtggtataagtaggacagagtacagctcagtgctgaaactagcagtaacttctagccttgttggccctttggggcttcacagaggaatggctgtagataaccggagatgttattcggctgggatgcgctaggagacagttccttggctgtttagtccagcatctgtcctgcttggttaggtgtcgcgtttgataggtgagtttcttgatgtcctgattttcaaatatgttaaatataattcttgattttagtttgttcttatttgatttagttctatgtttgaatgctatctgctcacagaggcttccttgaccatcttaactaaaaatccctaccagtcactctctctccctccatcctgttttagttttctttgtaacactcacattccctgatattatattagccttctttctcttctctcctcctcctccctcttcctcttctcttgtttcctcctccttttccttcctttttttcttcctgaactccctgtccttcctccttttctgcctcccttctttcctttctctccatctctttttcttcctccttccctccctctgtcttggattttaagctgcctgagggcaggaacttgttcaggaacttttgtttgttatccaaacactcagaataatactgacacatagacacatagcagatgctcaatacataggtgttaaatggttgaatacatgtccctttacatcctttcccctgcccccagactgtccagttttataatggaacgtgtttgggttcatgccagtaattcatcatgtggttttatgtcctccctcatcctgaaggaagagggacaggtgactgtgttaccattgctgaaggatcatggaggttccagaagctaatgagtgctggtgccttcccagcagtcctgaccatgttacttttctgaatgacctttactgtaatccatccaaggagtccccagcccccacctcaagtgctgttggtaagagagctttctatccaggaactgtgactcataattctgccaggggaagctaacttcttgaataagataagttctcataccagccacattgcgtcaccgtgggagcaggaaacatgttgtaatcccctcagcccatctggcacgtactcatttgccttccttatgaagaggtgtattgtgtctgacagtgatgccacttcctagttggagggagaggaacaaaaaggacatgttgttgacaaaaacgaaaagagcaactggctctgggctagtgggggaagaaagaaatcattgcgcatcttgagggatcaaccaacctctctgcacatgaaagtattgccttttacaaggcatctgtggatgctgacagatttgttggtctttcatgaggctctccctgtgctcaggttcccatctcaacggaaacacaggttgatgtgaggaacaaagcagaaatgttctgaaaaccctaaagcaatctacatgcgtatcatattagtaagacatttattttgttctgagtccttccatgtgggccttttaagagaatcctcaaatataaaaaaaaaaaaaa

SEQ ID NO: 1403 - DNA, 1490 bp, Homo sapiens
cgaaaagatgataatgatgaggaggaggaagatattgatttttttgaagatattgattctgatgaagatgaagggggactgtttggaagtaaaaaacttaagtcaggtaaaagttccagaaatctgaaatacaaagatttttttgatccagttgaaagtgatgaagacataacaaatgttcatgatgatgagctggattcaaacaaagaagatgatgaaattgctgaagaagaagcagaagaactaagtatttcggaaacggatgaagatgatgaccttcaagaaaatgaagacaataaacaacataaagaaagcttgaaaagagtgacctttgctttaccagatgatgcggaaactgaagatacaggtgttttaaatgtaaagaaaaattctgatgaagttaaatcctcctttgaaaaaagacaggaaaagatgaatgaaaaaattgcatctttagaaaaagagttgttagaaaaaaagccgtggcagcttcagggggaagtgacagcacagaagaggccagagaacagcctcctggaggagaccctacactttgaccatgctgtccggatggcacctgtgattacagaggaaaccacccttcaactggaagatatcattaaacagaggataagagatcaggcttgggatgatgtagtacgtaaagaaaaacctaaagaggatgcatatgaatataaaaagcgtttaaccttagaccatgagaagagtaaattgagccttgctgaaatttatgaacaggagtacatcaaactcaaccagcaaaaaacagcagaagaagaaaatccagaacatgtagaaattcagaagatgatggattccctcttcttaaaattggatgccctctcaaacttccactttatccctaaaccgcctgtaccagagattaaagttgtgtcaaatctgccagccataaccatggaggaagtagccccagtgagtgttagtgatgcagctctcctggccccagaggagatcaaggagaaaaataaagctggagatataaaaacagctgctgaaaaaacagctacagacaagaaacgagagcgaaggaaaaagaaatatcaaaagcgtatgaaaataaaagagaaggagaagcggagaaaactgcttgaaaagagcagtgtagatcaagcagggaaatacagcaaaacagtagcttcggagaagttaaaacagctgaccaaaactggcaaagcttccttcataaaggatgaaggtaaagacaaggccttaaagtcctctcaagcattcttttctaaattacaagatcaagtaaaaatgcaaatcaatgatgcaaagaaaacagaaaagaaaaagaagaaaagacaggatatttctgttcataaattaaagctgtaatatattttgaatataatgtaaatattaatgtgtaagcttatattgtgtcattgttctgttttataataaaattcttgagaaccttaaaaaaaaaaaaaaaaaaaaaaaaa

SEQ ID NO: 1404 - DNA, 783 bp, Homo sapiens
cccacgcgtccggagttactggaacacaagcgctgtgatactgcaacaatctgataacccagacagtactgagtgactaactggtgggcgatatatacagcctggatgtgctggacaaagggatgattcaagggtgagatagagtggatggcacgagatttcatcatgctgctcagaacaatgtgcaatttaaaatttatgagttgttcatttctagaattttctatttaacattttccgactgtggttgactgtgggtaactgacaccatggaaagcaaaactgtggataaggggggactaactgtaccagtaaatgctgcctcatcacctacacccttggtttacttctcagataaactcaggaagtttaaatggcattctgagaatctgtagctgcaacatagtgagcccaggagtcccggtccagcagctagtattaaattctctgttgctagcttggacctctctcgatatctaggaattgtctgcagtgtgcggtggcacagtaacaaccatttgtttctcaacaagaatctgataatgttgcttgaacctcctgaaccagtgctgcatgctctgcttcttcatatgtttgtccttagatttgaccaaaaacaataactgataatgtaatacagattccccagctccctgtgagctgggttgagcccaggaagtctgtacaagagagcatgtctactgggatttaaatagcccagaaacaggcagccggaatttcttatactcttgtgctctaaaaaaaaaaaaaaaaaaaaaaaaa

SEQ ID NO: 1405 - DNA, 1900 bp, Homo sapiens
gggacgccatactaggaaacccaggtctatttgttatcagagtaaggatcaagccagatagcctgttatgtaatttctccgataaaagattttgaaagcaggtgctgtgggcatctgtatggggaatcgcactcatagaattattttcatttgtaaatatttggtatcaggccaagcaagggaaagaagctttactgtattaccatctttcctggaaaagattgatttttctctctcccttaggggatatgaggtatgatacctgcaaccaaaataagctggctgttaagtgctctctccttaactattgtccaagcaatgtacatcactcttgcctagatgagtgaccatacttttttctttgctgcttggtttttctatcactaaaaagcaaatttaggtggaagatggatgggtaagtcctttgtccttgtcaaaagaatttagaaagggtaaaggtggtgggatttgaattcttttaaacggtttattcattggaaaggcaagtgagtggcagttgactgtagaatcttgggaatttttgaaggaatttaagagctgtacttattttaaataatgaggaaacaatcagagagacttaaccagggtggcaactatggaagagtgggggtagaatccaagtctacagttctacggcactgctttgtttattttttcaatcaagcacacatgagggattgcttaataaattcaagagttttctatatagtttgggattactacagacacaggtactctagccatgtgactatttcagattagtgttcccattgctctccatcctatttttcatatctaaatgtgtcatgattttagaatctctttgtaaagaaaaccaaaaagagccatgcccaaaagaatgagcatgaaatgaagcaattcaagtatttagaatttcttcttcttttttttttttttttcaaaattctgagttaagaaagttcattgccaacagttgaggataaatagctctattgatttaggcaaatgaatgagaagatttaaacatcatcaagactcccaaagttggtgtaataaaagttgagatgttttgctagatgctgagagaaaaggcataaataggccatttgtgctcctgtaaacaaatgaaattttgtaatgatcaagagacagcatgatattataaaacacactttggactcatcgagacctggctcagagttgtacctaatttgcttatcagcatttggttagaccttagacaaattttataacctctctaagcccattttctttatctgtaaataaaggaaaaagatctgtttggatttgggacaggagagttgtctgttttatagggtaatgtttatgaaaataatttatcacctaggtacttagtaaataccagtttctgtctctgtttttcttcaaagctttgttgacaatgtaggatattgccaactaatcctttgacttgagtgcttagccatgccccaatccaggcagcatgaagaatgatcaagaaggggacacctagtggcagttgacctttgaggatctatcctaggatcaggttactgatttgggacctctgaatcagtacatcataacatcgagagtgatctctgccaaaattaaaattctgtcagaacagtataagcagaaggaagacattaggtctttctgaaatatggagctgataacttctatcagttctgaattctgtactgtcccacccccaaatcatctatattgttgcatgtacttagctttgtgccttgaattgctatttcctttttatcttgcactcagatggtatttttagagatgtttcttcaatcaaaacaagataaagttaaaaaaaaaaaaaaaaaactcgagggggggcccggtacccaattcgcccgatagtgagtaa

SEQ ID NO: 1406 - DNA, 1900 bp, Homo sapiens; identical to SEQ ID NO: 1405

SEQ ID NO: 1407 - DNA, 732 bp, Homo sapiens
ggcacgagaacaggacagggagaccttgtgatggcggggcagggaccctgttcgtagggaagatgaggaggcaagggctgcctctcacacctccaggttctctaagttctggggagggagcgccccacctgctgaggtcggtcctctcagccctgcctgccctggcctgggctctcccagcctcccagccctctgccccctcagatggctttttgtttttgtttttttttgcatccatcagagactgcacctctgtgtggcaggcagggcatgggttttagtcctggccactgaccagctgtgtggccctggccgagtcgtagccccctggagcccagcttccatttctataaaatggttgtttcgggagagaggggcaggctttctgtgtgactcgggagttcttccgtgagggctgccagggggtggtgtgccaggacctcaggctgggcctttgtgctggccttgcagtgggtgtgtggggaagtcactgtcccactatgggtctccactacccagtcactgaccctgggagaccccttctgtgtgggagggagcgggggctggctagcgggccccccagccagggatcccagaggctgagggttggggagaggaagccatcatctcattacctctgtcagtgcaggggtggctgctgcttcccttgtgcacttgggtcgctgtgattgtgaataaaagtgatttcgtaccaaaaaaaaaaaaaaaaaa

SEQ ID NO: 1408 - DNA, 802 bp, Homo sapiens
ggcacgagcaaacccaagtcttgagcaatgtttttctcaaaaagctgctatccaatgatataggaaaatacattgtgttttcctaaacacacttttctttttaaatgtgcttcattgtttgatttggtcctgcctaaatttcacaagctaggccaatgaaggctgaatcaaagacatttcatccaccaatatcatgtgtagatattatgtatagaaaataaaataaattatggctctaacttctgtgttgctgtttatcttgttatttttcggcgttatactaatgtgtttattgagagcattttaccttccagacttctcatggctaacttttggtctgtattttgctccttagatgtgaatatttcttattagtctgcttcctgctacgcaatgactgcatttctatcatttctcagtttgttagtatatgtggatagtattctactgtataaatgattgcaaagtttatcaaaaacaaattattatatgtagcttttctacagtgctttgctaaaccatgtagtactagttaagtcttccttgaaaataaagatacactcttataggggacagttcctgttcactcccaggaaacttttttaaaagatgacactgaatgtttattgcactttagtgcagtgaagtggcaataaaacctaacatgaatcaaggttgtttatggcagatgcatgtgttgctttacagagtttagcaaaagctcttaattttatgtcatactgtattctactgaataataaagctaacattattcaataataaaaaaaaaaaaaaaaaaaaa

SEQ ID NO: 1409 - DNA, 846 bp, Homo sapiens
  misc_feature (4)..(4): n equals a,t,g, or c
  misc_feature (6)..(6): n equals a,t,g, or c
tatntncaagctcgaaattaaccctcactaaagggaacaaaagctggagctccaccgcggtggcggccgctctagaactagtggatcccccgggctgcaggaattcggcacgagattttaccttacactgaatgttcttaatatgatttggtacctaaagtaattgaaaaaaatgcagtttcctttaatccttgactataagttatactatgttgcgtacatggcaaatcctgcaaatatagattaaaaattaaattagcccattgaaatcctttataattctgtcattttcccaaggaagaatagcattgtacatatgcaatctttattttattctttattgcttatcagagtgagtggatgaaaacatttgtaaggctgcaacataatattaaaatgtgaataaataaatgttctgataaaatagaaaagaaagtaaattacagtgatttccatcatattatcactcttgaattttatcatctataaaatgagagataaaaatatctcactgaattgttacttatatcaatttaaaatttgctagtggtttgaaaataataatgtactgactacatgtatgctgttattgtcagtgtttccttctataaactgttctttggaaaaattaagttatacataaaattcatattaaactttttacagaaagcatacatgataaacagtttatggtacttctcagaatcatttcataataagcaatttatttagcttaagttccaacttactgttcttattataaattgcaaagcaacctgtcttacattcttacattatcttaaaataaatatttctgcccttgaatcaaaaaaaaaaaaaaaaaaa

SEQ ID NO: 1410 - DNA, 1434 bp, Homo sapiens
ggcacgaggtttcagggaggatggggtcgacccttgcgatccccagaggccccccatggctcctcctgggctggctgtcttcctcctgtgggttctgatgccacctgggccgacggcgtcttctcagcccagggcggccgcgcctccggtgagtttcagctgagggcgcgcggccagctccgagcctggctccgggtgcagcaccggcctgggacctctgctgtcccgtgtaggggtgccctgcaaatatgtgatgaataagtgaagaaatacgttctatcttctaacttgccggatgttagaaggaaaccaagcttatgcttctcatttatagctaccgttaaggattggacagaagcttagctttttgggtgagacggacaacagtgtttttagaacctttggcaaggaagagctggaaagaacatgtatttgaaagtgactgacaggtcttctggccctagggggccacctgagcaggtgcacccagcttccctccaagacagaaaataaattaagaaggagagcaggaagggccccggcagactccagacgggagggggtgctgcccgtcaggcagaaggagcttggaagggaggggccgtggccatgggacgtggaggtggaagcgagggtcatcataggtctgcacactcgggttgagtcccccttccccatcacacacaggacagccagcagtgagctgcttaccccaaggagtcaagggggttcttgggcaacccctggtgctggagccggcagtggacagcaccgcagccagaccttgcttatttttggctcatgaggaacatctgtgaccgttccctcccctggccctgggaggggatgtgtgacctccactcaagacagccatgcggctcctccggctgcgggcggggagggcatatttcccagcacaggcccaggactgccagctgagaggctgggaggggcccctcacccctagactctgcgtgtgaagccaagcgtggagcctcacagggaatctgagatgggagccagtgagatgggggcaggacccagaggggagaagaggtcctggggatgctgtggatctggatccagcgtgcgggagctgaggttccggagtgaaacactgcctttcatggaagcacgtcttcctgtcacccatcggcttcattttaaaggatgaaaatgtatcagacattcaaggagagctgcatcacataaaagaaagaccaggcaaagaaacggaaaataaatggattgagaaatgtgaatgactccaatcattccaatcattggaatgaatggattggatagaactccaatccatagactcagattagggagatatatttatataataagaacaggaaactgtgaagatgaaataagacaaaaaagacacttttgagattaaaaaattactgcaaaaaaaaaaaaaaaaaa

SEQ ID NO: 1411 - DNA, 761 bp, Homo sapiens
ggtacagccagcacaaaggcccgagcttgctgtgttcaaagaacagacaaaaaaaccgcatggttgaaatgtaatggaggtgtgatatgtaagatgggtgtggagaggtgcaaggtggccagcccacatggggcctcttaaagactgtggttagacaggtctacgaaaatgtcagaaagctttcaacagggaaatgttgacatcaggcttcatttttcagaagatctggcttctgtgtggagaatggactatgttgggacaaaagacgaagtgaggagattagatagatgccaattttaccagctccggcaagagaggttgaggcttatgcttggttagcactggaagtgaagaagtaggagcagactggattcttttctatcagatttggagtaccattagccgtataaatcattgtggggcggggaatgcctggtgccgtggctcgtgcctgtaatcccagcactttgggaggccaaggttgggagcattgcatgaggccaggagttccaaactagtctgggcaacacagcaagaccctgtttctacaaaaaaataaaattaaaaattaggtagacgtggtcacatgcaccagtagtcccagctactgggaaggctaaggctggaggatcttttgagcccaggattttgaagctgcactgagccgtgatctcaccacggcactccagcctgtgcaacacagtgagaccctgtctcaaaaaaaaaaaaaaaaaaaaaaaaaaaaaaaaaaaaaaaaaaaa

SEQ ID NO: 1412 - DNA, 441 bp, Homo sapiens
ggcacgagggaagggggtgcttggtttgaggggttaatgtgaggcctttttgaaaaatgaatattttgataaaaagaattcttgttttagcacagttgatgcacataagtgattctcatatttgttgtataaactggtttaatacatttggaacatagttggattacattcatttcctgggaaagctagcttaccatacattcaagtttataaaacaatttgccataggcaaagccatttaaaaagttcattctgaaattatttcatttacctacagtgaaataattgtgaactaagtagtctttctgaaaactgttgggttctaggcattcctgagaaattgaaagtggctacctttcatgtcaaaaatgttgatctattataaataaaatgtttttgcatatgtttttgaaaaaaaaaaaaaaaaaaaaaaaaaaaaaa

SEQ ID NO: 1413 - DNA, 452 bp, Homo sapiens
ggcacgagatttcctatgcttaaggcatgtattttcagtaagcagttaaaaagacagcatgacttttttattaaaccctaaataatcatatatagcttttctggtttattaatgtatagaataattctgcagtggtagaaatttaacaggggaattttatccataactatcaatttcatactttacctagataaccagaattatgtgacttgtttgttgaaagtaacatgcgttgtatgacttgtttgttttttattgaagtttgcatctcaaatgataatttaaagtttttgttagtgaaagtagggcagtgaccacacctttatataactattattaccttgattaattgctacattgtaaaagaaaatattttctacaattacagaatcctcagaacaactctgaaaacaaatgaggtattatccccaattaaaaaaaaaaaaaaaaaa

SEQ ID NO: 1414 - DNA, 1699 bp, Homo sapiens
gcagccttttcatggttcttttaatacttttcatacactgccctcttgtaaggtgttacaggatcctaatgaatgccttctgtattgttgtattccatactagttagggcctaacaaaagcatggcatcgaattgtgtagaggtgactgataaatacaagaaggaaagaagaaagagtggggaggaaataaggggaaaggaagacagaaagaaagagaaaggagagaaaaagtcaacagagcatgagacatagcattactaattggctgaggaatatcaaagttagtatctctaccctattattttcctatttctttcctgtcccaaagctaagcaagagtggaattatctccccaaagtcccttgtcctcctctgattgttacagctggatcagggtcctattaattgwtgrtgasggtcmctwgcctgtttccccaggtaaccatgagcaccttgagctaagtcccytttcttagataccattttaaccagttcccctgactccagcctttctgctcattttattgcatacacaaatgtcaggttaacctgcagcacagttgtagtaaacagacaaaggcttgcgatgtctccacactgcccaggatggcctgcatacttgagctgatctactagccctttgcaattcacaatgatgtgcaaaatattgcctcaatctggtattcctcactctttgktaattctgtctttcaaaatacattctgaaaatacatctcaaagagaatctcacagtcctcaaaatctcttaaaatttcctgtttccctgatatgtggtattcctctcattcttatttcatgagaggtacaattgtataaaaaaagtgcttgcaagcctgaaagatgtaccctttgccacattcagttctatgcccttaggtaatttgcttagccattaggaatctgtgtttccaaatcttcagaaaagtgtcttagtccctttttgcatgctggcaacaagtgaaaaactaccctgcttgtagcagaagcttaaactcctgtgatgaatgacagaagcaacagcatctaaccctgggggcacagagagacagggactgagaagagtaagggacagggcagttggatccagatgggcttctgtttttgtacgatcatgatcccttctttacttgttagtatgaccagcaagacattaaaaaatatttcctttttccaagaccatataaggaaataaaactatttagcaatctgatctctcttcagaatgcttttcattaaawgatatgagtrkttattgcttaatagtggactcttcaatgccagcatcccccagtaacaaattagtataacagtatgctcttccacttgcttcaaaacgtgctttctgattactgtcataaaaaataggccaggcatgttggctcacgcctgtaatcccagcactttgggaggctgaggtgggcgggatcacgaggtcaggagatcgatcgagaccatcctggccaacatagtaaaaccccgtctctactaaaatacaaaaaattagctgagcgtggtgacacgtgcctgtagtcccagttactcgggaggctgaggcagggtatcgtttgaacctgggaggcggatgttgcagtgagccgagatcatgctactgcactccagcctggtgacagagcaagactccgtctcaaaaaaaaaaaaaaaaaaaaaaaactcgag

SEQ ID NO: 1415 - DNA, 1612 bp, Homo sapiens
  misc_feature (806)..(806): n equals a,t,g, or c
  misc_feature (923)..(923): n equals a,t,g, or c
  misc_feature (1607)..(1607): n equals a,t,g, or c
gttgaatttgacccaaagtcaggtggtcagttcatattgaaaacatagaaaatcatttgtcactttaaatgttcatgctcagtcatttctttaccacctgtctgtgtgcaacttggaaatttctggagcactgatgactgtgcatttgtgatttcctttaggatgccatttccatttaccaattgctttcctcagcctgcaattgtgtcttcattctgattagtttattccatttagattttaagaatgatagttgatgactgcctttttcccaatgttacaatagtagaaatgtggtatcttacattttccaaacattttcttctcctgggctttcctgtaccgttcagtgatggagagctcacagttcctattgagatatttattttcattactatccttacatagaacgcatttccagaactttttccttccatkcaacttatagctcctctttaaaaacaaaattattctatactccatgctttgatactctaaattcaaccggtcatatttttttttcttttcctttctctttgactggtcaattcagaaaaggaagtccagttcgagtgttcagatgatggtgaggatctatctgccagatttctcctcctgtgaaaattcacacttaggaataaaagtcttatttacctaagatagtgtaagtaagtggagagggtgtaggaacattacaggtcagtgttagtcaactatcaaaacacggtacttctcttacatattacattgttttttctctgaaattgaatttgttatacatgtagatagtatattaagaggtttgntcttttacaaagtcaattttctctttgaaaataaaaagaccatgacagaatgaatgtctgtatagtgatcagtaaaaacaaacraacaaaaaactatatgttttttttaatgttctntatggtggctaaaataggagtgrtttataggacaccwtaatacattcaccatggagtttataaaggtgtgaaagtgatcttacaatgtaccaatcctagttaagtacctttaaaggaaatgtttattaaccttcaaacaataaatttaacacctgagaaataggaatatcttgcccatgcctcataagagtaattcagtgcatcatacaattatctgatttgattgattcatgattttttaaaaaagaaaacaccttgcttctattaacataaaataattatatcacacaaaagtgccagagtttttgtatttttaaaagacatctatgggccaggagcggtgtctcacacctgtaatcccagcagtttgagaggttgagacagacggatcacctgagatcaggagttcgagaccagcctggccaacacggtaaaaccccatctctactaaaaaaaaaaacaaacaaacaaaaaacagaaattagccaagtgtggtggccgtacctgtaatcccagctactggggaggctgaggcgggagaatcacttgaacccagaaggcagaggtttcagtgagccgagatcgcgccatggcactccagcctgggcaacaagagcgaaactccatctcaaaaaaaaaaaaaaaaaactcgagggggggcccgtacccaatcgccctataccntctat

SEQ ID NO: 1416 - DNA, 963 bp, Homo sapiens
ggaattcggcacgaggtgggccagggcgagaatgtcacacgttaagggctgatatttaggcacaaaggggaagggcccttgctgtgtgtgagctagggggtggcatgacatgcttggctgggctcatggttgctatttctgcagatgtcaaagaagttctgttaactgatgggaatgaaaaggccatcagaaatgtgcaagacatcatcacaaggaatcagaaggctggtgtgtttaagacccagaaaatatcaagctgcgttttacgatgggataatgagacagatgtctctcaactggaaggacattttgacattgttatgtgtgctgactgcctgtttctggaccagtacagagccagccttgttgatgcaataaagagattactccagcccagggggaaagcgatggtatttgccccacgccgagggaatactttaaaccagttttgcaatctagctgaaaaagctggtttctgtatccaaagacatgaaaattatgatgaacacatttcaaacttccactccaagttgaaaaaggaaaacccggacatatatgaagaaaaccttcattacccgcttctgcttattttgaccaaacatggatagaagattaagcttctcaaagacgaagaaacgtatcaagtgcatagggaatatttttacaaaaacggaaatctgtaaggggtataatcgcctgcctgcgccctttgcagcatttcacgtgtgggctatggactccacctgtcctcacccacgttattccccagctgccctctccagctccctccccgcctctttttacactctgcttgttgctcgtcctgccctaaacctttgtttgtctttaaatgtgtataagctgcctgtctgtgacttgaatttgactggtgaacaaactaaaaaaaaaaaaaaaaaaaaaaaaaaaaaaaaaaaaaaaaaaaaaaaaaaaaaaaaaaaaaaa

SEQ ID NO: 1417 - DNA, 2234 bp, Homo sapiens
  misc_feature (1337)..(1337): n equals a,t,g, or c
  misc_feature (2228)..(2228): n equals a,t,g, or c
ggaaacagccacctctgtccacggtgcccgccgatggatacattctggagctggatgatggcaacggtggtcaattccgggaggtgtatgtggggaaggagacaatgtgcactgtggatggtcttcacttcaacagcacatacaacgctcgggtcaaggccttcaacaaaacaggagtcagcccgtacagcaagaccctggtcctccaaacgtctgagggtaaggcccttcagcagtatccctcagagcgagaactgcgtggcatctaaagtggctggcaagcccggaggtaaccccaccactgcccacattcctgaagtgtttccatgacttgctctgcattctgcacagagccgctgttcctctcctgcctttagagagcctatggtatgtggatgtgatcaaaccaaagattccacatcggcagttccaatggcttgggccggcggcttcctttgataacaatctaaataagctgcagttgaagaagctgaaaaatgaaggcctgaatgtgcccctggtgtgtaagacaaatgtatctaggctctagagcaggctcccattctccaccgatacacatcatgtgccagttttgcccagatgattctaaattactctgtagtacttgcttgttctgagggtgggacctaggttctttccagtcgtggatttgtatgactgaatgtgtttcaaatgggtggtggggtgctagagctgtttagagagggcctgttggctgctcctggcttacccacttagactgcctccgtttcatacccaaagcggaggccgtcagcaccaggattgagacttcctgtgggcaccaaacaggaagagaccagcaacttcgcattacccgccattttcatctttgccagtcccttcagtcttggctaggctaccgagagccaccatacaaggttcatctctagagaatttttgcttcttagctatactttaaatattttggtcatcaaagacaagtaatgtgtctcagatgagaggcttgaatttgatggccagatataacctctgaggcttttaacattttcattttaagagtaagcaagacacatgaaattaaacctacaaggaggtatttgtggctggtgccaaagcattctgacactttggggtgtcattttaatcaaagaaatcacccccccacctcaccgggattctccataacttccctctgcagaactaattatgktgattttgktcaagttcaagatgktagctaaaagaactatggtggtgttttttttcccacttcccacaaacctcaacatgtgccagtcaccctaaaatgcttyacatggttaaaaacaagcacnattttgaatcctacagcaaggatgaaaggcccctagccgtgaaaacagtgctttggggagcagttgtcagtctaagtgatgctattccaagagaaggatatgctgagggaaaatgcccacatgaacctgttcccatttggagtacagtgatgtggtagctacagcttcccccagaattatcattttagcaccttctctcagggatgacctatcagtttgagagcagttgcctcttttctcaaaataccatactaactgctaaagccctccaagagtctttcctagatgcaacgcagaaggcccttgctggtgatggcctcatttcccatgtgtgtacaaggtggtttgattgaagagtgaagtgcatgcctgcagagcagagagaaatttgtagcaatgttgctaatatgtgttatcagatctgcgggaaaactatttctawtcataatacaycatgggaaycatactattctggtaaaaatcagttattagcataacagcctgagcacttatgtctctcgtttcatcctgcaggaggatgtagcgcctcagtttattttaatgttcataagattatggtgtctaatttaataaattacaggattggaactgcgatccttggtaccacagtcacagaactgggggtcattttcctagatgaaacaaacggaacaagttctcttccaacaaagaaactgtactgtagaaattaatttcctccatgaattttatatattgtgtacaaatataaggtatgtatctgaatacaaagaaaagcctatcatcatatagatatcagtattctctgttactgcacagaagtaattttctcatgatgaaataaagttcacacacatactttctccataaaaaaaaaaaaaaaaaaaattnctgcgg

SEQ ID NO: 1418 - DNA, 1661 bp, Homo sapiens
ggcacgagctacactggaagtggggaggggcagtgtgctctgggtagctgtcctcctctgtaatggcaggagctgggtatgcctcgtgacctcttggactcctgctcacattatcactgctgccttcccagatgagctgtgcaaatagatggcggccatgagtggaattggaaacgaggttggagggagcttctgtctgtccagtttggggcctgccaagcctggcatggtgagggtatggtggagccaggaggggccactatgggagccgggccaggaagctgcattctactgagccttttacctcttgcaaggacctgcctttcaggagacttcggtctctaaaggccagggatggaagcttcagggagactctccagctcctgtttagctctttggttcagacctaagtggcgagccacttgactggatgggacctccagccagccacagcattggaatccagcctggctcctgcactgcctttcatattgatgtccatgacaatcccagctgtcttgcagtacatggcacaggcagccctggcatcttgaggagggtgttcagtgtggtccctggcagaatatgagcctggggcagacaggatgtggctttagaccgtgaacagggagccatgccccaggacatacgaccctgtgccccacactcgcccacactcactcctggtcattaatcacagtgctcatgggcccctgattcaaaggaagtgccagctgtacatgggcccaatgaactttactcaagattagaggactgtttaggggcatttgaaatgaattgtggaaaggacatttgtgagaccatttgaaaggtcactcaggggtggtacaacaggataaataatgaacccattacaaggttctagtgaaccactgtggccttgggaactgaatttcatcactttggaagccagagaaaggcactggaaatagctttgcctttgcacagaggggagttttcttctgcttaactggatccaattagaaagtgattcaccgaacacttattctgtgcgagggtcttacagtaaagactcagtgtggcaaggcccctgttttccaggactttacaatcctagttgggagtggggtgaggtcaggggtgtgtaagttgaacactatgatgagagcaccctgaggcggatgcagccagctccctgtgaacatggacaacatgacagggctgggtctagacactggaaatgggtccacctggtttactagacttgagctgaacccatttgtacaattagaggaatttatctattcaccaaatatgcatatctcttcaattattaaagactaccatgtcctactttcagtcgcccagaaatagaccctgcaattccagtgccagtaactcatgtcagaggtgatccctggagacactgcaggagagtgggacaggaagacagggagtgaaggtaggcagcaacggttccttatcccagcaagtcatgagtatggcagccaggtctcatcctgtacagaatagccctcagcatcatccccaccaaggggcaaggaagccgggtgttcattcccccacctccctctgtcatttgctgagggctgcatttgaggcattaactacccagggattctgccatgtcctgctaggagaaaaaaaaaaaaaaaaaa

SEQ ID NO: 1419 - DNA, 533 bp, Homo sapiens
  misc_feature (515)..(515): n equals a,t,g, or c
  misc_feature (525)..(525): n equals a,t,g, or c
  misc_feature (528)..(529): n equals a,t,g, or c
ttcggcacgagccaacttctatataactcaggaatttactctcaaacaacactgtcaattagttacttatctctctggaaatgatctgggaacatggagaggaaagggaggaaggggcaaaatctgaccacttaaatctaagcatattagatcattttatgctagaaagtcctgaatgatgtgactttcgttcttgtaaaacacctctttccatagattcatggcccaaacagtatataaagagtggggaaggaactgcatttgcaaatagttcaaatcattgctccatcttaactacgcagttcacaaagtgtgaagaaatttgatcatctcaaaaaagataatggggaaaaaatatgttttgttctgtgactttaaagtcttgcaatattttacataaatgataatgggtgctttaataagaactcttgatacttttgttattgtattcaatatatgcatataatacaacaggaaaaaaaaaaaaaaaaaaaacycragggggggccgggacnaatccccccnatnngaat

SEQ ID NO: 1420 - DNA, 2099 bp, Homo sapiens
  misc_feature (2090)..(2091): n equals a,t,g, or c
ggtgccattccacaggtagaaacactcacatgtgcttagaaacgctctgctttcctccttgattacccaaattctcattctgagcttctatttctccagatctagactcgggaatttaatatctgaagactcatatagggctgatctaccctaacttgcaaaatttcatgcatatttcatacttacactcttcatatgtcagtggtgctattgtttggttactttctctatctgtgtggtttcatcaccagtctattcacccctatataaaacttaagatttgagataagaactggaatttawatgacttmggaaagaatgtatcttggktagaatataagagtctgaaaagtctgctgtgggtgctaarctggctactaagggaaatgctamcagaaatttgtcatatgtcttcagagtattgtctggcaactgattaaaacagaggaagagtgaaacaacatctgcttctctccacctcacactgataaaatggttgaataaatgcactttgcttatggccatgaagaacacaggggacttcatctttccaagtgttttcatacaatgctcaaggctaattcttttggtcctgatgttttatttcttagcacctgctggatcaagaagcacccacaaggatcatttctcaaaaatgtctgaaactatatctattctgactatgaaccttgatcacaattcaaacccttaggctactgttctgattgttttcagcattacccactaacttttgctttctatttccatattctgtattctgggggcactttttatacagagtctgaaagtgctattcttttttttttttttttgagacggagtctctctctgttgccaggctgcagtgcaatggcacgattttggctcactgcaacctctgcctccggttcaagcaactctcctgactcagcctcccgagtagctgggactacgggcgtgcaccaccacacccagctaatttttgtttttagtacaggcggggtttcaccatgttggccaggatggtcttgatctcttgacctcctgatgcatccgcctcaggctcccaaagtgctgggattacaggtgtgagccactgtgcccagcccgaaagtgctattcttattatgacctacagtggtaatatttcacttaaaaatcagtgctatgcccattgctggttaacaagctttggagaagtattaggttgaaccatagaaactgccacaactgttcaaatattgaaaattttatatgcttcagctcatagtctccttcacacacattctctttcatatttttttataattttattttttgtatgacttaatgggcacatgctgatttcctgtatgtcgtcaacactcctgagccatgagggtaagatcagagctgcaggagtccagacacgtactttgtcgcctgccaagtgaaagacaatgaatggagttatctaaattttycagtgaactttttggtgtctatgttgtctaattttattcccttactttgtgtttaagaaagatctaatacccacagagaataccaaggctattaaagtctaagcaggtgacctacctcaaagcttaagttcctgttatcataggcctcgtttctcaaatttgtataaatgtacatgtgatggaaaaccagaagatgcttggtaaacatggtcagttttactcaatgatgaatggtttcagtcatttttttgtattaaaggaaacataaatatactatggagtaaaatgcaaacactacacggttttttaagataaattctgacacttgaaaggcatgttctgcatttagggctattgccagccccagaaccatgggatgaagttttactccttctgctggtagaggaagtttagtggaaggtttgagaacctgagccctgagtgtaggaaatgcatagaagtagcaaagtctgaacaacactgagaactacacagtaaaattagcacataggatttattatcctttgttgaatgagtatatgagtatatgatgatgctgctgatgatgatgacaatgaccacgatgatttaaaaaaaaaaaaaaaaactcgagggggggcccggtanncaagcgcc

SEQ ID NO: 1421 - DNA, 1861 bp, Homo sapiens
  misc_feature (54)..(54): n equals a,t,g, or c
gagcaagtaatgcccccagcgcccccagcccagcccactccccgcatgggaggnccgccaccaccaacacctcatcatccttctcatcgctaacaccaccacctccatcggcacccaagcgggcatcatccccccacactgctcaggggaggggagggatcaggcgatgagactgtgaggccaaaagaagggggcctgttggaggctgggaaccccgcagcgcgaggctgcctcatcaacggcaagaggaaaggaggggtctcgggacatctccagaccctaccaactgggagggtcccctcctccttccctactcctgggacggcagcaaggacatgggggctgctgttagcttctccgtcagaggcctcatctcactgtagccctggaacccagggtccatcttgcccttcccccatccatggttgggaaagaagctcagcccctcacagtggcctcaagtgtgatgccttacaaaagcaccactcagatgggcagctggactctggtgtcctgagactctgccctcttcccacagcctccctgccccacccatccctgcaaagccatttttcagacagagccattcctaagaacactgaagggctggaatgctggctggccactctctgcctcagtggcctccctacagcctggaagaaggagggtcctgattgccaaggaaacctcctcattgggctaaggagacactggagtctggagtgtggagccccacagtcttgcaggtcacatgctctccttgcacatctggcctggttgtacccactggcctctgcctctgccctgggccaaaagggcccctccttgccaggggagagacagccacggtcctctttggccgatgctgtattctcattttggcccttgttcttaggcccgtctgcccgccytcctccatctaacctttcctgttttatccgcagcccttttcttctttgagttagtaaagatttattctgtaacctgacactcatctggccctttgcagtttgccagccatattcccatgtgatttcccactggatccaggcccccatccggctggcaggagggggctctgacgtrcaggttggaaatcagaagtctgtgagagcgcgggagtgcatggcagctctgggtcccagacctggcccgacccctctgcttcacctccagctctgctgctcctctactcttgggtcgagatccctttggagccacagcgaggaaccctgtggtcctcaggcaggtgtaccttgagtcagccaggagccctcttttcctgtgtcaaagcctgccctcgggctctgctcacctctggtgaccctccaagatgcccctgccctcagtttcccctcatgatctggcctctgcccccttctctagccacagcctctagtacactttagcaataccaccagactagttagagttccccactcaccaagcaagacatgcagtttcatgcctctgtgccttcgctcatgctgtttcttccgactggaatgccttcccctgctcctcctgccttgtctgcctggcaagttcatctctcacgatcccctcaaaggccccctcctccaggaaggcaacccctgtgcccctcccctccaggctacctctgcactttgtcaatgcttctcttgtggcacttatcacactgtattttacttgtttacatgtttgtctccccttctagactgtgaatccttaagggcatggactgtatcttatgcatctctgtatttctgcgcctagcacggtgcctagcacacagtaggcgctcaataaatgttgaatgaatgaatgatttaaaaaaaaaaaaaaaaaaaaaaaaaaaaaaaaaaaaaaaaaaaaaaat

SEQ ID NO: 1422 - DNA, 993 bp, Homo sapiens
agaaggattgccccagagacccgtggtggacttcatgggtgctgagtggcccgtgtgacagtgatgacacgaaggcttcggcgtttgagtgggtgcaggtgcacgccagggcttggtgcttccctgcctggccctggagggagctgggtggcctggcttcaggggaagacaggagccaggacacacgtcagcccagcaggtgtggggggtgctgcagccctcggcagtggggtcaggccctgggggatgtttccaatggtgggcagcctggccaggccggagaagacatgttcacgggcatctatcagatgcccccttgaggaggctgagttatttgagggctgctgcaaagtacgctaggctcaaattctcttttcccagccagagccctggccacacggactcagaggggccaccggggtggggaaaggacccctccccgaccccccgcagccactggcctccagctctcggccacagaatggcctctaaggctgactcagccgctcccttgggctgtggcagcaggaggcgggggctctggctcaggccccggagcctgtgcagcttgcccatggccctaggcagcgaggggacagcctgggggacttcctgcctaggcaaggtcattggccgggcctggcctgtggatagtggggccaggggccggcccaggccaaatgagtgccctccttgttatgacaccaagtgactacaagggaggcaagacccctccaggcctctcagccgacactgggtcccaccacacacagtgactgtgccgtgcagtgcaggttctggccttttccttgaaggcatctggtagacccgaagccacgctctcgggccgcacatgcacgccgcagcaccagctgccctgagctgcttgtacaaccaaacacctttcccctcttctccagctgtaacctggagagtcagccatgccttgtcttttgttctcataaatartcamtggggccgggcgcagtgact

SEQ ID NO: 1423 - DNA, 1080 bp, Homo sapiens
ggaattcggcacgaggtgcccttccccgtatacttctctggactcctttctaagggggagaagatggtgactccattttatattttgcttgccttgttggttagcatttttccctcatccttaaataaaaattccttgagggtaggactatgttaagagtagatctctttacgttttcttttaattttactctcaccgaattcttcttccccaaccaaaccaattctttggcttctgttgcattttcctcccttcgttaaggaaagagataccattgctatcaaactaagaactctgcaggtggtattctaaaggaatgatcttttcccaaggacagttttcacttggcaggagaggggtagttgggcgagcactccacatgcatgacgtttatagtcaccacatccttcaggctgtgttatgaccaatgggtggagatctaatattaaagtcaacagaatgtcctcagttttaatgcatttctgtgggttgtcagaactttagccatctatgtctggtgtccaaggattggatgtgcatttgttcgtatttctatcacttgtaataagtaaccatactacgtccttttgaaagtttgggaactggaattgtttgcatggaactcagaatgtttcatactttttttcctatagctttctctttatatggataagtttgaagaattccagactaccatggcaaaaagcaatgaactgtttacaaccttcagacaggaaatggaaaaggtatttacatatttttagtagaatagtatatcaaatggaatttgtataagctcttttaagtgtgattactattttgctgagtttcctttgttatgatactgtcttcattttctctttagtgatcctccagtggcatttttggtcattttgccctcaatgtaccccaagtagctaatgttctctatgctcttagaattctacctttattatagtgaaatcctatattaaatgcaacttgttagaaataaagtggtggtttttttggaaaaaaaaaaaaaaaaaaaaaaaaaaaaaaaaaaaaaaaaaaaactcgaggggggcccgtcccaattcc

SEQ ID NO: 1424 - DNA, 955 bp, Homo sapiens
ggcacgagtgaagtttgatgtcatacgtatcatttcattacattactttttattgccaaataattcattatatggatatgtcacattttatttattcataagttgatggaaatttggattgtcccacttcttggttatgaatgttgctacactaaacatttgtggacacatttttgtgtggacatatgtttttatttttctggattatgtactcaggaatggaattgctgccttaatatggcaactctgtttagctttttgaggaactgccaaactgtttaccaaagtggttgtaccattttctgttttgttcagcagtatataaagggtccaatttcttcgcattttggctatcacttgttattacatgtctttctgatgatagtcattgtagtgagtgtgaattatttcattatggctttgatttttctcagatgactaatgatattgagcatcttttcatatagtttttgatcatttacatatcttctttggagaaatgtctattcaaatcctttgcccatgttttaattgggttatttatcttttaattattgagttgtaagggttctttagatattctagatataattttcttgccagatataatttgcaaatattttctcccattcagagtgttgttttttcacttcattgatcttgtctttgaagcagaaaagtttttaattttgatgaagaagtccaagttatctattttttctttcttttttttatttgtttgtttttttgtgacacagtcttgctctgtcgctgaggctggagtgcagtggcgtgatcttggcttttgcaacctccacctcctgggttaaagcaattcccctgcctcagcctcccaagtagctgggactgcaggtgtgtgccactacacctcgctaatttttgtatttctttttttttagtagagatagggttttgccatgttgtccaggctggt

SEQ ID NO: 1425 - DNA, 1164 bp, Homo sapiens
ggcacgagcacatgcgcccgataggtccttctgagcctttctgtggctgcacttggggacccttgtggaccatggggtgtggctagggaacccctaagtttcagactaaaggaaagatcctgggtgatgctggctttttgcttctttcttctgccctcccacctcagcttgtaagcggggatgtgtgtatgtctggggagaggaggtgtagggtgcgtatgtccatggggggaggggcttgtgtgtgcagtcattgtcccaaggtgtttccagtagcgacttctgtccccctatccccaccctggtccccactttgcgcccccgggctccctgcctttggtgcacacaggatcctgcccgccccccttgccagagccagagaagggggttggggccattccaaggaggcaggactgaaacccttaccagggttactccccaacatccttttgcctgagtcaccctctaagcgctttaaccacgggcagctgcctgttccccagacagtttttggtggggggggtccagggtcccccttgctggtacctccctcaccctctttttgtttttccatctgtgcctgttccttccacagcccaggcacacagaagcccaccttcttccccttaggaggagggatagtcaacacccctgctgtctctctgtcactcacacactgatttatggggtctgagctgggctgttcctgcaggatggacaggacccagcgccctcttctccccacaggctgtaaatagacttccaatcaccaggccagcccccacacaccctcactcattccagggaagcccaggtaggtggtgaacccgctgccacgtctatcagtcctcttgttttatgcaaagatttactgtaaagtagatttctttccctccctccgccattcttttattgtaaatattgtctctaaatgtgtaacatattataaagaatttataaggatttttaaagatgttttgctcatttacaaaagtgttgtaacagtgttggacaaagccttccaccccatgtccgcatggctcctttcactgtgtccttgacacacctctctggcaacaactaaaatttcctgcttctgaaaagtcctgtcttaaaagtacagtctatatcttggaaataaatagctttcctcaaaaaaaaaaa

SEQ ID NO: 1426 - DNA, 1929 bp, Homo sapiens
tcgagtttttttttttttttttttttttttttagatgttgtctgtatttattttctacctttatgaaacaagaacctgctaacaggtaaatcgtaaagtaacatatttttgccctgatgccattagtcacaatgccatggggtaactgctatgtgatttcccatttgcaaggaagcatattaattcagtttctgctcaatatacaattaggttgtagggatatagatatctcatttgagttatctgagtttttcatctttatatctaaaaatctaatctgaaaatagtaaaacacatttaaaaccttagatgctactgtagtaaaagttatgtttataaacatttcagtatattccttcaacttcaagaatcttgaatttccttgctagaaggcttttttcctcaaagattccttttaggcttactttggtgttcaggatctccaattataaatgtagtctctcagcaccacattccgtaaagatgatttcccaagtaacggtatttgactaagttgctccagagtgttagggtgcaaaccacagttagtaagctccttatgaacaacctccatatcaagtactttgtccatttgcaggcagatgttaaatacagcagttggctcgtgtggatacagtactgcagagaaagatccactctgtgaagatttgagcagcatggtcagtgaatgcagagaatgaggcatgataggacctgtaatctccaaactaaattggtctctgtatccagaaagagcttgtgtcttcacattcacactccgtgccttaagcatttgcattgtggcacctcggaaagcaacaggggacaagagggttggaggaagtcctgcctgtggacctgaggtagcaactaaactcttagagttaatcaaaaaattgagcaatgtaaaggtgttgattccttttaccaacacaacagattcaggtctgtgatccatttgtacttcatgtttctctttacgcagcttgatagaaagtatgtctggctttttaattttatcttgcacacccatctcttccagccaggaaaaactttcctcttcatcytcatcactgatggcttgctccctaggaaattgctacagttagagtccctatttcacaagctgttcctgtgcaaatctatttcatgagtccataagtcagtggatgatataaagttattttaatcacatactccccatatcccaagcttgttccagatgctgtctccttcttatggccactttcttttattaaaggcagagaaaattcaatacctatatgaggaacaaaaatgtaactgagttgtcatttaaagtatttaacaggcatgctgtacttttagagtgtaaaaaatttgaaatgttagtttttacaaatgatctattaaggcagtagagttttcaagctttcttcacaaacctacaaacatgcataaaacgtattctccttgaaagaggttcgggaaacaacacatacatgtaacactctttcataaatcatattgtattccagttcactttttgaaaaagtactgattgggcccattaagtagatttcatgatccactaatgggtttactcagtttgaaaattttgttattaaaggggtaattggtactatagaagaatttctagaagagtatattcagatagtgactatctggcccaatatgtgttttattttagagatcagagaacactatgtggaaggaacagtttaaatcaggagtccccaacccctggactgtggactggtactggcctgtggcctgttagaaaccgggctgcacagcaggaggtgagcgactgtcgagtgaacattactgcctgagctccatctcctgtcacatcagtggtcgcattagattctcacaggggcacgaatcctactgtgaactgtgcatgtgaggcctcgtgccgaattc

SEQ ID NO: 1427 - DNA, 1444 bp, Homo sapiens
ttttttttttttttttttataggtaaggaattcttttctttaaattaagtagaaaactacgtggactacagctctagggagctcatccaggtctctgtgatgtcttcgatttcgtttcttcttcatttcctgcatgtgcttccactttgggccccccttgtttctctgtctccgcttctccctgtgccacatctgttcgcagtactggtcgaggctgaagtttgggctgctaagatttggatgtagtctttgtatctcaaccgtgactcagccaatagatccttgacctgcccctcctcatgctctgccctctgggtattttccatctgttcattctcaatgacattcaaagtcagcttcactatggtgtggatgaaagtgtgctcctgggctttgcagtaatacatcccagaatccttcttctgcaaacttcgaatcagtagcccatattccgttttgatgatctttcatcggggcttcaactcctctcgatgctcatcccctgacctctggatataccatttaatagttgctgttggggattaggtatacattccagaaaggtgagttaaattcaatgccaaaaatcacctttcatcagcagtttcatgactaatgctgttcttggatgtccccagcactgggtgattgggtccccatatttaacatcttggcgtctagctctccttttagaagtaggagcatatcgagagcatgcatttccatcccaggcacagtagggtctctggcaagacaacagtctgcgcaagctttcccataagtgtcgcatctgtgcaaggagagctgaaccaatccatctcgggaaccaatgtacaattgttgctgcttcagagacaattccatgttcaagatgattgatgagtgcttgaatatctgcaactcctccagcactacctcttccatattccacttttcctttgaaatgctgacaactttgaggacagttccaatgtctgttccaagaaacattacatcgtactggccatcttctgcaatgacatgatccaccactatctgtgtcagtctgtaatccacattgattctcttgaacgttggtcctcctgcaactgggtatacggacttatacatcacagagtgccgctttatgaaactgatgacatcatctggaaaatctcgggtggacttaatcagtgggtcataggttttgcttggacatgtaccaggccgtggataaggaattctcccatcatactgcacccaacgatggtctgcactttccttatgagcatatggaccattaaaaactgctctgatgtcagccatgctatacacacaaacagcagagcctttgaagatggagctggttgtagtaaagactccatatactacaggatttctttcatctcttgtggggagtaaataaatatcttgaagctcatcaaagtaagtatctgctcgtgcc

SEQ ID NO: 1428 - DNA, 878 bp, Homo sapiens
gaaggctgaaacgtgcatgtatataccagcctctctgggcacactctctctgcatggtagccagagcaggttctggctgctcttcaggctaatcgtctggcacctggactctggccacaacatcctctgatgtgcagaatccacttgaacatctgcaaaaaacttcaaggggaggagttgttttttgtttttttgtttttgtttgttttgtttttttgccactttacgaattggccacatgataggttgaggtgagccgaggacacaaaccttacacaggtaggcagcactaagctaaaatggattaaaaataactaactcaagcatgtcaaccaattagtaaatagaagaattgtcagtaaagcgtattgaaagaatatcatctaggatagcatttgatttcaggctggatgaaaaaataatcttcgaattttagagaattagaggaagccttcaaaattatgatgaaatattcatgatagtggtgatcatgatgggaactacaagttattgagggcatgtgccaggacccttgctatgcattacctccgattctttttgttttgttttgtttttgtttttgtttttgttttgagatggagtctcagtactttggaaggctgatgcaggcacatcacttgaggtcaggagttcgagatcagcctgaccaacgtggtgaaaccccgtctctactaaaaatacaaaaattagccaggcatggtggtgtgtgcctgtagccccagctactcaggaggcttaggcaggagaattgcttgaacccaggaggcagaggttgctgtgagccaagatcgtgccactgcactttagcctgggcaacagagcaagactccatctcaaaaaaaaaaaaaaaaaaaaaa

SEQ ID NO: 1429 - DNA, 793 bp, Homo sapiens
cggcacgaggacctgtccagcagcattctggcccagagccgtgagcgtgtcgccagcgcccgcgaggccctggaccacatggtggaatatgtggcccagaacacacctgtcacgtggctcgtgggaccctttgcccctggaatcactgagaaagccccggaggagaagaagtagggggagaggagaggactcagcgggccccgtctctataatgcagctgtgctctggagtcctcaacccggggctcatttcaaacttattttctagccactcctcccagctcttctgtgctgtccacttgggaagctaaggctctcaaaacgggcatcacccagttgacccatctctcagcctctctgagcttggaagaagcctgttctgagcctcaccctatcagtcagtagagagagatgtcccagaaaaaatatctttcaggaaagttctcccctgcagaattttttttccttgttaaatatcaggaatatagcccgggtgcggtggctcacacctgtaatcccagcactttgggaggctgaggcgggcggaacacctgaggtcaggtgttcgagaccagccaggccaacatggtgaaaccccgtctctactaaaaatacaaaaaaaaatgagccgggcatggtagcaggtgtctgttatcccagttaggaggctgaggcaagagaatctcttgaacctgagaggcggaggttgcagtgagccaagatcgcgccattgcactccagcctgggggacaagagtgagacttagtctcaaaaaaaaaaaaaaaaaaaaaaaa

SEQ ID NO: 1430 - DNA, 1441 bp, Homo sapiens
ggcacgagcttcagaaaattaatcacatacaatgtatgtgtcctcttttgaccttggaaatctgtatgtggtggagaagtatttgaatgcatttaggcttaatttcttcgccttccacatgttaacagtagagctctatgcactccggctgcaattgtatggctttctctaacccctgcagtcacttccagatgcctgtgcttacagcattgtggaatcatgttggaagctccacatgtccatggaagtttgtgatgtacggccgaccctacaggcagttaacatgcatgggctggtttgtttcttggggttttctgttagtttgtcttgttttgctttccagagatcttgctcataccaaggaatcacgcaaccactaaagctatccagttaagtgcaggtagttcccctggaggaaataatattttcaaactgtcgttggtgtgatactttggctcaaaggatctttgcttttccatttaagcttctgtttgagttttgccctggggcttgaatgaatcccagagagtcgttcggatggtgggaggctgcctaggaggcagtaaatccagtcacagtgcctgggaggggcccatccttccaaaatgtaaatccagtcgcggtgtgaccgagctggctaacaggcttgtctgcctggttttcctcctacacgtggacattattctcctgatcctcctacctggtccaccccagggctaccggaaggtaaaatcttcacctgaaccaattatgagcagtctccttactgaaggtacagccggatacgtggtgcccccggggctggtgttggcagccggggggaggtgcctgagggtccccacggttcctttctgcttttctgaatgcatcaagggtacgagaacttgccaatgggaaattcatccgagtggcaatggcagagaaggataggagtggaatgcccacacagtgaccaacagaactggtctgcgtgcataaccagctgccaccctcaggcctgggccccagagctcagggcacccagttcttaaggaaccatttggaggacagtctgagagcaggaacttcaagctgtgattctatctcggctcagacttttggttggaaaaagatcttcatggccccaaatcccctgagacatgccttgtagaatgattttgtgatgttgtgatgcttgtggagcatcgcgtaaggcttcttgcttatttaaactgtgcaaggtaaaaatcaagcctttggagccacagaaccagctcaagtacatgccaatgttgtttaagaaacagttatgatcctaaactttttggataatcttttatatttctgacctttgaatttaatcattgttcttagattaaaataaaatatgctattgaaactaaaaaaaaaaaaaaaaaaaaaaaaaaaaaaaaaaaaaaaaaaaaaaaaaaaaaaaaaaaaa

SEQ ID NO: 1431 - DNA, 626 bp, Homo sapiens
ggcacgagttccttccccaccagggaggacaacatcttcatgctgtgattgaagcatccattcagaacacgaggcaatattgtagtccacagggaatggatgcttcacttgatctccggaccttggctgcagaggccatcgcagcttttgaaaagtgaaggggttaattcccattggtgtctttgcttatagcatttttctctaacctataacaaggagacattacattttactttagaacatgagaatagcagttttgctcatgacttaccattccagctgcatgggaaagcaaagcagaaaacagtgccccaaatggaaaaaagatactcacacagaacaaaacagttcttggtcttgttcttggtcttgtcaaaccttgcctgatgctctttctaaagtcaaaatatgaatgctaagaaggcataacctacatccttctctgatttcttcagcagggtcaaaagacagttactagcaatggggaatgcttgtcactgtggagaaagagttttgtatatgtctgataccgttgttataacaaaacaaatttttttactatagttttttgttttctacctgcacgacaacacataaaaaaaaaaaaaaaaaaaaaaaaaaaaaaa

SEQ ID NO: 1432 - DNA, 518 bp, Homo sapiens
ggcacgagcaacaatggcaccccagtcgtggccaccacatactcggtttctgctcagagctcgatgtcaagcagacagatgactgaagacttcctgtaagagaaatggaaattggaaactagactgaagtgcaaatcttccctctcaccctggctctttccacttctcacaggcctcctctttcaaataaggcatggtgggcagcaaagaaagggtgtattgataatgttgctgtttggtgttaagtgatggggctttttcttctgtttttattgagggtgggggttgggtgtgtaatttgtaagtacttttgtgcatgatctgtccctccctcttcccacccctgcagtcctctgaagagaggccaacagccttcccctgccttggattctgaagtgttcctgtttgtcttatcctggccctggccagacgttttctttgatttttaattttttttttttattaaaagataccagtatgagatgaaaaaaaaaaaaaaaaaaaaaaaaaaaaaaaaa

SEQ ID NO: 1433 - DNA, 1830 bp, Homo sapiens
ggcacgaggtcacccagactggagtgcagtggcgcgatcttggctcacagcaacctccgtagattctcaatccaaagtcctaaccacccagatatgatacaaaacattttgttcttaagtgcatttttctggggagagggtcctatcatccccacccttccgcacacagttaagagctgccctctatgggagccaggctctttcccacagaatgtcagcaggagcttggaagatgatccgagctccaccccacatgcctgctctatgggacagtgcccacagctgccagccttcccccttaccatggagccaggcacaccaggcaagccaggggctccccgaaggccccggagctccagggtggcctctctctcctgcagggcccggtggcccaacaggccccatggaaccactcttgccaggtccaccaggcatgccggctctccccttctctcctgcctggcccttctgtcctgcagctcctggatcaccctacaaagatagatacttagtgctgtcaaatttacatcatgatgtctcaccaatctgctcttttctctccaccctcccaccaagcccccagcgtctccctctagactgtggccacagcatcctgacaggtcactccacctcactgccccagaatggtccttctagaagacagttctcctggtgttactccctgcttagaaattctgatggctcccaaatgtcctcaggataaagcactcattcgttggccgggcatgcaaggccattcattatgtggtcctgatcgttccttcctcagcctcctctccccaccctctgcctcccaccagacctcactggtgatgattctctgattctgccatgttgttatggtcctgaatgcccttcccctcatctctctctatccagtgcacccctcctgagctaagtgttcctgttctctccgcagcctctccgactccccaggctgggttgggtgctcctccctctcatcccacagcgctatgtctcatgtcttctggaaaacttgccaatccctagtgtaagtgtgactggtctattgtgagcacctattgttcagggacctctgtttacctgaggccaggacaagggcctggaatgtgagcaggagcaagggagtgctcgggaaatggaaacaatgaatgaatcaatcagtcaatcagtgagtaaatgaactggagatttccttccccccaaccacagctaatgaccccatgtgagaaattttcagacactatcctgctccaagttctgcatttttgccccctgcccactggccttcctgtgtctcctctctgtggctaaagccgtaacttgcagctgggcttcatccactcgtgagcttctcctctcaagcccagccagtgcccactcaccttgggaccaggaggtccatagaatccctgctttccagggggtccctagaggaaagcaaaagtcagaggtgaagtccgggcagcatctctgaggctccctggggaggcaggtgcagtgaagaggccccttccacagcctgaggcccccaggtgtgtccagcccggctctgtgtgagaaaggagcgcagcctccctgcccagctggaagggaaaataatgtcctctggggcatggccttgtttaagcatgttggctgggcccccatcacagatgaagagaggcgagaagtcagaatgagagggccagtctgtggcatactggggggccctggaaagactggtacccaggagatgtttgtttggaatttattattatcattattattgttgttgttgttgtttctttttgaccaggtacagggtttaaaaaaaaaaaaaaaaaa

SEQ ID NO: 1434 - DNA, 1022 bp, Homo sapiens
  misc_feature (476)..(476): n equals a,t,g, or c
  misc_feature (1010)..(1010): n equals a,t,g, or c
gattgtaagattgtgaagatatataaaattgatgaattaagagaaattatgccactttcctatagtttctgtgttctgtttattgtatggtgtattcactcttggaaaatatgtaatagttgtgtatccagaatatgtgtcttcacctgaatatttaatctttatatttacaaaaaaataagttccacaagatggacaaaaatggtccatgatatttagcttaaattgtaaccttttgttgtgtatataaaacttccttggaagaaaataaccttattgttttcttaaagctaaacagaataggattggtactcattaattatgtcttgcaaatattttctaaaaattcaaccactctcctaaaatggtgtttaaatattttgtagggcagaatatgcatattgcctgttagcaagtaataattcattctcatagagaaatgggtttttacccatggaagtaatcttttttttttntttttwtttttattttttttttattattatactttaagttttagggtacatgtgcacawtgtgcaggttagttacatatgtatacatgtgccatgctggtgygctgcacccaytaactcgtcatytagcattaggtatatctccyaatgctatccctcccccctccccccaccccacaacagtccccagagtgtgatrttccccttcctgtgtccatgtgwtctcattgttcaattcccacctatgagtgagaayatgcggtgtttggttttttgtycttgcgatagtttrctgagaatgatgrtttccaryttcatccatgtccctacaaaggacatgaactcatcattttttatggctgcatagtattccatggtgtatatgtgccacattttcttaatccagtctatcattgttggacatttgggttggttccaagtctttgctattgtgaatartgccrcaataaacatacgtgtgcatgtgtctttawaaaaaaaaaaaaaaaacccgggggggggcccgtaccattgncttagggggggg

SEQ ID NO: 1435 - DNA, 1077 bp, Homo sapiens
  misc_feature (476)..(476): n equals a,t,g, or c
  misc_feature (490)..(490): n equals a,t,g, or c
  misc_feature (1036)..(1036): n equals a,t,g, or c
  misc_feature (1040)..(1040): n equals a,t,g, or c
  misc_feature (1052)..(1052): n equals a,t,g, or c
  misc_feature (1062)..(1062): n equals a,t,g, or c
gattgtaagattgtgaagatatataaaattgatgaattaagagaaattatgccactttcctatagtttctgtgttctgtttattgtatggtgtattcactcttggaaaatatgtaatagttgtgtatccagaatatgtgtcttcacctgaatatttaatctttatatttacaaaaaaataagttccacaagatggacaaaaatggtccatgatatttagcttaaattgtaaccttttgttgtgtatataaaacttccttggaagaaaataaccttattgttttcttaaagctaaacagaataggattggtactcattaattatgtcttgcaaatattttctaaaaattcaaccactctcctaaaatggtgtttaaatattttgtagggcagaatatgcatattgcctgttagcaagtaataattcattctcatagagaaatgggtttttacccatggaagtaatcttttttttttnttttttttttttanttttttttttwttattatactttaagttttagggtacatgtgcacawtgtgcaggttagttacatatgtatacatgtgccatgctggtgygctgcacccaytaactcgtcatytagcattaggtatatctccyaatgctatccctcccccctccccccaccccacaacagtccccagagtgtgatrttccccttcctgtgtccatgtgwtctcattgttcaattcccacctatgagtgagaayatgcggtgtttggttttttgtycttgcgatagtttrctgagaatgatgrtttccaryttcatccatgtccctacaaaggacatgaactcatcattttttatggctgcatagtattccatggtgtatatgtgccacattttcttaatccagtctatcattgttggacatttgggttggttccaagtctttgctattgtgaatartgccrcaataaacatacgtgtgcatgtgtctttawaaaaaaaaaaaaaaaaaaaaaaaaactcgagggggggccccgggaccccaatttcgcctataggngagncctattacaatncactggccgncgttttacaacgccg

SEQ ID NO: 1436 - DNA, 1077 bp, Homo sapiens
caacaatgggcccacgaccaagaccctgggtgttcagaccccaaggccagggctttcccgctgcatcaagatgccaatccctttgtgggcttcaccagtgcccaagtctctatggagaatgagaactggaagccactgctaccgtctacccagcaccagtagtgccgatgtgccacactgcccagttgaggcccctcacgctctgtgcccctagatccttcaggtccccaccctcagctgtcaccaccaccctccccaggggactccatctgagatgaggcctcgtcctcctggaagctgaggctgagaagggtggagcttggccctggggaaggcagaccagggtctgatggcttctagggatgctctgcgtgtgtctcagcaccgctatctcagccactttcagccttatgcacgtagaatgaccacagccactcgcatccgtatagcactttaaagtttctgcagtcctttgacacataggatctcatggagcctcacgtctactcccttctgcagatgaggaaaccgagagaagtggcccaaggtcacgcaactctgagatgccacatttcatttgatcttgtacacattttcttttattccttcttttttcctcctttcatttcccactacgcacaaagagtttataaacactgttctcagaagagtcacagtttggggtgagatctggaaatcaagaaatgggtgtccactcttttctttcattagctaggatctactagatgcattatactccatacctgcttttcccatggccgccctacggaaaatcccatccacagaggccagggctacccaagcccctccaggtgagctgggcctttcctttatgaacctccatcctcccagccagctacagtagggcctcctcaccccgtaccccacagctagacagtgtcagcactcatctcctcctcccacatttctggagcttttttttttccttccccattgacctttgtggtcttctgtgattatttatgctgcctcccaaggatagaattgaaataaaatgttttcaacttatcaaaaaaaaaaaaaaaaaaactcgag

SEQ ID NO: 1437 - DNA, 1309 bp, Homo sapiens
ggcacgagaggtcgtaaggcactgggcaaaaacttttccaagaaagttcatggtgcacacgctgacctaaacactggccgacattcccaaggtttttttcattatggaagtgcatggccattgcatggtatccagaaaacaaagaccagagaagccagactttataccaccatctggaaacatttaatttgtgctttaggtaagtgttagcaaatatttaggatgattgatcaaatcattagtgtgtttatgagtgcatggtgtaatttttactaaagctcacatttcttcaggaactcgattcaactcctttacattcctggttattttcatttacttgatcttgaggtctcatctggcagagctgtgcaagctgggacctttgtggctcattttgaggagctgtttactttacctgttgatgggaacttgcaggtgggaggcagccagtcttaaagagtaccttgttagcaagtgtggaagagagtccacgcagacagacttgccctatgtggtgtcccctctgccagcccagcccttgggcacattggcacctacctgaacccgagccccctcatgcacacagggagccgcacctccctcacacgctcctcaccagtgtgacatggtgtgacgtgctctgtgggtccacaacgggcccactccacagctctgtgcacagcatgctgggtcagggtggtgctagattaataagatgagggtgaatgtcaaaactgagcactttgagtactgtgggcacactgtcacagggtttacccaggaaggaacaacccctgggctccagaagcaggttgaccaggccagtctgagttgtagcattgagactcatctagcggaagtcaatgaggaaggaaaactggctgagaacagctgttgtttcagttaaaatctcagaatgatgcattgaattcaaagttacaacacagcaaaatagtatatgtatttttttaaacctcaaaaatactgtattattaactttaaaacatttttggctggtgtggtggctcacacctgtaatcccagcactttgggaggctgaggcaggcagatcacgaggtcaggagattgagatcatcctggctaatgtggtaaaaccccgtctctactaaaaatacaaaaaattagccaggtgtggtggtggccgcctgtagtctcagctactcgggaggctgaggcaggagaatggcatgaacctgggaggcggagcttgcagtgagccaagatggcgccactgcactccagcctgggcaacagagcgagactccgtctaaaaaaaaaaaaaaaaaaa

SEQ ID NO: 1438 - DNA, 910 bp, Homo sapiens
ggcacgaggctctgggcatggtgctccctgtcatctgctgggtagaggtgctctgggcacagtgctccctgagtctgctggacacaggtgctctgggcacggtgctccctgagtctgctgggtagaggtgctctgggcacggtgctccctgcttctgctgggtagcggtgctctgggcacactgctacctgtatctgctgggcacatgtgctctggaaatggtgctgcctgcatctgccgggcacaggtgctcctggcgctgtgttgtgggatatgtacatccccagccatttgctgtccttgggcaacttagcaatgtgcgatggtattgttactttattttttagaagggacaagaaacacagaggtgagacatagaaaaggaaaacggatctatttaaaccttctcttgtgcccccatgggaatgtcaggcactgcatctgcaggtggcattggtgtggactcctgtcgacacgcaatgtactgtctgtccatcagcaggtctctcttgtgaattcctcctaaccccgccttaaggataaaaacgattcctctgtgggaataatcatcttagtttgtttaagctgatataagaaaaaatccagcagtccgggtgtggtgctcacgcctgtcatcccagcactttgggaggctgaggcaggtagatcacgaggtcaggagatcgagaccatcctgaccaacatggtgaagccccgtctctattaaaaatacaaaattagccaggcgtggtggtggacgcctgtaatcccagctactcgggaggctgaggcaggagagtcgcttgaacccgggaggcggaggttgtggtgagccaagatcacgccactgcactccagccggagtaacaacagcaaaattccgtctcaaaaaaaaaaaaaaaaaaaaaaa

SEQ ID NO: 1439 - DNA, 2894 bp, Homo sapiens
  misc_feature (103)..(103): n equals a,t,g, or c
  misc_feature (2876)..(2876): n equals a,t,g, or c
atgctgatgttcactgagtgtgtgctggacctgacagccatgaggggaggaaaccctgagctgtgcacatctgctgtgtccttgtaccagatccaggagagtntggtggtggaccagatcagtcagctgagcaaagactgggggcgggtggagcagctggtgttgtacatgaaagcagcacagctcttgcggcttctctgcatcttgccaaagcccagatcaagtccgggaaactgagcccatccacagctgtgaaacaagttgtcaagaatctgaacgaacgatataaattctgcatcaccatgtgcaagaaacttacagaaaagctgaatcgattcttctctgacaaacagaggtttattgatgaaatcaacagtgtgactgcagagaaactcatctataattgtgctgtagaaatggttcagtctgcagccctggatgagatgtttcagcagaccgaagatattgtttatcgctatcataaggcagcccttcttttggaaggcctaagtaggattctacaggaccctgcagatattgaaaatgtgcataaatataaatgtagtattgagagaagactgtcggcgctctgccatagcaccgcaaccgtgtgagcagcaggctcatcccgtggaccggtggtgggaacgtgaggtgatgcctttgggattacagcttgagttctgtcaccccatccccaggaaactgtagcttcttaactggtgactaccaaagaacaagcagtgatttgaaaaaggaaaaacaatccaaaaactacatatttgtaggaaatctgccttattggagaaaatcaccctttccctttttctttgtagaagcaggagcaagagtgtttggctcccagtttggacttggtgaataaatgtaccttagaactaggataatcggtacagttattcttaaagataattaaaaatgaaacaaagtgagtgctcgtcactgggttcatcagagcagtgtgtgaaattccatgtgtttgctgaggtgtaaaggtaaatgtattcacccctcatccaggcagtttgatatttggagtaagtttgtttaaatctgagcatgcatctttaaacagctcaggaagaaatagcttaagaagaagtgaaacatggatcttggaagaaattttgaaatcttcaatttgatcctaatatggatacatgttaatcttccaaaatctttcatattgcactaatttattaaaacaactgtgtattggattttgtaatttaactaaggcacaatggacttgtttaaaatattttacttgattgtatacatagaccctttccagaattcacatgtaatctccagtgaacttttaagtggttaaaacttgtattcatgtgaacctttgcacatttttttttttttacttctttatctacacctacagattttctcagtaatgtttttgktagcttttggttccattttttattgtgcatgcagaatgtacattgatgcctgtgaccttaggtttattaaaggctaggtttatttgggcagtattagaaacaaaatcatggatcaagagatactcttgataatttgaatagggccaaaacaaagttggtgacctaaaggcttgttagtgatgtggagttcctacatgcagtgagtggaaaatgaagttcgttttctcttaggaaaatgggcagctgtcttctgcctaatgtgtatttttcatgttaattctgacagttcaccaaatagctagtcatggagaatgcaggcagttaacttaatatccctccaggaatggttcctacgttgtgtattatttggtttcttttacttacctgcttgaatacttgaataaaccattcaccaattttaatccttttattttaatccttttacataaaataatctgaactctttgacaaattgcacagagctctttggcattaatctaattttaatgtactgataaaaacaaacatggttgtcctttactttgacaaagtaatgtaatttttaccttatttatctgtatgaaattccagtagttaatttgaacatttatttatatgacgtttgtatttttaggtctttaatacagtgtttctacctctcatttgtaactgcatgcattattcttgaaactaggtaaaactcactgaattgttgtgtaatagcctttttattattgcctgtacaaatgtatattaaggtaaaataaaactgacaaagtgtttctagggtgtagctgggtacatattaagtggcttgttgagccaggtacttccttagtgagtttagagacttggccatgaatatcctttgtcctgccccaggatttagatcttggctactgtcatgcaggcttccaggaacatagactgttttacctccacaaccctatttgttattagtgatactttattttatataatattttttattcacagtgaaatttcattcatgttctttcagttatcacctgtgttatctcagttgtaggtttattctatcctctcctcttcctctcccatttcttttttaacacaggatgaaacaggttcagagaggggaagtgattggcctaaagtcaggaactaggcaagtggtcaagccatgctttgtgactttcaagttaattcttcttgttcttgtatattaaaggtcttggggtagatggtgtgtgtgaaacagtgaagtctcaacagcagaaaagaacaaaatgtaaattcatgaataatggttctggttatacttccattatcaaggctaattaagagattttgccttgagtatagcaataataaacaaatattcggcacgagcggcacgagggggggcccggtacccaattcgccctatagtgagtcgtattacaattcactggccgtcgntttacaacgtcgtgactg

SEQ ID NO: 1440 - DNA, 837 bp, Homo sapiens
cggcacgagcctaacacccagtaggtgctcactaaatgatgttccttattattatggtgattaccactgtactcttttcagatgaaagtgttcggtcacctggaacctgtgagtatgtggtttttgatctgtgactaaactgttcacccatttcccagtttctctgctctgtcaaatatcaacattttaccaggtttctctgttgttgccaaacctgtcatttttatttggtgtggcttcttgggaaacttccatggcccatttgatgggaatcaaacagtgaaaacaaggacagatgcagcagaggtggcatcaggaacaaatgggtcataagaacttaccttggcagcagccccagaatggtcaggaggaaaggcactttaaggtatcagaaggtagaaaggagaggttggatgatagaatggggaagggattcctcctcgtgttcacagaagtgaatcaatgggagacacaaggttaccacttaatattcctgctctcctaggcatgggtcaggtacatcttcagccatgggtaagtttgttcaacaaatgagtgatctttgggaggctgaggcgggcggatcacgaggtcaggagattgagaccatcctggctaacacgatgaaaccccgtctctactaaaaatacaaaaattagccgggtgtggtggcgggcgcctgtagtcccagctactcgggaggctggggcaggagaatgtcgtgaacctgggaggcagagcttgctgtaagcagagatcgtgccactgcactccagcctgggcgacagagcgagactgcatcccaaaaaaaaaaaaaaaaaaaaaaaaaaaaaaaaa

SEQ ID NO: 1441 - DNA, 1377 bp, Homo sapiens
gcacgaggaaatcagaaacaagacaattatttgcagtgctgtcaaacaagccagaaggagaaaatcaaggtagaatgccccactttccagttgccttaggatagcaggctgcagcctcagacttgatcctgtcattctcctctgtctcccacatctgaattgataattgctgcaaaatgtcattagcctacacttcatccatcagggctcttggattcttacaccacgacttgctgtgcaaggtgtttattgcatcttcaaagtgaaactttaaattattattcaaacatttattttccttttgttttaaaaagagtccctacaatgatcacttctaagatttttttttaccttcccctctgcagcacacacagctattcaacaatgatttctaaaattcatatttcaaatttgtatctctccattttgaaacattatagaaagcatgggatgcttgagacaaatctggtttctcctttgaagtagctgttgacaacctactctcttgaaaagttagatataattcttaatcatgtttagtggaaatttgtttacctgtccatctgttttgctgtttcattgtaaggaagatgagaagtgttggaacagcttccctcccctaaaggtattctagcagaggcgagacagcaacttggcgggcatgttgcataggagttaagtaccagatggggaattgcccatgtgatggtgaagagtctctcacattgattttcttccttttctcctcttctctcctccttctcttctctcctctttctcttctcttctttctcttctcttctgtcttcctcttcctcttctcttcctctcctcttcctctttctctctcttcctttttctcttcctctttctctttctctttctctttctcttctcttctctctctcttccttccttctttctttccttccttccttccttccttccttccttctttccctccctccctccctccctcctccctttttctttttctttctttttttttggtttggcagagtcttgctctgttgcccaggctgcagtgcagtggtgtgatctcggctcactgcaacctccacctcccgggttcaagcaattctcttgcctcagcttctccagttactgggactacaggtgcataccaccatgcccggctaatttttgtatttttagtagaggcggggttttgtcatgttggccaggctgatctcaaactcctgacctcaggtgatccgcctgcctcagccttccaaagtgctgagattacaggcatgagccgctgtacccggcctgattttctatgattctgcctttaaaagacagcacgtataccaagcctttttcagaaagcttttctcttaactccttctaatg

SEQ ID NO: 1442 - DNA, 1319 bp, Homo sapiens
  misc_feature (65)..(65): n equals a,t,g, or c
  misc_feature (1298)..(1298): n equals a,t,g, or c
  misc_feature (1302)..(1302): n equals a,t,g, or c
  misc_feature (1305)..(1305): n equals a,t,g, or c
  misc_feature (1319)..(1319): n equals a,t,g, or c
tgccgaaggcttgtggcctgaccgtgtgtccccctgcagatgagcatcccactgctcctccaggncaaggtggccctcgtggagcgctatgtggccggcttcccggacctccagaggaggctgctggtcctcatggattcctggtgccagcccggctttgacatcaaggacgttgccaggtgagtcccgtggggcgctggcagctggcaccagatggcatcctgggagccctggttagggaagggagtgtaggggggcagcaggcgcgtgggagagctctccccaggaagttctggtgtttgggtcacagctgccatgtgactgcagctggagcagctgcctctggagaggagcggctggggctggcaggagcacagccctcttctcccgagtgaaaagagttaactgctcttagaagaacgaaaataattctccgtggtggctcttctcatgcaggcatggcaaccgtactgctttcttgttcatccattcctttgttctttcatctaataaagtttttggaagcacttggtgtgtgacgtctgtcagcaattacagagaaaaggcagcacctgacaaggagcccatatggtgcctgtatggattcagggaagccatgtgcatgtgtgtgcatgtgtgtgcatgtatgtgtgtgcccatgtgcatgtgtgcctgcaggtgyscatgtgtgtgtctctgtgtgtgcacgtgatatgtgcgtgtgtgcacgtttgtgtgtgcctgtaggtgtgcatgtgtgtgcatgtatgtgtgtgcctgcaggtgtgtgtgtgtgcatgtatatctgtgtgtgcattgtgttcgtttgtgcaggtgtgtatgtctgcgtgcatatgatgtgtacatgtgtgtgcctgcaggtgtacgtgtgttttcgtgcatgtggtgtgtgtgtrcatgtatgtgtgtgcctgtaggtgtgtgtttgtatgtgtgtgtgcatgggtgtgtacgtgtgtgcatgtgtgcctgtgcatgtgtgtgcgtgtggtgtgtgtacatgtatgtgtgtgcacgtgtgtgtgcctgcaggtgtgcgtgtgtgtgcatgtgtgtgcgtgtgtacctgtgtgtgcactgtgttcatgtttgtgcaggtctgtgtgtgcatgcatgtgtgtgtacgtgtgtgtgcctgcaggtgtgcatgtgtgtgtgtgtgagatatgagggatgacatctgggaggggaggggcttcctgctctatatctggtcaaggtgccccgagagtgaagcaagctgaaaggtctgtgaaggctccagggcccggccactngccnganaatcccggcgagcn

SEQ ID NO: 1443 - DNA, 2014 bp, Homo sapiens
  misc_feature (70)..(70): n equals a,t,g, or c
  misc_feature (1324)..(1324): n equals a,t,g, or c
  misc_feature (1520)..(1520): n equals a,t,g, or c
ggaacgtgagcaggagattgaccgctggagggtgaagtgtgtgcaggaggtggaggagaagaagcggganaggaactcaaagcagccgctgatggcgtactatctgaagtgaggaaaaaacaagcagataccaaaagaatggtggacattctacgggctttggagaaattgaggaaactgaggaaagaggctgcagcgaggaaaggggtctgtcctccagcctcagcagatgagacttttacgcatcatcttcagcgactgagaaaactcattaaaaagcgctctgaactgtatgaagctgaagagagagccctcagagttatgctagaaggagaacaagaggaagagaggaaaagagaattagaaaagaaacaaagaaaagaaaaagagaaaattttacttcagaaacgtgaaattgagtccaagttgtttggggatccagatgagttcccacttgctcacctcttggagcctttccgacagtattatctccaagccgagcactccctgccagcgctcatccagatcaggcatgattgggatcagtacctggtgcatccgatcatcccaaaggcaacttcgttccccaaggatgggtccttcccccgctccccagcaacgacatctgggcaactgctgttaagctgcattagtaaagatgctccaggagtgtggtccagccagcgctctttccagctgtaaatattagcgatggtgccatcttttgctgtagactaaactgcaacttctaaattccatgtggcattcccctaccctgaagttatgctttccttctgtgctctgtgctggccagaggtgcctcttgaatcagattaatgtggtttttcaggaaaggacttaggtgaactgaggtttttaccacaggcagtgaatgaccttggttcaccaaatttgcctctgttttgaggggcttggtccagagtgacttgttaatttactctaacttccttgtgtgttgatgggtaagtacactcaaacactgaatacaggtgtgtgatgggtagatttcacagcccttctactaatagtgagtgtgaaggcaagcttgatgcaaaacctcctgamctttcctacctgaagagccctttgacttctaggaagaaaggtcaaaaatgttatcttcagttgtgttaatcccagttttagtgcagcttaggaggctgctagttaggaagatggcagtggctgtaggctgggttgccagaaaagatggtggcctagtcttattattcagatggagaacttagaaaacctgaagagtacccaaattggattgtattttaatggacaatggctgtatttnttccatgttagaaggatcctaatgaaagcacctgttatttttaagtttctaagggtctagttgttcagaatccccaaggatatttccctaacctcactcagtcacattgtaggagccagtgtagctatggaattatcttaggaactcaagcttctaaaactatccatgtagtcaaatctaggggaaaaagcaaatnaaaatagtaaaatttggccgggcacagtgctcacgcctgtaatcccaacactttgggaggccgaggcgggccgatcacgaggtcaggagatcaaggccatcctggctaacacggtgaaaccctgtctctactaaaaatacaaaaaaatattagctgggcgtaggtggtgcacacctgtagtcccagctactggggaggctgaggcaggagaatggtgtaaaacccaggaggcagagcttgcagtgagccgagatcgcgccacggcactccagcctgggagacagagcaagactccgtctcaaaaaaaaaaaaaagtaaaatttattttttatattcattaataaatgctgttgtgcttggagatgatcactcatataacatgtcatttttttggttctgttttggtttggtttttgccaattattttgttatatttccaaaaaactaaataaaaatcatttttattttttaaaaaaaaaaaaaaaaaaaaaaac

SEQ ID NO: 1444 - DNA, 1200 bp, Homo sapiens
gatgaaatgtagcttattgttttcagctagtttaaattggtcttgagacaaatggaaatttgtttcttaattacaggctctagatgactttatagaacatctctgggctattatcaagtacttgcttaagaaggacaattccacttgaattatatattttataccccaaaggaaaataagtttaaatttaattttaaccagatgatgccatctgcatggagtcactctgttgtcgtgtccacacgtccaggatatgtttaatgaatggtgtttgtttactttattggtcttagccaaatgagtaaagacctggagactgggcaatttgagaagacatttaggaatccctggcttttctctgttgatgccaccatataagctaaggatgacagtgggtagggaatgtgtgtggaattcctgtgtgattcactgtaactgtggtgtgctaaatgcatggttaagctagygtmagcatcstcttcctgtaagttaaagatcccttctgtgagcaggactcctgcgtactcatgtatattttgaaatatgctttacaggatattttaggacttaataaaagatgactgatgtgtaaggggacttaaaaggaagaaaaaccccttcttctgtagggtagcatatttgggattataattttcattttctttaggttggtttcatwtaacttttttttttttttttttgagtcagggtcgtgctctgtcgcccaggctgtagtgcatggcacgatctcggctcatgcaattccgcctcccaggagaattgcttgaacccaggaggcagaggttgcagtgagccgagatcatgccattgcaccccgactctgggcaacagagccagactctgtctcgggggaaacaaaaaaaaagtgtgctttgtcaagagaagcaccagcagacctctaagaactgctctctaaggctgcggtagcaaattatctactattgcaggtgccttattggtagagggctctgaagagccaaaactgtatatgcaacacttgtaagataaaagggactttaataatcaagattttcttgaagatttgttagaaataatgtcttatttctggtaacctttccctttttgtatttataactctactaaccaaattacctatcaataaaccattactataatattttaaaacaaaaaaaaaaaaaaaaaaaaaaaaactcgtag

SEQ ID NO: 1445 - DNA, 1295 bp, Homo sapiens
tatgaatttatacactgagtcttgtcttgtgtcctcttttcctagcaaacaatatggcatctaaaacccagttctactctgaataattttttctttacaagatgctacagtatgatacaccatgcccacctggagagaggataaaggtgatggtggtaggacagaatttccatccgcaatctccgttttgagcaaagaagcatggaggatggaagtcattgctgggaccccggagtagagtggtggtgggggaacagggggaacatcagactgccgaggtatgagtttgggttctcatcttcttcccaggaggcttttgaaaccccaggatgatgcctcctagagccttgctgtcaaattcaataggcaataacatgaaggatttactcagccaggctcatgagaccagctctgaggaagctgtgcttttcttgtactgatcggtgatgtgcatcaccctaagggatagtaaacagatgaaacccagaaagtccagtcaaaagagcaccctctgggawtgaagrtctagtgaagactggggagacagatgaggaaagatcctgaacaggagccactcattccagctttgtctccatagcctgcccgcccacgatggatgaagtgcgtggaggagacaggcacgttcttcgagcccacgctggcggctttgtttgttcgtgaggcctttggcccgagcacccgaagtgctgtatgtgagagctcttcccagcccacatccctccaccccttcctacccaaagcagccttccctcttctattaactttgactttctcagtggtgtgtgtgattggggaattgggcastcagagaagggcyactgasagagggaacccaaaggcctgctccatccctggtgtggaaacagttcagcttcaggccacaaattctccatgacatgctctcacttggacaagtcacccaactttcctggtcttgtgtttcttcaaccatcaaatgagaaaatcgagccaggctcggtggctcacacctgtaatcccagcactttgggaggctgaggtgggcggatcacctgaggtcaggagttcaagaccagcctgaccaacatggagaaaccccatctctactaaaaatacaaaattagctgggcgtggtggtgcatgcctgtaatcccagctactcgggaggccgaggcaggcgaatcgcttgaacctgggcggcagaggttgcagtgagccgagatcacgccattgtactctagcctgggtgacaagagtgaaactccatctccaaaaaaaaaaaaaaaaaaacctca

SEQ ID NO: 1446 - DNA, 2163 bp, Homo sapiens
ttttttttttttttttttctgaagtggtgaattttaatattgtataaaaaatccaacttgttccacaagtacatatgtcctatgattttatgcatacatccatatacatatatcaaggtaaagtccaatacaaaaaaacagcatttcctatggccagtgttctacagaagtaagactgtgcaaactttatcgtatagtcaaatgagattgcacactaaggcaggatgaggcagaagcaagttgtgtccacagtatattacaaaataccttgcatagcttattcattctcacctggtaaattcatcttagaattctgaaggatttttttcctagataaatttatacaagttagtgtatacttcttgtctttgttctgtggcaaaccaggtttctcagtactgattgttttacttcacaacattattgatttaacaatagcctgagctttggggctctgcactgcgttcattgtaatccgtgatacaatgactacaaatgtgtcgcgatttctaatcttcatctgtatctcaggcgattttccagggcttccattctctgtgtcatttcttctaagcgctgtgttaattttcttacttcttcgtttgcaaggttctggaacattataaggttttcacatttgcattgatcgtgtttttcttccaaagggcttcctgaaggttttgttgaatgggaaagcttttgtgtagaccgtaaaagattgtcttcttcaaacagatatctgtgttgcactgttggctgttggaccatttttggcagttcccctgctggagagtcctgtcttccatcggagtcttctagagcttcacagatgcctttcttgagtttttcacttatctcatccattgtgctgaagtcttcggcatagaagagatgcttgtttgtgggctcagaggcaatctcttgtagttcctcctcaatggcttttcctaccccaacagcatacatagtgataccattggccttggctttactggcccactcggagacgtcatcctgagcccgtccgtcggtgaacacaatggctgctctgggcacccttgtggaaaggggcctggccccttctccttgggtaaaacttctctcaaacatgtgtttcagggccagcccagtcatagagccctttcccatgtatttcatgtgggccacggcttttttcatgtctttggctgagttgaagtttctcagagtgaactctgtgtggacctgtgtggaatactggagcagccccactcgagcggctttgggggaaattgtcaaggaatctataattccagtgacaaactgcttcacgacctcaaaattctcttctccaagactcttggatccatcgatcacaaagaccaggtcaattgggccttcagtgcatttcttgcaccgtcttccgtcctcagctagaacaaatccctctgagcatttgcagatgtaggaattcccattattaacacaaatgtgttcgcagccatggtgggttgatttgcagacatccttccttcggcagcgtttcccatcctcagtgagccggaatccctccaagcactcgcacgtgtatgagtcgtcactgttcacacaaatgtgttcacagccatggtctatagcttggcagacatctttccttctgcaggtttttccatcttcacggagtatataaccttcaaagcactggcacacaaacgaatcttcactgcttacacacgaatgttcacaaccgtggtcccccagagcacaagagtccaattttgcacacgtcttcccatcgctgcggagcacgtgtccctcaggacactgacaggcaaaggatctgtccatgttgacacaggagtattcacaaccatggtcactcagcaggcagtaatccacccgggagcaggtcttgaggtcctcgttgatgaggaagccttctgagcactggcagacgaaggaatcctccgtgttcagacacagctgctcacagccatggtcctgctgtgcacagtggtccactcggctgcaggttttgccattggggtccagagtgtagccacggtggcagcggcagtagtagctctcctccatgttgacgcactcatgctcacagcccggtttgttcagtgcacagtagttgatccttctgcaggttttcttatctggattcaggctcgtgcc

SEQ ID NO: 1447 - DNA, 1781 bp, Homo sapiens
aggggaagggaggcgaaggcctgaggttttccatcttcattctcttttgttattaggagaaggtgaggcatgggccaatcccattcctgccttccagtgccccaccacccttctgatcttaggggttggatgggtcatctgtccttggtcagaattttctcaccctagtactcctactggcctgaccagggctgactgggtattctaatgaggagctgggaagtggggtgacatagctgaccttagtatcaacccccctcttctccaactcttgttttctagtccaggatatgctaaaggacgaagattttctattgtttccaggccctcagaccatccttgctgtcccttcaccctccatgcccctgccatcctcactcacttctcataaatggatctgggggttagagtggaggaaataaaatcctgaagtggttgtcagtgcttgtgggatgcagtggtcttcaggattctccccgcattattatgtagttgttcagaagctgttgctactgcgtctctctgtctgcagggggcacttgttcctgaggtcctcgcctgggtcctgacttctgtagtttctgtgaagacgtggctgtcctgtgggctcctgtgtgtgctggctgcgccctgagctccgagacagctgcccataacctgctaaggtcagggcccagggcccccccacagcatggctgagggaccccttcccagtagggctgtcccaagccccactccatggggccaggtttcctggccacttttgttgatagcagatggatcaatattagtaaccccatccaagattgaactgtgaaagagaggttccaggggtatctccctcagtgccagttacttagtgatgtgttacccaggatgcagcaggtgtgtgcaggtatcttgctctctaggcctgtgtgtgtgtgtgagtgtgtgtgtatatgggtgtgggtgtgtttgtgtgtggtggttgtggggggggtgttggaggttctatttcatttaaaaatgtattcatttccctggccccacagatgcttccctccatactttttatttgctctgtttcctcagatttattttgtcttgccccattgcctctccttccttgaactctttccttttcaatctcaactcattcactgctgttgctcatttgcccttttccatgtattttttcctacttaggattttccactctatctttgtggttcatgaggactttgcctcttctcctgcctcattccctgactttctctagttagatgtcagtcctaaataggttttcctcacttcaggcctcacccctcaccttgtttttttgggggctccagggaccaatctggggctggaaatgttaggaggttgccttggtgctgccccagatctgtccagcagggggcagtaagtgatcttggtagtatccctggctgctaagcccttggcaggggtggtcctttctacattcccattcacttaacagctcttttgggattgggtgtttcattccatttctgcccactccctctcctctcctctctggtaggtttaattttatgctttccctgattccagctttctgcttcctgaggactcccgctccccccaccccaaagtttgtctgtggtgttatagtggtaactgcagttcctcctctggaatgtagactgtatatgtttaatactcaccttctctatccttgctcaaaatgtgggataacgcgatgactgtgaccctggttggaaattaaacttgttttatgcaaaaaaaaaaaaaaaaaa

SEQ ID NO: 1448 - DNA, 2151 bp, Homo sapiens
aaaggcacgcaaaacggaaaagcgtgtgtaggggagcggaaaaggaagtcaccaccgtggcctgcgacgaaatggcgaaaagtcttttgaagacagcctctctgtctggaaggacaaaattgctacatcaaacaggattgtcactttatagtacatcccatggattttatgaggaagaagtgaaaaaaacacttcagcagtttcctggtggatccattgaccttcagaaggaagacaatggcattggcattcttactctgaacaatccaagtagaatgaatgccttttcaggtgttatgatgctacaacttctggaaaaagtaattgaattggaaaattggacagaggggaaaggcctcattgtccgtggggcaaaaaatactttctcttcaggatctgatctgaatgctgtgaaatcactaggaactccagaggatggaatggccgtatgcatgttcatgcaaaacaccttaacaagatttatgagacttcctttaataagtgttgcgctggttcaaggttgggcattgggtggaggagcagaatttactacagcatgtgatttcaggttaatgactccagagagtaagatcagattcgtccacaaagagatgggcataataccaagctggggtggcaccacccggctagttgaaataatcggaagtagacaagctctcaaagtgttgagtggggcccttaaactgggattcaaaaaatgctctaaacataggaatggttgaagaggtcttgcagtcttcagatgaaactaaatctctagaagaggcacaagaatggctaaagcaattcatccaagggccaccggaagtaattagagctttgaaaaaatctgtttgttcaggcagagagctatatttggaggaagcattacagaacgaaagagatcttttaggaacagtttggggtgggcctgcaaatttagaggctattgctaagaaaggaaaatttaataaataattggtttttcgtgtggatgtactccaagtaaagctccagtgactaatatgtataaatgttaaatgatattaaatatgaacatcagaattactttgaaggctactattaatatgcagacttacttttaatcatttgaatatctgaactcatttacctcatttcttgccaattactcacttgggtatttactgcgtaatctggaacatttagctaaaatatacacttttggcttaaaaattattgctgtcaattccaataataattcttagcttataaccaaagagcagtgtttaaaaggagagcttctatacaaaacctattcctggcgttacttttcatacaatttttgttctgttttacctggaaataatttaccaaaataactgagtgttgctgctaaagaacaaaagtggggaggtatcagggaacaagaaaacaagaaagggtatgatcaatcattttcttctgctccaaacagctggagtaaaattcatgggaaatggcccttcatttaaaaaaagatgtacctcactacccactacaaatttggaactttgttcttttcaataattagttttctattgtaaattacctactaaacagtggtagccatgacatggaaagtcaactgattctacaattggacattcatttgtgtgccctggaatttccaactagtaataaacaactactgttgatgtagttttaaaccacttgaagggactcatgaagcatcctgcaacataaatttgcatttttacatcagatttcttttttttcctgaaaaacaactaaccttctaacaactatctttcaaaagtaaatgtaataaaaatgcacaacataaaatgtttatgatcccagcaatacactttttaaaaaatgtgaaagtcaaagaattaagttctagttctgactcatcacaagaggtcaaaagtatttgctactgtaacattcaattcacatttgagaatcatggtaaaaataacttgtatttgccttaccatcatgatcctactgttgagttaggaaaatatggttagacagactcacattactttttttcagaggtaaactctagattactgtgtcaacccaatactatttggccatagatgtaaaaactaccaaataaaagtggattttgtggtctacaaaaaaaaaaaaaaaaaa

SEQ ID NO: 1449 - DNA, 1829 bp, Homo sapiens
cggcacgagattggagcctatttagtggattttatgcagccaaagatgtttcttgttgttgttgttgttcttgcttttaactaatttgcctcccaggagacagttgaaatgtctagagacattttgattattatgcctggcaggacgccactagtggcatctagtggatggagggtaagggtgctgctaagcgtcctcccatacacaggacagcaccccccacaaagaattatccaaccccaaatgtcagtagtgctgaggctgagaaaccccactctgctctctaaccaaaattagacacagaaagtggagacattctaccaccctgacaacatcaatggcttttgcccatttaaaacaagaaagaggaatatgtatccaacccaaaacaacatcttaacattctttctaataggcttttgcaaaaatagttcatattttataactgtcttgcagcatggggtataagtgtaatcattgtaaaaatgaaacctaatcattgtaaaaatgaaacctaatcatggtaaaaatgaaaagagtgcctcaaaacatctgaagttcttagcaaaaggcagcctgtcttcagtgggcacttttggatggaggcaggactagggtatcagtaggagtgagaacaaaggtcagaaaaatgagtacacagcacatgtatactgattaatttctttcttttttccttcttttgatggagcaagactgtaacagaagcctgagagtgaggaagggctttggcaactattactgtagacacagtagtttactcaattttatgaactcttagtcctgggctggaattcacgcctctgctggaattgcacagacaaaacgtgcttgcgaggagtaaggtggcaacaaaagaaaaatgcaggcaaaaacacgcctcattttgaaaccggatctgagcatcctagagccagagcctctcccagccaacattgctgagttgagcagagtgacagactccacactggagccagccccgcagctggccataaggaggagccacgagcaggtgctgggaagacaggcttttgaacgcacactatgctgatgtctctttctgtgaagttttctacatgagtgacgttctcaaagtctgcaacacagtctgccatgagatgccttttttcctctgggaacacaatgctactttcgtgattggctgagtaatggcccccaaagatgtactcttcatcctaatccctggaacctgtaaacatgttaccttatatggcaaaagagacttcgggcaggcacctgtcatcccagatactcaggaggctgaggcaaaagaatcgctcaaacctgggaggcggaggttgcagggagccaagattgtgccaatgcactccagcctgagcaacaaagtgagactctgtctctaaaaaaaaaaaaaaaatttctcagatgtgactcagtgaaggattttgagatggggagagtatcttggattagccaggtctgtgagaactcctgacgtctgaagcttgactcccaagtttccatagcaacaggaaaaaaaaaaatctatccaaatctgaagattgcggtttacagctatcgaacttcacaactaggcctcaattgttccggttttttattttctttacaatttcacttagtctgtacttcatcattttgacagcatcttcctccctcctttaattaatggaatcttctgaattttccctgaatgtttaaagatcatgacatatgacttgatcttctgggagcaggaacaatgactactttttctggtgtgttaacatgtcggtgccgaattcgatatcaagcttatcgataccgtcgac

SEQ ID NO: 1450 - DNA, 1581 bp, Homo sapiens
tttagtgtaaattggcaaattttatttaaacctaatgaatccatgtaagactggactgtactgtctcgattatggagtctcattataacagcatccttaggggttacattgtggcactacctaaaaggtaaaagtgctgcaataagggctctgcaggcaattccatcacaaaaccccatggaataggatcacctcccaccaatcttttgctaagcactactctctggtaaagagtacagaagtttcaatgttttgatttttttttttccaggttggcatgatacaaatggcagcacacaaaaacaatgttaaaaaataaaccaaataaaaggctgtacacaagaacttatgtttattgcaaacaaacaaacaaaaaaaaaaggaaagagaggaaaagagaaaatggtcagaagcacaacatataaggttaagaatttaaaagcatcttacattctgccctaatggcagcataattaatagcaacaaacggccgtcttgctgcctgccgcagccggagggtatttttgcagacctgacgagcaaattttgtgaaatatgtagtatgaaggaagaaagcttggcgggtcttcactgcagactttggactcccagtgtttcggactggcattccctgcatggcctggcgggacacgtgacttctaacacgagggtcctctgtagttgggctaggagataacttctcttcttctgactgggtgggcattttcaagcctccatattttttccaataaagccaacaaattgcacataatctacactgcatattaggtgggccccaagaataccactggtgagactgtgtagcatagcagctctcacaggctctccctaagagaggattctgaggctggaacgtggtccccacagctccattcacagcaccaggcttcccattactagtggatatttggttgggatttggtttgctgtaggttgggatatatacttgtttcagtttactctcagcttctgctgcttttagacgtttctgttgcacatatctgtcagtagttttccacatgtaataatattcaatgatgctagtcaatgatttccaaggaagaaaatcttgccgtatgtcattgaagtctttgccatatttttccagtgcctcttcaaataagctagcttcagaggctgaccattcctccatttcatctctgcataaaacaggtcctccgagtggtactaagacactaatggcactgctcaaatcatagctgtgtctatacaatgtatccatagcgtgaaacaaggtgatgtctcgggaagctgcagcagcactcatatgcaaactaggctgcctcacagaactgctgcaatccagggctctggcgaatgtcccaacagcacgtgctacaactaaaaactggtcaatctgtcgatccgtaagtgggctatttggatcccaaactttaacttccaattttgattgttccctctcatctgattctccttctaacagcatttctggaatgtctgcttgatatctaggtcccactctgatttcacctcgtgccgaattcgatatcaagcttatcgataccgtcgacctccgag

SEQ ID NO: 1451 - DNA, 1263 bp, Homo sapiens
ggcacgagccagaaataaatggcctaaatggaggaggaaagacccaaagtcttcctctaatgtgttctgtctccaagcagtgaagagaatgctttggttttaaactagttaatcagaatgatatagccctccttcctggaatgaacctttctcactgccccccttctccaactgttggtatgtctcaatagttccttccccacatatgcaagaggctgccagaatcttagaaatagcagcctggtcttcagaaactctcccctagttcctacctttcctcctcctcccctggctctactctctcctcactgtctaagactattctgagttgtggatactggacactgtattttgaaccagttctttggctctcttctcagccamctgatcatttattaggcatatctctttggtggttcatcctactttctctccagatatcatctggattcctggtatatctttgtgggggtggggagcagccctaccctgtaactgtaccttgtccagctcctcaaatccaagtttctcagaacccagggcttgaaaggaaarattcaacactaaagctgtagctaataaacacacagggttggaagttacccagcatacttgtagacatagaaaccttggccagaaaagcaatgacttgtccaagtcactgagaatagtaaatgacacagaactgaagtcccacagtgtctggttattgtttttaatgtaaatgtactactgtactatagcatacatacacaaaggcaaacaaatcagaaatatacagattgagtctctgaatgaagtttacattttggttctgaggatgaagctcggaattttttatcttgcccaaattcctatctaaggggtctgggggagtatgccctagaaaccacaaattctcatcacatgggttttatttaaccttgcatatcatgacttattttccaatctgactttggcataacaaggaaaaaaatcaaaatgttttaccccaaaatatatttccttgccataccttgaaattgccctgcaaagtctctcgtgggaaaaatccacattatatggagaatctccttccccctttgttttccttcgtctctttccagatccgggagataatcagctaagagccaggcaccgctttaggtctgataagaaacattttacaacctgctcgctctctgaagtctgctttctgagagattcctctgcacaatacaacctcgtgccgaattcgatatcaagcttatcgataccgtcgac

SEQ ID NO: 1452 - DNA, 1347 bp, Homo sapiens
ggcacgagggaaactccatggccccatcctcgccagatagcgatccctagtgaatggcatagatgttgttcagatttactttgaaagaatcaagtatgtgaatggatggatgaatggaattgtgaagcacagatgagctctttcacactccaaggacacagctcatcctatgcttttggacacttcttccctgtttattacaatgactattctccaggttgttgcactaccgctgtatctgtacataattctaacttggcacctgtggccttttttgtgctcttatgtgtctgtatttcccggcagagtatacgcccttgaatgccaggaacttgtttccttagtcttttttatatatctagcatataagatattgcttagaatatggtagacatcactgaagatttgtttcagtagttcatattttgtaatgatactgaatggttaaacaatccctttctaatctgtctagcatatatgtgacttttgtttatcaagtgtcacacaactgcttcaaggcagctgtgagatactagaaaccaaaattcttactcctatgtctgtgtcatcccagatgtgtgcttccagatggcagtatactacactatctgtaaaatatatttgcaaagccaggcacagtgttacgcgtctgcctcaggaggctgaggcagaagaatagcttgagcccaggagctttagtctagcctgagcaatataatgagactccgtctcttaaaatatttgcccaaacattgaacctaaatttgaccatgcccctagaaataattcctaatctttagaaaatagggcagagaaacattattttacaccatggagatgagatcagcagaatccagactataagaaactacaggacacatgacctagtttcttctgtaaataacttgcaaggatgaaagatggaggatgaacctatagatttaaagagacttaagagacatattaaccaattgttaattggatcttatttgaattgtgatttgaccgaactgtaaaacgaatacatttatgagacaatcggggtaatttgaacattggtggggtatttggtattagaataatggttttatcattatgttagaaagaagggtcctcatctacattctcaaacatctgtggctgatatgatatgattcttggaatttgcttcaaaataataagtctggatgttaagtgcattggaaatattgatgaaacgaaattggccttgataattgttgaagctgggtgatggctaaaatgatggttcattatatatgttcatctctatttttgtatgtttggcctcgtgccgaattcgatatcaagcttatcgataccgtcgac

SEQ ID NO: 1453 - DNA, 1277 bp, Homo sapiens
  misc_feature (150)..(150): n equals a,t,g, or c
ggcacagcagctactcaggaggctgagatggaaggattgcttgagctcaggaggtcgaggctgcagtgagctgtgatcatgccactgtactccagcctgggtgacagggcaagtccctgtctcaaaaaaaaaaaagaaagctgtgtgctnaaatactattttaagcaattataatggattaaaaactcctttaatcttcacaacaatgttttttctttctttttttttgagatggagttctttgaaactcttggattaaatgactcttcagagctttctttgctttttgatactaaggagtggcatgtctggggatttttatagcaaataattyctccttggctactatccttagaattccaagtgtttttaatgaaaagaggagacttgtttttagtgatgttagttgtttttaggaaaggtgttctgcagtgtttttcgctaaggtggctcacgcctgtaatcccagcactttgggaggccgaggtaggcagatcacttgaggttaggagtttgaggccagcctggccagcacagcaaaaccctatctactgaaaatacacaaagtagccaggtgtggtagtacactcctggagtcctagctactcaggaggctgaggcaggagatgacttgaacccgggaggcagaggttgcagtgagcctagatcgcactattgcattccagcctggacgacagagtgagactgtcttaaaaaaaaaaaaaaaaacataaaatggagaggtagaccagcttacgggaggtgttgcacttccctctgccactggagagactctggatctgcagccagggagcttgtgaaggcttcttgtccacggaaatgagggcggcagttgtgactttctggatggtggcccagaggaagcaacactggcagagcctcttctgtgaagcagctctgagagcaattttgtgacattgaaagagcaaaggataaaacgttgaaagctgatccagatctagaaaagtgtttggcaattgctggaaaaggtgtagaaatgatgcttgctctgtatcgtaagttatatggtgagaagaccacaagcacggttcaaactcccctcagaaattcttttgcacagaaattaacactttaatcctaaatgtttccaatgttttaacttacagtatgctaaataaacattctttctgtttgtttgttttgttttgttttgttactctgtgcatttatagccaatagagtttttctctcgtgccgaattcgatatcaagcttatcgataccgtcgacctcgag

SEQ ID NO: 1454 - DNA, 1456 bp, Homo sapiens
gcccttattagatgcccaatcttctaggcaacataactacaagccaaataaaccttttttctttataaattacccagccttagctattcctttatagcaatacaaaatagactaagaagacatgtggcctgtggaccaaatctgatgtgctgtttttgtgaataaagttttcttgagacacaggtacactcattcattacatattgtccatggctgctttcacactacarcagcagaggtgaatagtcatagcacatactgtatggcctgcaagctmaaactgtttactatctggtgctttacaggcaaagctttgccaacctctgrgtttaattgattggggttaatattattcattcatttgtttattcatctatttaacagacagttaacaagtagctaccatttgccagacactattttaagatctaaggttatagcactagttacattattagacaagyytatgatcctcaatttcttaatctagtactacgtatgtttgtcttttatttatttggggtagactatgctctgaagtttttataatgagatatgtacctctatgccttggtttagggtctcccacaagcagaccttcaggcagttgttttggtggaggcatcttatttggatggtaagaaaacatgaacaggagtggggaagtatgaarggaaagggaaggcagtcaaaaaagagttaattaccaagccacctgccatagtgcgtgatagaaacttaaycccctgaagaaactctgggaaatctgtaagcacacaactcagaaacacctcacctaagggctgaggagcagaggaatttataatccaactcttaagtgtcatcggtagatactcatgtgtgtgtatgtatgcggggggcaagaggtgggatggtttgattctttgtttgccttgkatggtgaatgcctccatatcaataaactccattacccagcactatattttgctcccttcccctaccccaagggtacagaactctcaaagttcactgccacacctgttttcctagtttcggtagctacctattaaccagaacttgaaacacagttattaaataattctttacttcttgaagcagagtaagtgcttccttactcaagccatattagaacgtggggacagatcttgaggaaggcaagtatcatctcccaaggctgcctcctaggtgaagcttctgcttggtctcccagcaaggaaaggatgctatattctaagaataagatgtggataacttctgaagtctcagagggttaaggagaatctgagagttcaagagtctggagtgcatttacacagatgtccctctccctggacatatctcagggttttccatcttctttatctatgctctgccttagaatgttggctggggctgttgcttcaacactcgtgccgaattcgatatcaagcttatcgataccgtcgacctcgag

SEQ ID NO: 1455 - DNA, 1728 bp, Homo sapiens
ggcacgagaggccaccggagcccacagctcaacaggcttgggtccccttccatgctgtgggaagtttgttctttcgctttttgcaacatagcttgctgctgctcactctttggtttcgtgccgcctttaagcgctgtaacactcactgcgaagtctgcaacttcacttctgaggccagccagaccatgaacccactgggaggaataagcaactctggacacaccatctttaagaattgttaacactcaccaggagggtctgcggcttcattcttaaactcagcgagaccaagaacccaccaattccggacactgtggagagggaccagtggtgggcagggctccagaactccaaagatcgtatgttctttgtcttctgctaccaggtggatatggaaggaccatcaggtgggggtggggctaggcgtgcctgagctcagactctccttgggtgggtcttgctttggctgctgtgggggatggaggtgagattcccaggtcagtggagttgtgtacctagaaggattatggctgcctctgctgagtcatgcaggttgtcagggaagttggggaaagctagcttccatgcacactgaaaggctggtctcactcccacaatgccccttgtgatagcccggagtctgtttccaggccgaaggcgaatctggcttgaaaacttacctgaggctttctgcctcccgaatgacaaagaaatgggcttcagttcttaccccgcctgtgaagtctgcaagcctgattcacgccctcccccgagttctggccgggaggcttccagccccattcaattttttacaaagttcagctagagaggttcttctccctgtgaagttttaccccctgctcctctggccacccccctgatggatgtctgccgtgccaggcaggaatgggctacttggggatccagcggccttccagtgcctttgtgctacttcctctactcctgtatgttgctcagctcggctctctaacttgactcagctccaggtaaagtcacgaacttctcccacaaacagactttcagcttctccagtgggggtgtgtgttcatgagacgagggtctccctttcccatttccgtggttaggggacttaaagtatttggggtgtctcccaggtcctgcaagagcagtctgcttccttcggagggtctgtgggtcctgtcaggattgctggtctgctcttgcagtccatctggagctaaaattcacaacgcaagcctccgcatgctgctctgtccagagctgccatctagttctgcctcctgtctgtcataatccctcatgacccttgagctttttttttcatatgattgttggcagcatgtatgtcttcttttgagaagtgtctgatcaagtttttgcctatttttaaaggttttttttttttgtaaatttgtttaagttccttgtagatgctgtatattggatctttgtcgaatgcatagcttgcaaaagttttctcccattctgcaggttgtctttttgctctgttaatagtttcttttgctgcccagaagctccttagtttaattacatcccattcgtctatttttgcttttgtcacaattgcttttggtgtcattgttataaaattttcgtcccgtgcctatgtcctgaatggtattgcctaggttgtcttccagggtttttatagttttgtgctcgtgccgaattcgatatcaagcttatcgataccgtcgacctcga

SEQ ID NO: 1456 - DNA, 498 bp, Homo sapiens
aaacgatggaccctctgccctgtggcctccctcacatctattactgtactttcacactcctacagttgagcaatacttctctgaactcatgtctctatcaaaaagtgagagagtgctctgcctctggctagctttgccaacaacacgccctgccctctgcagacatgtcagcctttgcccaacacctaagggtgaaatacagcatccaacagcacagcaggcagcatgccaacagcacccgcccctgggaagccccaggtgctccccagagccacaccgggcgttgataacattctctgcatccgggaatcaggccctggcctccctctcccctcctcccctcctctctccattccccccggatcctcaggatctgttcccatggcttcaatattcccttgcatacagatcacccaaagctgtcctcgggatgccctgcccgagcccctcaaaccgtcctcgtgccgaattcgatatcaagcttatcgataccgtcga

SEQ ID NO: 1457 - DNA, 502 bp, Homo sapiens
ggcacgaggttcagggtaaatgtctagtgtcaaagttctggcaggctttactggggaaagtggtccccagttggtgtgagaaaaaaaaaaagtagaaatgctgattcccatgatctggtaggattttgattctgcttctgaatggctgaaaagctttccaaaacagcttccatggtttatgccacttttatttatgtctcttactcttttgtggcagagtggttgcagtaggaagtgaaggaaaaaatttatccttaccacaccttcctcccaaaccctgttagttcaactaggtaataagcccaccattaggatgcctcagaccataaggagctgttcatttcaggactgttcctcaggatatgggcattgatttagttaatttggcaagtcttcacaagtattatcttttaaagtaagacctacacaaaaagaagcagtctcattagaagaactctgagctcgtgccgaattcgatatcaagcttatcgataccgtcgac

SEQ ID NO: 1458 - DNA, 1099 bp, Homo sapiens
gtggcactccagctggtcctgcataggaccgagcctgkgsctgtggctyctcaggcagagtggcaggtgtttgcagtaagcagtgtcagctattactactttatatttgactgatactataacaccagtatgatcttcctaaatcatataacaaaatctaagttaaaataacaaaaatgaaatacaatgactattcatgggtatttggtattgtgctaagtcctagacagttatttggataattgcaacaatatttacaccgtgacatggtttggctgtgccccacccaaatctcatctggaattgtagctcccataattcccacacgtcatgggatggacctggtgagaggtaattgaatcacaggggtgggttttycctgtgttgctatcatgctagtgattaagtctcatgagatctgatggttttataaacggcagttcccctgcacacactctcttgcctgccaccatgtaagacatgcctttgcccctcctttgtcttctgccatgattgtgaggcctccacagccatgctgaactgtgagtccattaaacctctttcctttataaattacccactcttggatatgtctttattagcagcatgagaatggactaatatacactggaaactgagacttcatttggtcatttttgacaccatgccaccagaataaaacaggtacaggataatggatcctaccattgattggaaatgatcatctgcaggaagagcaccaatggaatacaaagggtggaacccaaatgcctctatttcagcatgtccagtgtcaaatgttcaaagaattgtatagcactttatataaataagactccaataattaaacttttctatatttctctgtcacttaagggatcttggaagctgagtttcctttggcgccaaagagaacatggactggacagaagaatttggaagtcataagtacaaactataactttaggatttgttacagaaataagtattgtatcttctactatattttcatttttatggttttataaataattctaaaatgcagctaatttctcgtgccgaattcgatatcaagcttatcgataccgtcgacctcgag

SEQ ID NO: 1459 - DNA, 1757 bp, Homo sapiens
  misc_feature (10)..(10): n equals a,t,g, or c
  misc_feature (1293)..(1293): n equals a,t,g, or c
ccccagtccnttaaccatcccacacttaacctagggcgtttgctttgtctttgaacgtcctcacagttttagatatgttaagctgtaaaaagttttaaccttttctaaactacttttgcttttmcctttcgttttcctccttttggtttttgtattatcagtacagtcaatatctgattgcagttacagatcccaaatctgatgatttggaactagtatcaggtctaaactttgaattcccagttgtttcagagattttcacattttccaattcaggatgcgatctcttcctttttacttccttctctgctgtttcctgtgaatcatgaatcacttttgtcttactaaaaggagcctttccataggtcctgagtcttctgccattccacctgcgcagccataattcagttccacttcaaaattattctctgcagtagctttttgtgccaaggttgactctgaagaaaatgtcctatcagtctcactccctggaatatgactttttgawtcttctcctgaagatgtaacagaggaactttttcttttagaaggtgcatctattttgtgaatattggtatgcctgtgcttgtgttctgaattcmacatatcttcaragtctgagtctccatttagagcctgactaagcacttttgtactaccttcggagtcaggatcaggtggcttgccttcacaggcatactgttcacttggtacttcacaatgtacacttccttcacaatcactcaatttcttcttagctgtagtacaagcaagatggagaggttttttccttccatttttgcttctagtgtgcacattttctaaactgacatcttctacatcactcatgagcttgatcttattggcagccgtagctgcacatcttcgagtaatcctcaggagacctgttctggcttttgatgatttcttaaccacctgtaaactactgtctgagtcactggaacagacccttttcctggaaatttttctgcttagtccattgtcttgtgatgcagaatctaaaagttaaagagcagatttctattaatcttttgtaagtctaaaggaattatatgttcaatattaaaaacaagttcagaattcgtattaatttgaagggggtattgcagtgaatggaatggtacacacctattagtatagtcatatgttgctcaacagcaaggatacgttctgagaaatgcatcgttaggctatttcgtcttaagcaaacatcacagagtgtgcttacacaaaccttacagtacaccctactacacatctaggttatatggnatagcctattactyctaggctacaaacctgtatgacatgctactgktctgaatcctgcaggcagttgtcacacaatggkaagtctgtgtctgtgtatccaaacagaaaaggtaatgcactgcactaggacttgaggacagctatgattacttcactaagcaatggaaatttttaaccttcattataatcttatgagaccaccactgttatgcagcacatgactgtactttaaagcagtaactttttcatcctcagcaccattcacaaattcaacacattctcaataacatcccatgatcttgacactataatattaacatgaatacaactaaactgtttaccatagcactagcatatgcaaagtaatcacttaacactcagcctctctgaaactccccgtaactccccaagctccaactcgtgccgaattcgatatcaagcttatcgataccgtcgacctcgag

SEQ ID NO: 1460 - DNA, 1326 bp, Homo sapiens
ggcacgaggccgcctcaggtctggggtaaaatctcacggagggtggcaatgaggaaagcctgagttattttccttcacagaataatttgtctcccatgagggtttttttattaagggtctgggtcacctctctcctgtggccgggggcgctgctgtcagctgttgctaattaacccatatttgggcagccagaccccgcaaagcccatgtactttcctgaaccttcagagtaaatgccatgcatcagcaccaaacacaaagcctgcgcctggctctgacatttggagagcttaccctgcatgtactttaccttaaagctattgacagtaggagattaaagtcctcgtgatgcatcctcccaaggcagtggacaacagagccagcaccagacagagcatgcgaactcaggagtcacagtttagcggccaaactcagggctcaccctgggcctctggaaaacgctgggcctgatgagccatggcccacactgcagttttgacactccacggaggtgccaagatctttggagaatggtgagaggctggatgtgttaagatgcataccacaaagtgtagctccgactcaggagccccgtgccgtgtgactggatgggcgtttcaccacaagcgtattgtttctagacccctgtctcagcaggcaagctaaggggtgagtggttcactgaaagacacttgtagaaactgccactgggctggccactgggcacacaagaaactcagctggcaagtccaggggctggtgtgaccatctcagatctgtcactaacccccagtgatgtgaggtgtcattcagctctcagggagtcattgtggctgctcaggccacttcgttcttcaagtccctgcctgattcaggctaaatgaaggccgtatgggtcaggctcactctgcctccctccactcagtgtatatgtaacctcagtacattcttgctcttaagatgccaccacggccacccaaccaccgagaacgtgactttcgctttgaccttggaggtgaatgtctgtggtcattttttggctgcccagcccctgagcctctccctgtgtgtaagtcttggagagaggcccacccccccggccatcacagaagctgagaaggcctcagggctcttcctggggctggaggctgggaggcaggcctgtgaacctgggctcgacagacggaagccctccttaggatctgcctctggagctggtagggcagaggaggagggactggctccgaatttattctggtgtcagtagcagaatctggcatccagtgttggcctcgtgccgaattcgatatcaagcttatcgatacc

SEQ ID NO: 1461 - DNA, 1237 bp, Homo sapiens
aggcaaaagatgttgtccaaagtccaggaatatgtaagttgaaagctatgtgtgcagcagaaccttatttctgagttacacagtttagtgaccttctaatggaaaaaaacttcacggagtgtgttttccactgccttctgctcaccacactgaggattacaagaggaaaacagctacaccagagtcaaaagtgatcagacctctgatttcccaactctggcagagaagctgcaacgcgccgcgcatacacacacacacacatacacacacacttacacactttccagccagctcagccgacttcctctgagagatgacaccactttgcagcctccctgtgggacagagtggaacttgtaactcactttcttgtgcctcccaggactttggctgcctagaaggaagagaagggagtgctaaggcttctctgagaaactcagagcttcctctgcagccctgctcctggccagcatgagaggagggagcttgaaccaagagtcctctcctggaggggaaacctatctaagaaatattttctatcaatcagtaaggctctcaaaagccattactgccaacatcatttcttatttgccatctcttctcccccctttaaaaatgtccttactttttccctttttttcccgtcttttctttcttgtccattccctttcttttttctgacggttttgtaaaggggaggtaccctgcacacactctcttttttgtttttgtttttttaattttactttaagttctgggatacatgtgcagaacgtgcaggtttgttacataggtatacgtgtgcgatggtggtttgctgcgtccattctttttttttttattttttaaaatcctcttccttcatttctccccttctgcctccttctatccccctgtcctcaatctttctgtttttcttgctttctcctcatttttctctctttcttgtctccccttcatagctaaagttaccgtccttggcacaggactcgggttctgaggagtgacacagcaggagttcatcctggggaccctctcgcaggcagcgctgcacatagggaacctgtcccggctgtgggaggccaggcagcctccccctccaaggcagagccagacgaggctgtccatcctccttgcatttctctgtcaccttgttcagacggcctttgacttggggggagccacgctgatttacactcgtgccgaattcgatatcaagcttatcgataccgtcgac

SEQ ID NO: 1462 - DNA, 1127 bp, Homo sapiens
  misc_feature (336)..(336): n equals a,t,g, or c
tgccgcaaactggcatgggccaaagctgctgttagtctccttttgcccatctgtctcagttgctattcaaggaagggcatactaaatctaatggttggaaaaaaggagcagaggggccattcaatgccaagcatagacagtttatgtttcactaattacactcaaagaacctgggccttatcagctaaaaggtgatttctctttttcactggtattaacattgttacttattgcttatggtaaattttttttgttttgttttgttgagacgagtctcgagtctcmaaaaaaaaaaaaaaaaaagtgaaaggcatgaacgctgtaaagaagcccagnaatggctgtaactgaatgcttcacaagtctacgatttcaaaaccatacactatcctataacaatcccyctacttataaccyctgaaagtttaaagaaagaaacttacttaatgacatcaaagagatgaatttccgwtytacagatgcagtaaaactctttataacagagttttcgtcttgtccaagtaagagtgtatatttggttaagatacgtgagttaaacatttgcacgtaagcaaagtaatttccatgtttttcagtaataaaaattaaaacaggatgtctgaatactacgaaaaactttgtccatttaatcacttcttcatcagagataacagtttcaattttctgctgggggtctgcaagcaaggcctctaaaccacgaacagcaccttccttgaagagcaccaagggttctgtcccttgcactgaaagtatcctatatacttctgctgacaatgtagctttaaatactttatccaggtttacatcttcattattccatattcttaaaaccttattatcgtgtacaacaacatactctccagtttgaaagttgcacacagctggacatgttataatttgaccttgtttcactgaccagctccccaagggtttctgatcagaaaccttatagaggatgactgtcctgccgctgtctgtcactagaaactggtctgttttgtcgctctgctccacgcctaggagtccttcaggcccggcgctcaggactaccgaagacaacgtgaattcttcctccagcgctgccattttgcggacgcgtgggtcga

SEQ ID NO: 1463 - DNA, 1391 bp, Homo sapiens
gaattcggcacgagattacatgataaatgcaatagaatgctaatccttgttctagaaaatttcaagatgttcacttaaaaaacctttcgagtcatttttaaaattgtagtcctgaccttcagtacgtgttaaacaggttttttcaaaatttaatgaggatgagttttcatatgatagtcattttacttcagagtattacaaaggattcaacaattttagtataaaatagcagaacttgttacatatgtatggtctattactagctcagtctaaattttgcacatctatggrgtctaaaattcaattgggattacatccaactttttgtttaagtagcaaagtaaaaaaattaaaatgcctagtcttaaatgaaccatagtttgagactccattctcttctcagccactttctggcttcacaagagcaactgtagcttttggatattaggtgagatttggacatttccataaagcaaagcatgaatagaatgctggctgcctttcacctcatctcatccattaactgtgaaaggtgagagccagccttatttttctaaatatcatgatttcaatatgtagcaaatgatacaactgaaaaataatttttggtatctacattatgcttagagttaacatctaaactaaccaccatttcccactcaaatatttatttaagtccctggaaaactttaatcattattgttgacttgtttttactcatttwcagatgtttcttttcatttgttatttactcattagaatattcacttagtgtaaggararatkgctgttcttggagatacraagacttcaaggagtttacagawttgsttgggaaaattagagtwtcwtaawtgaagcaaactgctagatgaatgtgctggtttacatatagaatttgtttctttctagaccagtggttctcaaatgtgattcctgaaccactggcattagcacacctgggaactttttaaaaattcaaatttggcctggtgcatgtggctcacacttgtaatcttagcaccttgggaggcctaggagagaggacagcttgagcccaggagttcaagaccagcctggacaacaaagtggaacctcatctctacagaaaataaaaaaaaaaaaattgccatgtgttgtggtgcatgcctgtagtcctagctactcaggaggctgagatgggggaacacttgaatctaggaggttggggcagcagcaagctatatgatctgattgtgccacagcactccagcctatgtgacagagtaagagcctgtctcaaaaaaaatatgcaaatttgaggttttatcctagacttactgaatcagagactctgggagtggagctcgtgccgaattcgatatcaagcttatcgataccgwcracctcga

SEQ ID NO: 1464 - DNA, 1856 bp, Homo sapiens
  misc_feature (1176)..(1176): n equals a,t,g, or c
  misc_feature (1181)..(1181): n equals a,t,g, or c
ggcacgaggtttctttggccaagtgggagaagagaactgtgacgaggcattggggaaggccaggggctgtcaccccgtcacagctgtgtgcatgggcaacgcatcttaggagagtcaatggagagtgagcatccacagttgactcccttaaaaccagctcaggccacacccaccccaagaagtctctgaggacatcttgagggatgcaggcccaatttaaaactcctgcctacagcaaggtgtctgtcttaatactaacacactgcattctatgggtctggtaaacatctgccatctccaccccatgggagcttcttaagggaaagcattgagcttccttctttcattcactccctcagtcgatcagctggtcagtcggtcagtcaccaataactttgttttttttaacaaatatgcctgagtacccactgtgtactggggcagatacagctgaacaatcctctaggaactcacaggtttataagagaaacaggaaaaagtggaggaagtggaaggaagccaaagcatccatcctttcactttcactgaccactgagtgggtctcgctgggtctcagtgaaaagaaagccgtttctactgctttaaccctttccaatgcatgtcccttcagacagagtaacccctgtgagctggtaatcaaacagaatwttattcaagtgaawcaaacaatggagaaatatggagtaccccaaatttcctccctttaatttgcacattttgaagtgccgatattagtaagtagtttatttacatgaacatacaggaaatttaacctttaagagtttgtaaaatacggcttagtttaaatgcatttatttgtctaaaattcctggtagttaattgtacttttttttttggcaagttttcacttgaaatctcaaagtactttaaagtaagatggcattaaaaacagcaacaggaataagccgacgtgtcttaagggctcaccatgtttagacactaagtgccgttaacatgtatcactatttactccttgaactcgtcctatttgttattatatacacaccatatactgtattattattattgtctcagcttcaccgataaggaaccctagcttggtgagttcagaattgctggcaggttagggaggaatggacagtggaacccagccctggctgtgcccagaccccntttcntctgcaatactgtctgcytctgaggcgcatggagtccttctccagctcttcaaagcgttgcaggtccatgttgtcccaacagaatttaaaagtgcaggccagcatcacctgcaaagtcccaggttggaagagaacytcgtctatacttctacgggcagataaggtcagaagtacattttccagtcgccacgtaagctgcagctctctctagataaacccgtgtctggaatagaagaaaatgctccccacgtgctggtcttctctgtgaccttttaattctggggcccggggctcccttgttggtcagctcttccctccacaccatccatgtgctgaggcctcaagccaccactgctccagcctggacstcacccstaaacccagtcttgtgagtgcattttctacactcccactaggtgtttaaagacttctcaaccttagtgtgtcccatagagggttcctgagckccccccagagctctgcstctcccatctttcccaccttagtgaagtcactccagatcacttcctgtcacctggaaaatgtggagggtcctcctggagtcctctgtttctctcgcaactcacactctgcacacaagtccatggaatggattcaggatccagcctcgtgccgaattcgatatcaagcttatcgtataccgtcggacctcga

SEQ ID NO: 1465 - DNA, 1558 bp, Homo sapiens
actttaaagatttaaagatactgaagaggttaaaaaaaaaaaaggccctcactgagcctatgtaaagtgatgaattgctccacaaagtgatgaattgctccgcaagcaacatgcagaaatattgcactttagtgttgtaactcacttacattcctagatgatgttcatgtaataatagttcatacatgttgaatgtcaaacacatgccaaatatctcacttgtattatttgtaacttttttcccacaatattttagggttatatagatggctttgagactcagagaggccaagaaaatattttgtgggtgaataactagtaaattggaaagctggagttcagacttttgtttacatgacttcaaaacccatctcttagtctgtacctcattggctctcagggatctttcttagacacctcattgtctatgctctgtgatagtttgaccagttgtgtttgataaaagagatagagatgtacaaatccaaatctgcaaatccttgaccatgtaccatcattcatgtaggttctattctgattcaggacctgcttggagccttctctccaactcatatggcattctcccatcctgacaatcttccctgagtcttctgcaagttgtagaattgctcctccccctctgctataaggcctgcatataaaattggctgaggaatgtgcttggctcttttcctaaagattataaaatgatcatgaccctgtgaggccttaatgccctacagagagaagccctaaaaatctaaactcaaggaaaactgtgtttttcatagtccagactcatttgtattaaatagatcacaaccagataatccctgagaaatttattatatcaaagtttctcctttttgagttgatctaaaggctaggaagagccttgcacatacctttgargatagattatgtgtatgtgtatggctaggaatttacgtgtattaattccttaaccatgtatgactgagctcccatgtgacaccaaactttctttttctgagccatttgttgtgagttctttgtgcttttttaaccttgtctcctatgttttcctacaaaccacgtctccactagccatactgaactcaatatttcttctttacatcattttaggcaagctgtacattactggaaagagatgatgggtaaatatactaggtgaaggcctaacatgtgatttagctggctatgggtttaaaagctcatcagaagtgaggttgctgcacacaaaaaaaggagaagcagcagtgaatattagcaaaatattctctaaaagctcttcttttctaatatgggtcctggggaccctgtccactcaaaggagggtcttcaaatttgggaaatatatgaattttagcagcatcacagattttattttactgttgttttgtttttagtaagtgaaatctgagtccacatgcccgaagaacttatatcatctatgtgaaatcatatcttggagaaaatgaataggattggggacagtggcagcaaatcttctcgtgccgaattcgatatcaagcttatcgataccgtcgacctcgta

SEQ ID NO: 1466 - DNA, 1858 bp, Homo sapiens
  misc_feature (490)..(490): n equals a,t,g, or c
agccttactgatgcattctcgaaaacctgttagggtcctaagcattctccagttagtattgggactttacccctcctgtaaagatgttatgccccaaaaatgaagtggagggccatatcctgagggaggggagggatctycagagttggaagagtgatgcctttttgtccgcacttatatgaatacaagaatgtcatttctgaagctccccgtatcctagcttctggaatagcttttgttaggcctgctagtctgaggagggatccyaaaattccggataagacagtcccccaccctgatggggstttgggcaaaaattatgtctttctaattggtgagcccgggtgcctaaagaaggttaacagagtcctggagtttatactagaaatgattcttacaggagaaactagaaaagcaccagagacagggagtggtttccagaagcgggactagcctcagagaagagaggcaagagaaagttttkctgacnmgcattaggayccaggaggcaaggstcaggataggtaggatagatgggcgagtctcgcttgggcaacatgacttcgagagttctgctcatggccacagggtcaaccaacttgttgtcaggaccccggagctgaatggctttcctctctgtcgaccctcggctcagcccggaagtacaggaaaagcggaaagctggttccaggcaaaccaacactcccaactccgaagagtcaggggttgttagagagccctatcccggaaagcctgacacccgtgtctttagtccagcggctgtgctagtcagttttaactggccgctagtcacttttaactggccgacaggtgcctggtatttagccaccgaattctaagggaaaacaggacagaatagcaagtgaaaggggtcagatggtactcactgcttggcaatagcgtcagccccaagtgaggatggggaaggggttttacagtcctctataagcaggaattgtcccagtctgatgtggctgctgcgtagtgcccgctggcctycctcttgatcttcarggggtgtcttctgcccagctctcttcttgcttctgctaacttgctgatgcatgctgctggcgcaactgtccttgcgcatttggactgggcttgaagagggaggaagtattcattcccttaagctttcaggcttgggggagaatctttcacaacccaatgatactcttttaaagttactttaaaatgtgcaataaagttttgttgactgtagtcatgctgttgtgctatcaaatactagatcttatgcattctatttaactatatttttgtatacattaactgtctctcccctcactcccttctcagcctctggtaaccattatctagtctctctctccgtgagttcaattgttttaatttttagcttccacaaataagtgacaacaggcaaagtttgtcattctgtgtacctggcttattttacttaacataatgacctccagttctatccctgttgttgcaaatgatgggatctcattctttttttatggctgaatagtactccattgtgtatatgtaccatgttttctttatccattcatttgttgatggacatttaggttgcttccatatcttggctattgtgaacagtgctgcaggaaacatgagactgcagacctctttggtatactgatttcctttcttttgggtatatactatgagtgggattgctgagtcacgtggtagctctatttttagtttttggggatcctccaaactggtctccatagtgcttgtactaatttacattcccaccaatggtgtatgaggattccctcgtgccgaattcgatatcaagcttatcgataccgtcgacctcgag

SEQ ID NO: 1467 - DNA, 1760 bp, Homo sapiens
ggcacgagaaatgagcccctcgatcctaacctatcccactttatagctggggaaactgaggtccagagtcatgcagcggtttgtcggattatgcgggaacatcatcattatttggccatgtgtggccatgtcctaggcagttctcccacgctttacctccatctatcctcaccacagcctcagggggttgcaggggtatccccagtctacagatagcagcagggcacagctacttacccacagacatcaagcagacaggcggtactggacccagacctgctgactgggagctggcacacttcccctccacctcctgctcaggagggactgggctctcgcctgctctaacccctgggagctctgcgacccctcaggcctcagtgtcccaggttttgccactgcaaatcacgacatgttaacattccttctccacttccccaaagacgcctgaattcttcacctgctcacttcatctcacccagtgctcacaaccatcctgggaacctgtgatcccatcacgcccattttgcagatgaggaaactgaggtactgagagacaacatcactcatcggggtccgaaccttggagacctagctccaagataccccagaataccaaggtgcgtcttccctagggtcctctcctgcacagaatcacctggaagctctgagaatacaccaaggtctgcagcccccacccccaaccccacccccacgattcggaactaactggtctgtagggtggagcccaggccccaggattttgtgactctaaggggcagcccctggtctgcggggctcatttgcttccagaagcctcacacctccttctatgcgcgctggaggaggaagatcccaaggggaactcctgaatttaaatcagaccttcaggaaggcacaggggatgtgcgccttcctccacattgcaatcccacagcccagggccaccagtccccaggaagcggggcaaaggcgatgcaggtgtgaggctgacgcgcgtcctccagagggggccaatggcagtggtgcctcccgcaccctgtgctccggggaagccccaagctgagtcagaacccgaagctcccttgcatggaaggtgactttggaacttcgtgaactcaacatgacagctccagaagctggaggcagcggcggggggcagacagaggcagagggctcagtctccagatttagtaccgtgacaagcctgggccagcagagaccacatgttccaggcagggtccatgcgaggagatacacgtgccatgcactctgccttgccttggggacacaccgcccgcaggagacggctcagcacctgcatcagcgagtagacactgagtgtcacttgagtgccaagggtgggagcgggggtcgcagcctgagcgccctgctgtgtggccctgggccctccagtctacctctctgagctgctatctgcttcccccagtgcaaaaggggagaaaagtgtctgctttgccagggggctgagaggaggcatctgagcccctgccccagtgtgtgggaaatcaagtctccccccaggacttcacagaggagatgggggacaggggcaagggggctccctgggacattggcctgtctccttttccatctgcccatgcctctctgcaccctcttcccacccacccagctggaggggagcccccgtctcttggtccttgctctgcttttcacgtttgctctctctctctggacctcgtgccgaattcgatatcaagcttatcgataccgtcgac

SEQ ID NO: 1468 - DNA, 588 bp, Homo sapiens
tgcaggaattcggcacgaggagaaactagaaaaagtcattctatgggcagcaggcatccttataagacagaaattaaaggcagggtgggagatggggacagtggagcaggaaggaaagcaggaacactgaccaagttcactggaccttacagagttaagtgttaccagttaccatgcacccaggtacattctctcccaccatgcaccacagttagataccaccagcaagcaccagaagccatggccagggcattctctgctaaaacataccattaaccaaaagaagaacacaatgcagctacattcatttcatttgtattctttgttattggtttaattaatagttttgtaaggtgggtaaaaagtaaaaaacacaccaaccttctcgcagctctgagggatgtagggggtttgatgcagaacacaatgaaatgaggaaaggagaaaaacaagggaaacacagagagagtaaaaaggccatatcaaggctttcaactgctacttgaacatctttattcgctctagttcatccttcctatctcagctggaaaagttagctattgtttctaataccatgttctcgtgccg

SEQ ID NO: 1469 - DNA, 1453 bp, Homo sapiens
gaattcggcacgagctgggctcaagcaatccccctgcctcagcctcctgagtagctgggactgtaagtgggcaccactacactcagctaatttttttaaatttatttttcgtagagggtgtcttgctttgttgtccaggcttgtctcaaactcctggcctcaagtgatcttcctgcctcagtgttccaaagtgctgggatttacaggcatgagccactacaccatgccaaagtcacacctcccctgtcccctgggatatggcccaggaaagcctgtcccctctggggcttctaattcttgtctgtgcagaacctagcgtgtgtgcagagggataagaattgaatgaggtgatgtctgtgaagtgcccagcatagtaactagcatacaacagactgttagtagttggtaccttatttgagcgttccagaatcactacattgttccctgccattatttawaatamaaaattcaccttttaaattgtgggagctctgctttagttacatatgaagctggcttttcagcagttgccattctgtaccgacatttgctttatatatatatattgtttgtttgtttgttttttgagacagagtctctctctgtcgcccaggctggagtgcagtggcgcgatctcagctcactgcaacctccacctccctggttcaagcaattctcttgcctcagcctcccgagtagctgggattacaggtgcgtgccactatgcccagctaatttttgtattttttagtagagatggggttttgccatgttggtcaggctggtcttgaactcctgatctcaggtgatctgcccacctcggcctcctagagccacatttgctttaaagaccccccgctttgcacaactataaatgagtgagtgtcacctctttttggactagtctccccaggaattcccagctgacttttttcatttgttttgtttwgtttagttttgaaacagagtctctgttgcccaggctggagtgcagtggtgcgatcataggtcactgcagcctcgacctcctgggcttaagtgatcctcccaccttggcctcccgattagctgggactacaggtgtgtgccmccacacctggcctttttttttttttaagagatgtagggctgggtgcagtggctcactcctgtaatcctagcactttgggaggctgaggcaggcggatcatgaggtcaggagtttgagactagcatggccaatgtggtgaaatcccatctgtactaaaaatttgaaaattaggcacagtggcttacgcttgtaatcccaacactttgggaggcagaggtgggtggatcatgaggtcaggagtgtgagaccagcctgaccaacatggtgaaaccccgtctctactaaaaatacaaaaattagctgggcgtggtggtgggctcgtgccgaattcgatatcaagcttatcgataccgtcgacctcga

SEQ ID NO: 1470 - DNA, 775 bp, Homo sapiens
gttggcttgtatttgggggagaccgattgtgtcagatatgtatgtggaacgtagctgtccttgccgagtctgacctgtatgaaatgcatatccatggctatattattttggatttatggaggaagcagagcatttctgacacttaaggttgtatgcgtgagggagaaggctttcacagcttaacttgtaccagagcagctgcatgggtgctgacagcttaacttgaaatctgtgggaggaaggatcctttttcactcattcaacaaatataaccattcaatgaatggtccatgccttgaggtgaggatcatcaaggtgtctctgtaaatagcctggatgcaatctgaggggagttgttttgacggtggtaggtattaagttgagggaggcagtgtggaattaaaaccagagaactgtttttgggtactggtaattgttaatatatgtgcctgtggatgttggaacttcttggctgggctgaaggaatcctttgaaagactgatttcggcagggcgcggtggctcacacctgtaatcccagcactttgggaggccgaggtgggcggatcacgaggtcaggagatcgaatcacgaggtcaggagatcgagactatcctggctaacaggatgaaaccccgtctctactaaaaatacaaaaaattagccgggcgtggtggcgggcgcctgtagtcccagctactcggggaggctgaggcaggagaatggcgtctcgtgccgaattcgatatcaagcttatcgataccgtcgacctcgag

SEQ ID NO: 1471 - DNA, 824 bp, Homo sapiens
ggcacgaggttctatcctctctgcaatcttgtggctctcccaagatgcaggtgaggtggccaccacagcatagaacttcattaggcagcgagacgtccatgtctgtggcagaaacagccctgtgggagctgtatctatgctcccgcccacttctgagcctgcctgagagaacagtgcccaccagagctctcttctccaccagtgtgttgctgacaaaatgggtgaaggcagaattcaaccctggcctcaggcaaggcacttcctctacctctgtttgtaaaatgggagtagacatctgtttctctcagctctgtggcagacactgagctatcgaggctttctgtgtatgttttttttgcaaactctgcaaaggtgtgattatacaattgtttataaacaataaaaccaaagcatagaaatttaaaaatttattaaaaatcatgcatctactcaatgacagggctcccatttatacccaagcagtctaactttttttttccgagacggagtctcatcttgcctcccaggctggagtgcaatggcacaatctcaactctctgcaacctctgcctcctgagttcaagcgattctcctgcctcagcctcccaagtagctaggactacaggcgcacgccaccacgcctggccaattttttacatctttagtaaagacggggtttcaccatgttggtgagtctggtctcgagctcctgacctcgtaatctgcccaccttggcctcccaaagtgggactacaggtgtgagccaccgcacctggcctcgtgccgaattcgatatcaagcttatcgataccgtcgacctcgag

SEQ ID NO: 1472 - DNA, 1298 bp, Homo sapiens
  misc_feature (1265)..(1265): n equals a,t,g, or c
  misc_feature (1292)..(1292): n equals a,t,g, or c
ttttttttttttttttgagcagagaagtgtgaacatgacttgtaagttttaatgtactagacaagcaaggcggtagcactagttctctcttctgatcatgcggtaccttgctctctgcccccatggatcacttactgcattctgtactctagcactgtgtatgcatcactcttccttatgccccgtccaccccaccacctggtctccagactcagcagaacagaggtgactgattccttggaggtagcacagaagggcccaaagtcctagatcctcagggaaagaccaactccaagtccagggaaaagctctatgcaaagggctgcccgtcatctctgccaaacttaagtggcgtggcttttcttctgaccttaaagatgttgttctgggtaggggtgtcaatgcccaaatggagcatggcctctctggtcacctcaaaacaatcctcttctaagctcctctctgggttgggcagccaggagaaggcagctccctcaggaaggtgccactggagcctctcgtcctcactggctcctttgcaaatctgatagaagatgtggaagttcctctcactggaascctggcaggccactcgagttttctctaggaggtaggtctggactgcggctccagtcatttgctgagccctgttcagctggagctggatgaacttcccaaagcgactgctgttgttattcctcagtgtacacgcattcccaaaagcttccatgacagggttggagttcaggatcctctgttctatcctctctgcaatcttgtggctctcccaagatgcaggtgaggtggccaccacagcatagaacttcattaggcagcgagacgtccatgtctgtggcagaaacagccctgtgggagctgtatctatgctcccgcccacttctgagcctgcctgagagaacagtgcccaccagagctctcttctccaccagtgtgttgctgacaaaatgggtgaaggcagaattcaaccctggcctcaggcaaggcacttcctctacctctgtttgtaaaatgggagtagacatctgtttctctcagctctgtggcagacactgagctatcgaggctttctgtgtatgttttttttgcaaactctgcaaaggtgtgattatacaattgtttataaacaataaaaccaaagcatagaaatttaaaaattattaaaaatcatgcatctactcaatgacagggtcccatttataccccagcagtctaacttttttttccgagaggagctcatcttgctnccagctggagtgcatggcacatctcantctctg

SEQ ID NO: 1473 - DNA, 1808 bp, Homo sapiens
ggcacgagggcccaactggggtatctgcccagcccttccctccagtgttcctccctagcattcaagtgctacccagcagaaatataatgccagttctgcatctaattttaaatttcctaatagccatgctaaaaaagtaaaaagaaacagttgaaattaattttaataatgtatctcgcccaatatatccaaactgttatttcaacatgcaatttttgaaaaatgtgagatgttttacattctctttttcacacttagtcttcaatatctggtgtgtattttacacttctagcacctctcaattcacaccagccacatttaaaatgctcagtagccgcatgcagcttgtgcagccttacttaggtccagtgtcagcctggggccgtgctggggagctgagctgtgtccatgggggccctggtgagcctccagtgctgtgctgagggtaagggcacccagcgcaagccccagcgcagctgcctgtccagccctgcctcagctccttgcacagaatgagcttgaagtgctcccctctgctcggttctagttctgcctctgacagttttgctctttggttcacaaggcttcctaaactcaggattgctttgtgggtctgttctttgggatgagaggccagggcaggtgcaagctatgccttcactcctttgtccctgccttcctccttcctgtaccccagctacagccccgttgggaagaatgtgtcgttagtcacaaagcattgcagatgtgtctaagaaatgccacgctggggccgggcgtggtgctcacacctgtaatcccagcacttcgagaggctgaggcaggcggattgcctgagctcaggatttcaagaccaccctgggtaacatggtgaaaccctgtctctactaaaaatacaaaaaaattagctgggtgtggtggtacacgcctatagtcccagctacatgggaggctgagcaggagaatcgcttgaaccgggaggtggaggttgcagtaagccgagattgcaccactgcactccagcctgggcgacaagagcgaaactccatctcaaaaaaaaaaaaaaaaacaaaaaaaaactattctgtataggtaatgaacgattttcaaaaatcttagatgaatcaatgagataacagccaaacactcactcaactggcatctactcaaaaagctattggtttctcatgattagctttgccaaaccatctccctagattatttttctttttaaatttcactttgcatttggttaatcattccctgggaaagcacacggggcaggtgggcctccttgtcttcactttgccattccctatctgatgaattctgaacctcagtttttcatccaagaactggagttaaaacacctgcactattatacagggcgtgaggctgttgtcatgataatcaatgagctgatgtgtggttgaagctcttatctgactccatagatagttttaaactacctaagtataaattcagcagctttgcttaagatttaaagcaggtattataaatatgcattcctttgccaatcttttaatagaaggacaggcctattcttttgaagatggatctgctgatgagagctcccctttgtctactttacatcaaccacacccttatttcattgttttgtgattccagtgttggtttctttaaagtaaaggaagaatttagatatttgccgagccattctgaatatagaaacttcctagatcgcatatcccttgatcttttatcgttaattagatgagagtaaatctcgtgccgaattcgatatcaagcttatcgataccgtcgac

SEQ ID NO: 1474 - DNA, 1349 bp, Homo sapiens
ggcacgaggttacgatgaggcttgcaaataatatcttataacctgttgttttaaactgatgacaacttaacagtgattgcataaacaaactaacaagtaaagagaaaactgataaaaactctacactttaacatcatgcccctacttttaactttttgttgtttctacttatatcttatttgtactatgtcttgaaaagttgtaattattatttttgatcagttcatcttttagtcttcccactcaagatatgagtagcttacacaccacaattacagtgttttgatattctgtctttttgtgtacttactattactagtgagttttgtgccttcggataatttcttattttttattaaggtgcttttctttcagattaaagaactccctttagctttctcataggataggtctggtgttgatgaaatctctcagcttttgtttgtctgggaaagtcttgaattctccttcatgtttgaataatattttcaccagacatactattctgcaataaaagttctttttcctttggcactttcaatatattatgtcactctttcctggcctgcaaggcttccactgagaagtctgctgctaggcatattgaagctccactatatgttatttgtttcttttctcttcctacttttagaatcctttctttattattgacctttgggagtttgattattgaatgtcttgagttaatgttatttgggtcaaatctgctcagtaaccttcttgcacttgaatattgatatctttctcttggtttgggaagttttctgttattatccctttgaataaactttctaccctcatctctcgattttctcttgaaggcccaaaactcttagatttgcccttttgaagttattttcttgatatcgtaggcatactttcattctcttctattcttcttccttttgtctcctataactgtgtattttcaaatagcctgtcttcaaactcactaattctttcttctgcttgattaattccactattaacagattctgatgtgttcttcagtatttcacttgcagtttttaactccagaatttctactggattcttttaaattatttcaatctctttgttaaatttatctgataggattctgaattcctctctgtgttctcttgaatttctttgagtttcctcaaaacagccattttgaattatctgtctgaaaggtcacacatctgtgtctctctgggattagtcaccggtgacttatttagttcatttggtgaggtcatatttcctgaatggtcttgatgcttgtggatgttcattggagtctggctcgtgccgaattcgatatcaagcttatcgataccgtcgac

SEQ ID NO: 1475 - DNA, 1953 bp, Homo sapiens
ggcacgaggcaaatctgagttttaatgaacactgccattgattctgatcatgctgaagtttagaaaccactggtttgatgcttatttgcactattatactgtggtttacatatgggcttgacaggtccatttactttcatttacttgctatttgagattttgtctggccagacaactgagcctcagataaattattttcttactaaattctggtaaataccaataaaaccttgaatacaaccaacataggacagtcagttctgctataatgatttttaaaatgggaatttgtttcaatgcaattaatatattgggaaacaaatttagcatarggcaaatttkgcawttatttgtgcacyacttcatmtgctagaccaactaggtgaatgtaggaaccatacacagctgagctgagtctcataggaacacataaaacacacacacacctctcaaggacaatcagtggcccagacccatgcacatctactattacccttyttgtcmtttcccccttyactgttattaatacaagctgcaagtcttccacaaactaacttcaggtggttttcaagataaagtgccatattgcttgcagtatttatgtattttttaatcatttaatgaatgtaaaactatgctaccatttattagctgcttctttttaaaaatgttccactgacaaatgttttgagtattatgccccgaggcctatgatttttattgtgttcttttgcattgcacagagaattttagcaatccctatgttgcactaaagcagaattgagactaatttgagcaaaacttagcaacttataactgttacaatccttatttcagggcaaacttttcattttataatcataattattttgtttcctcttgagtagcacacacacacacacacacaaatctaaggtgttcactatcacagaataatagcctttaaaatgtttaccagttttcatattgatatattttgtttgactctgtcattccgggctttaagtactaaaatatattagtctttttcagaaaacattccaagaaaaaagttgaattcctacctagtttcctctctctttgataacctattgtcatagtaatatacaaatacctgaaaattgcccagattattcttttcttcttggaacacagatttgttgataagtgccaaaggattttttacaaaaacatgagaagtttgacatcacagtaagatttaaaaggaaaggctgtttattgktattatcatcattgctactactatttccgttagtatatatttctttgtcttatttgtccttttccaaaagatttttgttcttatatttttaattagctctttaaagaaatcaagaactgcttgttgattatagacatccttattgtataaagagggagaagttctttggtaattagctgtgtataggttctgttcaaacaattggctcaagtgaggttgtacagaaagaactcttgtattttcttatttttcagtatattctccactccatcacacctctttttccaaagatgcagtgsaaagaaagtataatctctggagtaattaaagctcagtgaggaaatgatatcacctgatggccctatgaagcattcagcaataaaaggtgagttgcccaaaatgcatttaccctgaacaggaatacaatgaaactaccaagttttatctttataatgattcgtggcttattattttgttgtttgtatatgttctgtttcccacatcagtgttgtcttacattattatctgtcttaacttagactctgttttctaaattgctctgtgcaattaaatgctttgtgatcataataaaaagcatcatgataacttttagactagaggtttccatacaaagctgtatcccatggagagcagctactggctcgtgccgaattcgatatcaagcttatcgataccgtcgacctcgaggg

SEQ ID NO: 1476 - DNA, 1632 bp, Homo sapiens
gaatatatgtgatttctcctttgacctgtaggttatttagaagtgcatttttagaaggatgagattttctaaaaatgttatttgggtgcataattttattctgttgtggtcagacaatagtccctgtgaaatttcagccttttgaaattcattaggaatcattttaaggaccagtatatggtctgaattggtgaaaattccatgagaatttgaaaagaaaaaagtgaaatctgcagtttttgagtataatatctataaatgtcaccaaagtcaagttggctgataatttgttctgggtatttctatccttcttggtttttaaaatcagggttgttctagcaattgctgagagagtactattcaattttctagacatgacagaaattttcaatctctcttatttttgtcagtttttgctttctataattttcaactttaattaggcgcataacgtgtcattgtatctttcagatgggctgacctttttatcgtcatgaattttgaatttttttcctaattagcttcgggatgccagggtatatgatgggtcaagaacatgacgtttcaaatttttcagtaatcataactctaaagtaatgtgtaactctaaaataatttattttatttaatcatcttttatcttattaatcaattgatttgttcccacaattacttacgtgtactttagaccattcctggattgacagtaaaagggagcacatgacaaattcttagttttagagcatgggctgcacaatcctgagcccagcctggtggtgatgaaattaagcccagtactaagagcgtaaatgaagaagaaactcagtagtaagagagtgtggaccaactggtcagatgctctaatcagcaactctcattccactgtcaaaaccttggagattttgtatgttttttaaataggtgaagtgaatcaagtggtgcctaccaaatttattttgtcctctgcatcagtgcgtggcatacaacattaacaatgagaagcaactaactcctataagctattttgggggaatagaggatggtacaaatatcacaactttacagcaaatattacaactccttcaaaacacagtttggcagtttttaaaaaaataaaaataaaagagttgatcaagctgggtacagtggcacacacctgtaatctcagcactttgggagactgaggtgggatgatcacttgagcccaggagtttgagactagagtgagctatgattgcgtcactgcactccagcctgggtgatagagtgagacccagtctctaagaagtaaaaatgaaagaaagaaaaaaagttggacaggcacctgccacatctcatttattccactccaggtatttaaccaaaataaataaaaatgtatgtccatagaaagatttacacatgaatgcccacagcaactttattcatagtactccaaactggtgacaacccaaatttccatcaacagatagataaactaatgatggtatatccatataataaatactgtttaataataataaataatgaactattgatgtatacagcatcttggataaatctcaaaataattatgatgactgaactcgtgccgaattcgatatcaagcttatcgataccgtcgacctcgag

SEQ ID NO: 1477 - DNA, 1363 bp, Homo sapiens
ggcacgaggtctcgctctgttgccagcctggagtgcagtgatgcgatctcggcttactgcaacctctgcttcctgggttcaagtgattctcctgtttcagcctcccaagtagctgggattacaggcgcctgccaccatgcccggccaattttttttttgtatttttagtagagacggggcttcaccatgttggccaggctggtctcaaactcctgaccttgkgatctgtccmcctcwscctccgawagtgctgggactacaggcatgatccaccgtgtccagcctctataccaacaattctatattctactttgtgatactagagctgggactcgctagacttgtggctctcctgggatccctgagctccttgcaggagatttttaaggtcaaaataattttcataacggtattaagatattatttgcttttcttactcttattctcttttgaatgtacagtgaagttttcaagaggctatatgacatatgatccagtaacagaaacatagcaccagatataatttacccagctgtcttccatgaagccaggcattaaagagatttgcaattatgcaaaacaatgctacccttcttactattttttgtttgtttttgaaaatagttatttttcataataatgggttattttttgttaacaggtagtggtttgattcttgttatttttggaatgtcccatctttaatatggcaaatatcaatagatatcatccacattaacataagttccttcaggtcttcaatttttaagagttcacagagtcctgtgatcaaagagtgagaaacactgctgcagacattcttcattgccagtggattcctgttctatccattagaggccgctagagagagacgagaaggcacaggggttggggcggtggggtggggagtcgcgggagaaggggctggacccacaagagaacctgctgctcctgttgaatctctgcagcgtttcagcccggtggcggtagcatgttgtctctacctgcagactctaaagcagtgtaggctctagtctctagctcatgtccacaccaacaaaagcacaatgagctccctgctaagcaatctgggacaggccacggtgatgcaccctcctcagaggtctgagttcctgggctatagactagtcttgaattccccagttaccagaggcagccaggaagtatcacttccacaaaagtccaagggctaggtttgctaggcaacccctcacctcagaatttcatcctagctccaaggaatcctttcctcagggcttctaggtggtgattactgccatctaagggcagcacatgtttcctcgtgccgaattcgatatcaagcttatcgataccgtcgacc

SEQ ID NO: 1478 - DNA, 1302 bp, Homo sapiens
aggattcggcacgagccacaagtggcccctcctcctcccacatggctcctcgtcctcatcttcttacagtcctcttgctcctcccactgggactgaacccaaaggcatctcttcaatggggtggtccctgcctagggaaagccggtgcctccagccctttagtgccccttctgttatggcgtgtctcctgtgaagtctctgtcatccccaaggtcaagtttgctgggctcaatgattctgtgtgccctgcatcactttgctagcaggacagggattggcctccagtcttcagtccctcatccccaaagcccagactagaacttcacagatggacctggggcccctcccggagccgggctttctggagtgttctcatttgctaacatctgcctccctcggcaacctttcctctgtaatggaacaggtccagaagagccatgtgggctgacacagtaaggcctccaggcatctgtgccgtgacgtgagcaaagtgtgagctgcatggtgggatatgccatgccttgcctaggggcccgggcactgccatcacagggaggcttggccaccaaccgacatggctgccccaggtgggaagggtcggatggaggactctgccacccactcttgggaaacacccccaaaatgaacgaaggaatgacctctgtcctgttttagcatcccgggagacacactgtggcctaggatcctgcccggctgcagggctctggatggggcgtgacatcctgcccccgagggtgtggcggggagtcgatgtcacacagctgagccacagggcccagggatgtggtgaaagctttccccaggtcccaagtgcccacagcccctgccccatccaagacccagaaatgcagctcactctaacccttcagtgcgggcccgctctcaagcctgtccgtcacctcccagaactcccacgttcccaaaaccctgtgttcccagtctctttggtctccagaactgtcattaaagaaagaaggggctaggcacagtggctcgtgcctgtcatcccagcactttgggaggccgaggcaggtggatcacctgaggtcagtttgagaccagcctgggcaacatggtgaaaccccatctctactaaaaatacaaaaattagctgggtgtggtggcgggtgcctgtaatcccagctactcaggaggctgaggcaggagaattgcttgaacccgggaggcagaggttgcagtgagccaagatcaagtccattgcactctagtcccggctcgtgccgaattcgatatcaagcttatcgataccgtcgacctcga

SEQ ID NO: 1479 - DNA, 1230 bp, Homo sapiens
ggcacgaggtcgattctgagacccgataccctgcgaggggagtgcaggataagcaggagaaattaattagcgctgccttaagcagttttaccgacgcaggcgggactgtggtggagcactggagatgctgcgagccctgagctgccttcacagccttgttgggtgtgctgctggatcacactgcatgagaaatggaagcaacctatctgtaaagagcctgcaaacctcaggacgctctggaagccagtggaataattacagtgggatgaggctgcaagtccccttgcttcctgagctgcattcacggctgtgtgaaggggagaaaggaatacatttgaggtcttttcatggaagacacagatattttaatgttgcgataccatccaacagggtgagctgagagaaccaacactaagagtttcacagatagaacaccactatyccctgtgtaaaacaggaggtaggcaggcgtaggcctcccctggaaaacaatgttttaagagctcataaatacctwgaggtcaaatcatcctcgtttctagtgtttgtatagttatttccaataatatatttagtgggctcacttttttattttgtgcatttatcctggtttattgtttatttttcctgaattattggccaatgaatatttatattagaacagaaaaaaatatattctaaaattaatgtcataaaaataagttacatcagttagatgtcctctgcatgagaaagggataagatggattgctaaatatcccctggggctgagccagcaagactaggactgcacacccctcatcattagcaaggacacaaaatcacggaggagacccagttggccagggcagaccagccaggcagtgctgtgtcaaacgcatgatgaatgtggtggatgcattgagctctcttcccagctgaggagttaaagagaaacatttagtaaaaagggccaggatttagtcacaatgctaccctctcccgatagaataattaagcaatgaacacagctgcacatttctggaatggacactgcgagaaaggtgtagtttttccatgttgtatggcatttgttttcttgcaaacaggcaagcacgggctaggactgtttctacgcctgtctgcactgtgatatgcactgtcttcgctgcagaagagcaccacaatgctgccttcatattccctcgtgccgaattcgatatcaagcttatcgataccgtcgacctcgag

SEQ ID NO: 1480 - DNA, 361 bp, Homo sapiens
gggatcgcctagcaacactctagcctgggtaaaagagtgagactctgtctcttaaaataaataaacgcataaaaaataacccttgtcacataaaaatgatcatctcattgtgtcttataatattttatttttagaatcaggcaaagggattctagggatgggcctgaaaggggcagctctgtgcttgtttattacatgggtacactgcatactggtggtgactgggtttccagtgtactcatcacccacacagtgaacatcgtcccagcacgtaatttttcaagccttttgcctctcccacctcctctctcttggagtccctcgtgccgaattcgatatcaagcttatcgataccgtcgac

SEQ ID NO: 1481 - DNA, 1603 bp, Homo sapiens
ggcacgagcaccacgcccagctaatttttttgtatttttagtagagatggggtttcactgtgttagccaggatgatctcgatctcctgacctcgtgatccgcctgccttggcctcccaaagtgctgggattacaggcgtgaggctgcaaaactctcttatctcccatttccccagtggcaaaacaggtcaccaggcatagagagatgggaggctgcctgagagagagggaggagagcttatggaaattggctttttcctcctcttcttcctgctcaggtacacagctaatcctgagacaacaacatttttaaattcctcttctctcgctgtgcaaacaattttctgcttccaaatgtaactctggttaaaaactacagacatgcaggtgcaattgtagacaggtttgtggtgaaagtcaagttcatacatatttgcctattaagacaggacccttaaatctccaagctggggggaaaggaagttaagtcttagaatgcacatgtacaaacttccctgtataactgagattttctgtagctctggtttttatttatggatttctgcagttcactttgacggggagggattatttttctctctgccgactccagctgattgattcaatgcgcctgctcactttcagatatggccgcagaagctgcggcataactttgtgtctgtatttaaaattgggaatacaaaatgggtttaaacttgaatatttcatcgagacactacgttttataagtaatttattttggaaatccaggcgtctgcctgggctgtgtagattttgagcgacttgggatgctcagagttacttctgaatattaatatcatttgggccgtacacactctgagatttcatataaccttatcactgctagatacttaaatagccatgaaggggataaagcaaacactttcctcaacatttatatcaggatattggctttccatatgatgactttaactaatataatctcaggcaagacaaacagcaacatttacagtgaaagacaactctgttaatcacaaaagatgttggatgcaagacttaatcatttttaggaccatggaagttatgtgtgcaaagtaaatgtagatttttcttttctcgccagctcacacaataaatatttcctcaatttcttgaagatggaagcttcagaagtctggtttagcaaagacttagccatggccaattccatttctcatgagtacatcctgtttagagggggaagctcatcaagttctgaaaaaaaaaaaagaaaaagggctgggtgctgtggctcatggctgtaatctcagcactttgggaggctgaggcgggtggatcacctgaggttaggagtttgcgaccagcctgaccaacatggtccaccatctctataaagaatacaaaaattagctgggaatgatggcagatgcctataatcccagctacttaggaggctgaagtgggagacttgcttgaacccaggaggcacaggttgcagtgagccgaggtcacaccatcgcactccagcctgggcaacacggtgagactctgtctctcgtgccgaattcgatatcaagcttatcgataccgtcgacctcgag

SEQ ID NO: 1482 - DNA, 1647 bp, Homo sapiens
tgttctatgagcctcttgtctgcctcatttttaaagtgtctttatcataaatcgttatttttaacaaatatgtttctgaatcgattgaaactattatatgggttttggcttataattattaatacggtgaattatacaaggcaaccaactaggagttaggatctgcttcacagctgtttacccaggtaaattatctcagggccaagcatagtttggaatcactaggcttaactctccaggtttcccttgtctcccaaagatttctcagcctgcggcaagttttttggatacatctatgatttttaaaaatattgtatcttctttattctcagcagcagggtaggtaggagttacctagtccatgttatcaaatggaactgataacagttccattgataacacaaggcccacaaatcaaaagatataaagagttatatagtgagaagctctttataccttttgatttgtgggccttgtgaatgcctcacttatataaaaataaagataatgtgaaaccatttgaaaactggaatgaaatgaatatattcctagamcaatataaatgataaggattgagtcataaagcaaattaaaaaaaaaaamaacaatgagactgaaagaaggtgaattggtaaccaaaagccttctcccaaaagacaccaggcacagatggttttacacaaaagcttcatttcagagaatagaaaaatatacaaattayytcggagaatataaaaagaaaaaaaatccaatttattttacaaawtgtattagttaggttttgcttcactcatgtcatgtaacaaataatgccaaatctcagtaacttacaacacttctcactccattgtctgtggatctctgtaaccatgtagttatatcaatcaatatagaaaatgtacttaataaaattgaacactcactcatgttaaacaaaacagacctcatatccaactggtactagaaggtaacatgaaaagagacatctttctaaaacctatagcaatcattatagttaatattgaagtatgagagattttccattaaaaccaggatcaaatcaagaatgtccataataatggtttctattcaaactgtcctggttgtgtccttcccagggtaggttgggaggtaggaagatgaagaattctttgatgacattaattttccccattaagcatgaggcaatgttatcagctgaacatgggtgggaagctgtcagaggtttggtaagaagggaaggtattgactaagcatcttgtagagtgggagagcaaacttattcgggaaccatccaaggattgtgagaaaaagttaaatgtccactgtgtttggtgatcatgaatggaagaggaaacctataagagtttatgactttcggctgggcgtggtggctcacgcctgtaatcccaggacttcgggaggccaaggtgagtggatcacgaggcaaggaattcaagataagcctgaccaacaaggtgaaacctgtctgtactaaaaatacaaacattagccgagtatggtggcacgtgcctgtagtcccagctactcgagaggctgaggcagaagaattgcttgaacccaggaggcggaggttgcagctcgtgccgaattcgatatcaagcttatcgataccgtcgacctcga

SEQ ID NO: 1483 - DNA, 1497 bp, Homo sapiens
gattcggcacgagcactattagattcatcatgaatgatctaaaggggttaggataggataggactactaagtagtggattcagagaaacaggtttcacttcaacatctgatggacctttctcacagtaagagtcctccaaagaaggggttggctgcccttaagtgttccccatcattggaaaattcaaacatggcttggctagctgcttggtaaggatgttgcagaaggaagtcaggcagcagattttgattgtcttgatgacttttaaggscacttacattagggagtctytattttctacctttttcaggcagaatctcctcttgagtttacacaatatttatcaagtcttctctggaatggaaggagagaagtcaaagttaaccctgttaaacatattctagacaatcattttactttcttggaaggatttttaggacagagagattcttcccatcttgtgcttgttctaactacattaactattagtactgcattgatggctgacttactgggaagactgcttggaaaaatacaagaagccattgtgggaaagtgtattctccaaaagaattccaaatgaatgaagttgtttggattttgtctgagtgcaggtttatacacacatgcatttatgtatttcctgaatctttttgggatataagataagtttttccasagaaagctttgctctgtgcataagcagaagagaagaacatgaggaaagcacaagagtgtagggacaagaamctggccatactcaaaaggaactgaakgaagtccacatgactgggcaggaaatggggctgacactgctgttatttggcgtctttctttcctaattgggcagcatagaagagagagagcagcagtcagactctggggggtggggggggcggtcaacactgacccctctgacatcatctggtgggctgggaataatttctgaaatagtgtaccaaacatgtgcagacaattatgtctgatgacataagcccaccacaaaaactgggcctgaaaatgccacttgaaagartctctcactttgcattaatttttttttccatgaactgtggttattttatttctgggtctttaatatgcagggtaaatgaatcaaaggctgatcgtgatatgttcttttgatatcagttttaaattgtgccacctgcaggaggctaagcttgttatagtgagatgtatttttagatggtggtattcgatgctaagacatgtgtgtatagagcaggacaatractgccagcagraragagagaggaggggagacaagaagagacaaggacaggaatgaaagctttgagccaagaaatgaaaataaacagttcctaaccccaaagctgcagtggaattcccagctgggctctggattgtgtttgattcggtggaggacattttctgggcagcgtttatctgctcccctggctgggctctcgtgccgaattcgatatcaagcttatcgataccgtcgacctcga

SEQ ID NO: 1484 - DNA, 1566 bp, Homo sapiens
  misc_feature (1068)..(1068): n equals a,t,g, or c
  misc_feature (1100)..(1100): n equals a,t,g, or c
gaattcggcacgaggcttttacttctgcacctcctgccatgttttcccttagacttgctatattctctgcttatgaatctcttgccaggtcctctctgagagtggctgcatcctgcacaaacatacctacttctgaatcctatcctaggctgaataccccttccaccctttcacttcatgtcagtatttttctagacttgttgtactctccaacaatccactttgtgccatgtcttccctgaagttggctgcgccctcccataattactcaatcctgtatacccaccacccccaccccaggatgaattctgaggtagaatgtatgccattcacatccgtgcacatcctgccagattttctcctaggatgtctgcacacttcactcacgttccttttactgaatcttcccctatgcatggtactccttccaccattcaaccgcctggatgtcctcacatctgcttactgcatcctgcatccacacacctcctgccaagtcttcccttacactggcagcatcctccactcatgaacttcaggccaggttcttccatatgatggctgcattgtcaacaatgtacctcttctcaagtcctcccttagactagacattaccytttcccttgcactgcatactagtcattctctaggctccctgcaccctccacatatacacattctgctgcagatagcgttatgttgataatctcaccacccacacatgttctgccatgccctcttcactargctaratgctccctcctcccatgcacatcatgctgaattatcaaatttggctccattaccaacccttgaaattaacatttaaccctccaatagtttagatacaaagaatatccttgcattttttgctagaaaccctcctactccagcttcactctctgttgatgcacttcctacaggtttctctgtgaggctagcttcacatttcctcatgcaaatccagcaatgtccaactgacaatgcaattactgctagttagttcccagactggctacaccctccgaaccatgcacttcttggtgcaccaaamttcaggctggcctnactcttaagcttcctgatgggtcctccccgangctggtgcatgctgtagtcataattttcctgactactctccctttgacttgctgaaaatgccacaaatgcacttaggactgagtactcccttagcctggatctccctcactcacagaattcttgccatgtccttgcttaggctttaccctctcctaaaccccctaaacctcctatggggttcccccctaggctgccttttcctacctcagttgcacctcctgagtgccttactatagtgtgtacatatgcacggagtgcacacatacatatagcacctgatgggacctccactagcctggatgttccctctacatgccatatcctcctttatactgcgagtttcctacaccctttcattccagccagaatgtatttattataaactcataaacctactccaatgttattccataagctttctcgtgccgaattcgatatcaagcttatcgataccgtcgacctcga

SEQ ID NO: 1485 - DNA, 1782 bp, Homo sapiens
  misc_feature (1638)..(1638): n equals a,t,g, or c
ggcacgaggtggtggtgggtgcctgtaatcccagctactcaggaggctgaggcaggagaattgcctgaacccagaaggtagaggttgcagcgagccgagaatgcaccactgcactccagcctgggtgacagagcgagactccatcccaaaaaacaaaaaacaaaaaacaaaaaaaaacccaactttttatgattttagtcttttacaatttattgagacctgtcttttggcctaacatgtggcctactgtggagaatgtttcatgtacacttgagaagaatgtgtatttccactgttgtcaggtggatgcttctgtacgtgtccgtccaaaccccatgtttattaatcttctgtgtagacgtcctgcttactattgaaagtggttcattccagcctccagctatgattagagctaccccttactttctccaattccatcaatggttgcttcacatattttgggactctgtttttgattttggtacatatatatttaaaatcattgtatctccttgttgaattgacccttctgtcaatatataaatagcctctgtccttcattttcttaattattgtcttttttgtggatttttttggagttaactgttttgatttcccttttatttcctgttgcgtatatattttaaaatactttctttgaagataaatttataatattaggattaaacatagaaccctagatttataacagctcccttcctcccttgctgtcgcaggtttcatctttttttttttttttttgagatggagactcgccctgtagcccaggctggtatacagtggttcaaatgattctcctgcctcagcctcccaagtarmwrrgactacaggcaaccaacaccacacccggctaatctttgtgtttttagtaaagatgggttttcaccatgttggctaggctggtcttgaactcctgacctcaagaaatctgcccgccttggcctcccaaagtgctgggattacaggcgtcagccacggcgcccggcctgtcacaggtttcacctttacacattgagtgcacggtaacatagacgtacacttatcttttatgcattcatcttttaatttctgtagcaacaaaggtggagttacaaaccaaatacataatcttgttggttttcctggtcgtccctgtattcaccatcgctgaagacctttcacttcatatagctttgagctaatgccgctgtccttttatgtcaatctgcaaggttccctttcgcattcttgtagagcaagtctcaagttccgtttatctrggaatgtcttacwtcctccttcattgtgaaggatagttttactgactataaacttcttaaaatttttttttctttaggaactttatcatcccattctcttttgtcttccatggtttctagagaaatcaagagataagctttttctggaaaataaataatcatcccttgtgtgtgatgagtcacttctcttctgctgcttttgggattttctctttatccctcactggtttgattataacatgtcttttgcaaatctcttcatgtttatctgacttgaagttcattatgcttcttggatttgtatattcacatctttcctcaaattttggatgtttttggcttttatttctccaaatantctttcttttcatttcgttctcttttcccttttcggagactcttgtaatgtgtaggctgatcagcccgatgatgttccacagaccctcaagtttcggctcgtgccgaattcgatatcaagcttatcgataccgtcgacctcgag

SEQ ID NO: 1486 - DNA, 1406 bp, Homo sapiens
ggcacgagcaccactatctgtttcttccctttttccacaattggaactggtcatgcacccacccagtcagggaatacatttctgagcttctatgtcaattatgtgtgaccacaagactaggttttcacttctagagtatgaatggcaatcatgcatggatttcttgggctttctctatgctcttcttcccctctccactacctggaatctatagcaaactgacttacaattcagagaattagaatgtcctagagaaaggaggagcaccaatgagaggaaccttgatcacttaaaacctatgtagagcaaggactttccccaacttaaaacactataatgttgaatcttccttaagccactgaattatcaatggatgtcattttcatagcaggctactcttatcctaactaaagtaatggttttatacaatatactttggcatcagaatgatttagttggtaaaacattggatcttgggtcaaaaactctagggtactttgataaactctgccccaattttctgagttggtcggaggcttgttacttacagtaactgtgattttattttcctagataaaaatatacaactccaggtaggcgaaacaggaatttctaacactgacctttctaattcctaattctcccaagtaagagggctacaataaccggtgattgccctaggcatgtgtcattttagtcccaagaaatgcttgtataccaacatactgccttagggtaatgtaatgggaaaataatcaaggtgagtttttggcatctggacagccacggatagctttcccatgaaagggcaaatatactccattttgagacaattagaacaaaattgggggagacgattttagttacattctgtatatacattcaatgatggcagccagtaagtcctaaacttcagtgtgtatgaagggaacttgttaatcatgcaaatttgaggactctcccacgtgccccagagatcatacttcggtggaactagagttgaccctataatctcaaggttaaatattactttaagtgattcttttttttttttttctttgagaaggagtgtctgtcacccaggctggagtgcagtggcgccatctcagctcactgcaatctctgcctcccgggttcaagtgattctcctgcctcagcctcctgagcagctgggactacaggtgcttgccaccacgccaggctaattttttgtgttttcagtagaggcggggtttcactgtgttagccaggatggtcgtgatctcctgccctcgtgatctgcccgcctcagtctccgaaagtgttgggattacaggcatgagccaccatgcctggcctaagtgattcttagatagtgacctcgtgccgaattcgatatcaagcttatcgataccgtcgacctcgag

SEQ ID NO: 1487 - DNA, 1311 bp, Homo sapiens
  misc_feature (1301)..(1301): n equals a,t,g, or c
attcgggccgagatcagaggttcaagccatggctggagcagccacccctgaagtagacaccctaatatccttcccactgagttcctagttctacatgctggagtgaggctgtcaactctgaagtgtcagagtgtgtctgaaaatgattgctgtgaaaaataaaatatttcacattgcaggcctcatttttaagttatttttcccagagaacattttcatattttagaacttatggtaatgttaacactttctatttgcataagcacttccctgttgggagatactgcaggtgtaagtttttctgaggagtgtcataccaccatggaactattttccatcgatctggagatagggaacttcttgtatactctgagagagaacttctttgagatgtaaactagactgacctactttagaggctgcctgtatcctaattttctgttttaaaagagtgatggctgaacactgaaaagctcgggacattttagaactgtgctgcccaatatggtggccactagccatatgtggctatttaagtttaaattgaattaaaataaaatgaagtggaaaaaattaagttcatcaattatattagccacatgtaactgatgactagtggctacctaccatatatagaacatttctattattgcacattattctactggacaatgctgttttaggatgtagaagtcctgatggataatatcaaagccaccttaccacagacagagttttacagagctgtgaagtaattcttactgggaacaccagatacttacttaccattttatatagcgtatgtggcattctctcatcttatcattagagcatgcctgtatctttagcgacaatagcattcaaacaccaaatgttatattgtctgtctggaaatgttttcttatacaactcaaaggggaagagaggaatatgtcgtgagtaaatggaattatttttctctgcaccacatcattataaaaactcgaagaggttgggtgcagtgctcacgcccatgatcccagcactttgggaggccaaggcaggtggatcacttgaggtcaggagatcaagaccagcctggccaacatggtgaaatgctgtctctactaaaaatataaaaattagacgggcatggtggtgggcgcctgtaatcccagctactcgggaggctgagccatgagaatcatttgaacatgggaggcggaggttgcagggagccgaagtcgcgccactgcactccagcctgggtgtcagagtgagactccatctcaaaaaaaaaagaaaaaaaaaaaaaaaaaaantcgagggggg

SEQ ID NO: 1488 - DNA, 1742 bp, Homo sapiens
ggcacgaggagcccagtagtgacttctgtggtccctgacttgcaccctcaccctattattggagttgtgcttcatttctctgtgtggaaagagtgaagtattgggaaatatgaccctggtcaccaaaccaactcagagacagcaagtgctttggcaaaggaaagggctggcacagagaacagaaacttccaatactatgttgaatggaggtggagaactgggcattcttcacttgttcctgatcattcttgacatttcccttttagaggaaaagctttcagtcaccactgaacataaggtcgatttctcattgtcttcaccaatcttctgaacccgtgaatactttttgcatgatgatttgaagcagccaggaggccaagacagcggccaggagaagcagcaaggaattgagccttgtacatttttctcaaaaaaataaaagatggggaaccaccatgctcgagataagaaattagtctgtgaagagaccttcaagttctgtaaatggtagaaaaaaatttaaatgagacatatctttctcaatttgcatcccaattattttcttaaattgtcattcactgtaacctagggaaaacagaattcagaatcacatggcagtaatgattttcatgtcctttccctaactctaccatgactccgctcccctaacacacctaggtgtctttctttcctttgtggctcatgcaatttcttctgcctgcaattccagtaagaatggagactctgggaatggatttcagaattattcaggaggaataattttcaggatgtgtgagtgatcaaatctaggggccaagcaagtcaaagagtgaaagaagagctcagaagttgaacacatttaagaggaaagatgaaaattttggttcagtggtgtcagtagtcaactagatggaagtgtaagaaggaagatggaaatgggagactacaaaataggaaacagagctacaaagagaaataaagtaatccaaagaaagagcatttattagtggacaccaagagttggacgtagatcctttggaaatgtaatatttcaattgctcacaaattctccaaattgacaatatggcaagtctattcaaagataagtaagtcatggtacacagaccaactctattacaccaaggacacataccaagactaggagaaaagagagactgggaggaataattctgccttcggaccagaggaagagagcaagagttagagacagcttcctggaagaggtggcatttgagctagctctttaagtttcaatgggagaagaaagaaaaggcatctggaaacaaggaagcagcagtagcaaatgaggaagaatcagaagggaagccagagagcaccattatcaccagaggatataccaaatccagtcattcataagctatttattttgtgtgattttaaacaatagctgctatcggctgggcacggtggttcacgcctataatcctggcactttgggaggccgaggtgggaggatcacctgaggtcaggagttcaaggccagcctggccaacatggtgaaaccctgtctctactaaaaatacaaaataaaaattagccaggcgtggtgtcgtgcacctgtaatcccagctatttgggaggctgaggcacaagaatcgcttgaacttggaaggtggaggttgcagtgagccaagattgcaccactgtactccagcttgggcaatagaacaagactctgtctcaaaaaaaaaaaaaaaaaa

SEQ ID NO: 1489 - DNA, 1877 bp, Homo sapiens
  misc_feature (5)..(5): n equals a,t,g, or c
gcgtntgcggtgtttatcttccagccaaacgggwaaatagtcaccaggtttggtagccgaggaaatggggacaggcagtttgcaggtccccattttgcagctgtaaatagcaataatgagattattattacagatttccataatcattctgtcaaggtgtttaatcaggaaggagaattcatgttgaagtttggctcaaatggagaaggaaatgggcagtttaatgctccaacaggtgtagcagtggattcaaatggaaacatcattgtggccgactggggaaacagcaggatccaggtttttgatgggagtggatcatttttgtcctacattaacacatctgctgacccactctatggcccccaaggcctggccctaacttcagatggtcatgttgtggttgcagactctggaaatcactgtttcaaagtctatcgatacttacagtaatggtgggcaggtggatacccgcttccatggtcttgcactataaactggaatggatttctcaatgcgggaccagattatgactagagtttttatgccagaaggaatcattggtgaactttccaaggttatttctgaatgtaacaatttccttaaaaatgacttatccaatttctgtatttcacctttagggttaaaaaaaactcttctactgaatctataaaaactgcagttttacatctgtgaactatggcttaagggacaggatttatgtagctaaactaattttgcaaatcaaacagacacttaaaaaactagcatatgtaaaggtattcgttaatcctgtgaatggtagcttttgcacagaacttccaaaagcaaaacaaaaacaaaatctattgtagttatatacttcatttaacctaggtcacaagacccagggaatcttctaacctcacttttacagtaggtattactcttgtgacatttttttggttatcaacaactaaatataaattactttggaaaaagtaaggctgtcttgcaaaatgatcccagctctgattagcagccctctggagttcagaacttaagtatcagtgcaaatttctcaacctttctgggttagacaaagatccttttttgtgtgttcttttcaccacccctttggctcaccttgtatcagcaaacaaagtacttcttcagggaaacctgaaatttctaatgccttgaaaagcatattacaaaagtaatgctaccttttgggaaacaaactgccccgttaactccagatcattgcactggaatgtaatcaagaaagttagtcatgttttatgtaccatgttttcacacgtgtctcttctcttcgacttcctgaaagcgaaagctttacctcctgcaaatgtcagcacatgtagtaggacaccagtatcctaggacagagagccataagtagccctttggaggactgatggtgtcaaccaaaggcatgtgattgattaatgattcccccttagaaagcaagtgttaccaaagttgtgttatcttgaaagcattacaggtaagggcatgttatggttatttatcattgtttaatgaatagtagaggtgtcaagggactatgtatacatgattagggtaagatagaatgtattatatatatatatatatacacacacacatatatatagctgaatctttggtgtattgaaataggcagcactctgaaagacagaagcttcgtccagccactcttcagcacattcctttactaagcagtttaaagccgtcctagtggagcaagccctaaagcagatttaatttttgccattttccaagaatgacggtggtggcttttagtcagaaaatggccttctgtgctttcaaaaaaaaaaaaaaaaaaackcgagggggggcccgggacccaatta

SEQ ID NO: 1490 - DNA, 3013 bp, Homo sapiens
ggtgtgtcctgctccccaatgacaggttgctcagagactgctgatttccatccctatataaagagagtccctggcatacagggactgctctgctccaggcatctgccacaatgtgggtgcttacacctgctgcttttgctgggaagctcttgagtgtgttcaggcaacctctgagctctctgtggaggagcctggtcccgctgttctgctggctgagggcaaccttctggctgctagctaccaagaggagaaagcagcagctggtcctgagagggccagatgagaccaaagaggaggaagaggaccctcctctgcccaccaccccaaccagcgtcaactatcacttcactcgccagtgcaactacaaatgcggcttctgtttccacacagccaaaacatcctttgtgctgccccttgaggaagcaaagagaggattgcttttgcttaaggaagctggtatggagaagatcaacttttcaggtggagagccatttcttcaagaccggggagaatacctgggcaagttggtgaggttctgcaaagtagagttgcggctgcccagcgtgagcatcgtgagcaatggaagcctgatccgggagaggtggttccagaattatggtgagtatttggacattctcgctatctcctgtgacagctttgacgaggaagtcaatgtccttattggccgtggccaaggaaagaagaaccatgtggaaaaccttcaaaagctgaggaggtggtgtagggattatagagtcgctttcaagataaattctgtcattaatcgtttcaacgtggaagaggacatgacggaacagatcaaagcactaaaccctgtccgctggaaagtgttccagtgcctcttaattgagggtgagaattgtggagaagatgctctaagagaagcagaaagatttgttattggtgatgaagaatttgaaagattcttggagcgccacaaagaagtgtcctgcttggtgcctgaatctaaccagaagatgaaagactcctaccttwttctggatgaatatatgcgctttctgaactgtagaaagggacggaaggacccttccaagtccatcctggatgttggtgtagaagaagctataaaattcagtggatttgatgaaaagatgtttctgaagcgaggaggaaaatacatatggagtaaggctgatctgaagctggattggtagagcggaaagyggaacgagacttcaacacaccagtgggaaaactcctagagtaactgccattgtctgcaatactatcccgttggtatttcccagtggctgaaaacctgattttctgctgcacgtggcatctgattacctgtggtcactgaacacacgaataacttggatagcaaatcctgagacaatggaaaaccattaactttacttcattggcttataaccttgttgttattgaaacagcacttctgtttttgagtttgttttagctaaaaagaaggaatacacacaggaataatgaccccaaaaatgcttagataaggcccctatacacaggacctgacatttagctcaatgatgcgtttgtaagaaataagctctagtgatatctgtgggggcaaaatttaatttggatttgattttttaaaacaatgtttactgcgatttctatatttccaytttgaaactatttcttgttccaggtttgttcatttgacagagtcagtattttttgccaaatatccagataaccagttttcacatctgagacrttacaaagtatctgcctcaattatttctgctggttataatgcttttttttttttgcctttatgccattgcagtcttgtactttttactgtgatgtacagaaatagtcaacagatgtttccaagaacatatgataygataatcctaccaattttcaagaagtctctagaaagagataacacatggaaagacggtgtggtgcagcccagcccacggtgsctgttccatgaatgctggctacctatgtgtgtggtacctgttgtgtccctttctcttcaaagatcctgagcaaaacaaagatacgctttccatttgatgatggagttgacatggaggcagtgcttgcattgctttgttcgcctatcatctggccacatgaggctgtcaagcaaaagaataggagtgtagttgagtagctggttggccctacatctctgagaagtgacggcacactgggttggcataagatatcctaaaatcacgctggaaccttgggcaaggaagaatgtgagcaagagtagagagagtgcctggatttcatgtcagtgaagccawgtcaccatatcatatttttgaatgaactctgagtcagttgaaatagggtaccatctaggtcagtttaagaagagtcagctcagagaaagcaagcataagggaaaatgtcacgtaaactagatcagggaacaaaatcctctccttgtggaaatatcccatgcagtttgttgatacaacttagtatcttattgcctaaaaaaaaatttcttatcattgtttcaaaaaagcaaaatcatggaaaatttttgttgtccaggcaaataaaaggtcattttaatttagctgcaatttcagtgttcctcactaggtggcatttaaatgtcgcctgatgtcattaagcaccatccaaaaagtctgcttcataatctattttcaagacttggtgattctgaaagttttggtttttgtgactttgtttctcaggaaaaaaaatattcctacttaaattttaagtctataattcaatttaaatatgtgtgtgtctcatccaggataggataggttgtcttctattttccattttacctatttactttttttgtaagaaaagagaaaaatgaattctaaagatgttccccatgggttttgattgtgtctaagctatgatgaccttcatataatcagcataaacataaaacaaattttttacttaaaaaaaaaaaaaaaaaaaaaaaaaaaaaaaaactcgagggggggcccggtacccaagtcgccct

SEQ ID NO: 1491 - DNA, 766 bp, Homo sapiens
  misc_feature (13)..(13): n equals a,t,g, or c
  misc_feature (15)..(15): n equals a,t,g, or c
  misc_feature (37)..(37): n equals a,t,g, or c
  misc_feature (132)..(132): n equals a,t,g, or c
  misc_feature (754)..(756): n equals a,t,g, or c
  misc_feature (760)..(760): n equals a,t,g, or c
caccccaggcttncnccttttatgcttcccggctcgnatgttgtgtggaattgtgacggatacaatttcacacaggaaaccagctatgaccatgatttccgccaagctcgaaattacccctcactaaagggnacaaaagctggagctccaccgcggtggcggccgctctagaactagtggatcccccgggctgcaggaattcggcacgaggacatccaggaagagaacgaaagttcccctgttggttttcccctatttttaagtgtgagtgtatgaatgtgtgttttgttctcttccttttatattgcctcctggatttgggttgttttcctttatctgtccggactgtaaatgtggatatgaaggttcatagtcctgtagaataacgtcagtgcttgagctagtgtttggtgtgaagtacctatcttttgaagggagagaaaagaattacgactgtggtaagatttaagaggacagaattaagattatgtaagggttgaagaaaggtttgctgggaatgtggtgtgtgttttagcagagaccccaatgacctgccagggcacgtagagagagcaggctacttgagggcagggagtagaccaccgccatttctgtgacctcacatctggcatggccaggcacacagtaggtactcaataattaactccctgctgtttccctaatcatgtagaggaaagcaacaatgttcagtaattaactgtttaaaaaaaaaaaaaaaaaactcgaggggggnnncggnaaacaa

SEQ ID NO: 1492 - DNA, 3138 bp, Homo sapiens
  misc_feature (3106)..(3106): n equals a,t,g, or c
  misc_feature (3109)..(3109): n equals a,t,g, or c
  misc_feature (3138)..(3138): n equals a,t,g, or c
cagcagttcagttacttggaacaattaaagattacccttaacagccatgttaatacatctaaatgctaaaatatactacgagtttttcatagtcttgaaagtatacagttaattacttttcaaagttactgtgktctcatgtttactcttcttgtatctgtgatatgcaaaaagatgaagactcttggcctccaggagtttacattctcatggtgctgttggttcaagcagattgctttagtttattaatgaacattgcttggctattaattatatcctatttggaaggatcccttggtgaacagttttaaaaagcagagggctgtgctaaatttcagggtattgatagcttgagtttacattgtattagccctgctcgttatcatttttttccccagggagctatgcaggtaatgctcattagcatgaatcagaaaagaaaccattctgcctaagagcatcttaaccatccccctaaaccacctatgctctcctgttatagttgtcagtaaatcacgaagaaaattaacagctccttaagactctacatccctcaattctctttcttttcccagagtttgtacatcattctctactcagatggaccaggatttgcatataagccttttaaaactgactagtggtcctaattttaacatttttgtgtatgactcctatcccttttctgaagcagcattgtgatagatgtggagcttctacctgcatttctaagcaattattaacccaacttttgagttgaaacttgcatggatccttgttatgtcccgtaattcctctgaatcaaggaatttattttgcatgcttattaaactcaaactgggtctgattgaaagtgcaagcaatagtgacaggaccttaactctggttttagagtacgaacattctaatgcatgactcaaaatgtccagtgttgtggttactagttattttatatatgcatttgttaataatgaagcaatagagactaagaccaatagcttgaatatattcagattattttcatgttttaataaaggatttttcttacttccattgaaaatgggaagtagaagataaacaggggcaaccacaagacattcaaactgtcaggactagggcgtagcagtgcccaccctctaaccacttgcctggttccattagtccccaagcatgtttgaaaacaaaagacacaaactaagcatgctgaataaaactagctgctatggctgtaataatcagaaaggtgcagagtttcagaaagagtaggaaagtagggaatgccagtatggagtatgtaaaataactagatatggatatggggtttgkttatgatatgctttatgtagacaaagtttgaggtcttttaaaactgggatttgagttgaaaagagtcaggatgcacatatttccactatttcaggattttcagatgactaggcacatgttgtggatgatactggtaccaactaccaatgaccaactataaagtacccctgcaataagggagacttcctttttgtagaatagtcctgaaaatactgacagatctgtggttagtttgttattttattgcataaaaaacagtttaaacaaattttatagccaaagttttatccttgatgggtttggccagactgcaatttcttgactaaagcttttaatgccaggttaaacaggagaaactttttccactagaagaaaatccttgctatctattttttccaatagaagaaaatccttgctatttattttatttgatgaataaacaaattkattgcagtagcttaaaaaaaatttttttttaaacagtctcactctgtcgcccaggctggagtgaagcaatgtgatctcagctcactgcaacctccacctcccgagtagctgggattacagacatgcaccaccaccctcagctaatttttgtatttttagtgragacggggtttcgccatgttggccaggctggtctttaactcctggccttacgtggtccgcccccccttggccttccaaagtgctgggattacaggtgtgagccactgcacctggcctgtagtagcttaaaattttccttgagaaaattcctgactttaaaaataacccttatataagtacaagtgattgtgacaaatgacgtaaaaatggcattcatgatgtctgaaacaagcctaaatagaattcaagattagactaaatgattttcacaaagcacattcaaggttttacattctatgattgaaaaaaattttttgaaaactttttatttcattctttcctgtaggattttgctacaaataactttgggaatgaataaagtggaatggtaactttccagtggttcagaattgaattagacttcttgtgactgtgatgtttggtttccattgaaatatatgaagtgagatgtcatatcctgaatatagtttgtcttccccaattacttgatagcatgtctgtcagccagtaaagattaagaacagagtttctctaaattcctccgattattccactaaggcacattaaaatacttaattttgggaaaccagacatcacagatttctccatgaagtcctaaatcttctttaaagtcagaataggtatcttagttactgacagtattcaggtttttttctcccttggtgatatgtcattccatcagtgaaaaaatattttctcccagggataagaaaggtattctggtaatacattatcatcaatccttaaacagtaacagtcttggcacttatcacaaaaccgacccatttcttataaccagaaagattatcttagactgtccttcacattatactttacctactgccttgtaagaataagagttgctcactgtgtttacttgctgtcctccatattctccattgcaccattggtgtataacgttaagagtttcattgaatattattttaagtattacaaaaggcagcttgcttcttaatctatgcatctttggggtttttgaagaaatttaattctttgatgtaaaaaggaactgttaaaaaagttggaagctctgcacctgtgtatatatatattttagcaataaagcagcatgggctgagaatgcactgaaaaaaaaaaaaaaaaaacncgngggggggcccggtacccaattcgccctan

SEQ ID NO: 1493 - DNA, 1698 bp, Homo sapiens
  misc_feature (17)..(17): n equals a,t,g, or c
  misc_feature (22)..(22): n equals a,t,g, or c
  misc_feature (30)..(30): n equals a,t,g, or c
  misc_feature (755)..(755): n equals a,t,g, or c
  misc_feature (770)..(770): n equals a,t,g, or c
  misc_feature (922)..(922): n equals a,t,g, or c
  misc_feature (1689)..(1689): n equals a,t,g, or c
  misc_feature (1692)..(1692): n equals a,t,g, or c
  misc_feature (1694)..(1694): n equals a,t,g, or c
tggaaagggggatttcnaaggnaaatctcncttgggattaagaagctggagctccaccgcggtggcggccgctctagaactagtggatcccccgggctgcaggtttcaaatccagcttatcttctgttttgtttccagattaatctttctgcagcacagacccacatatattattcaattgaacaaacactttcaaaggctccaattgtttaccacattaaggaccaccttcttgccttgggattcaaataattctggtacagggatcaggacttcgtcccaacctctcactagtctactgcattatgctcagtccgtggtggggatctgattgtttccttgaacttgctctgttcttttctgcctcagagctgtccttactgcccctggcactttccatcttccccatttacatctgtctcagcagatttaaattctaccttctccaggatgccaatcataatttccccatcaaatgtaatctcttggtctttgcaagccccactgtactttgtcaaaagtgctcaccacgtggtactgagaactatagcttcctgcaatgtggatgtagtcatcctccatttttccttcccttctgcytccagacacctyacaggtaggagttwaggctgatttatccgkgwattccctaaaattccagccacatgcttttcatgcaatggcagtgcaacagatagktatattctgaacggaaccmatacagataaatcccagttaagaactctagcacacanaacaattttcttggntctacttttgctgcatcatacagcagagcttcttaacttgstaaaaacaaaagktttaaatgtttcgacaaaaatattcagatagatatactttcccacaggatgtcagaaaccattgaatgtcamcaaatatagtgggatatttttctacngaaggaggaagttgatactaatcattcagcatawttttaatctctcatataattgatggctgcagawtcttttcctttwtctttttttgrgacaggatctyactctgtcactyaagctgragtaagtggcacaatcttggcctactgcagccttgatctctgggactcaatcgatcctcccacctcagccttctgagtagctggggctacaggcccacgccactatgcctggctaatctcttttgtatttgtagagacgggattttgccatgttgcctaggctggtctccacctcttgggctcaagtgatcctcctgtctcggcctcccaaactgctgggattacaggcaggagctaccgtgcccagctggttgcagatttcataccagcagtcaaattaaagtacataaaaatacaagaagatattgtctattaaaatctacagagaacatgagtatttaagttacaaaatatggggaaaaggttaaatgtcttcacagaataaatcaatcaacaaatatttattataagtcactgagtgatataaaaaaagtaaaataaggcttttataccccaggagataatgcagtgggtaagataggagaggaggctgtttcaccagtccagggctgcagtgattaggattggagaacagctgtggtgaagagttaggtaaaaggaaaggagaagcaaarctgacwtaaagctcgtgccgaattcgatatcaagcttatcgataccgtcgacctcgagggggggaccggaanccngngcgt

SEQ ID NO: 1494 - DNA, 1848 bp, Homo sapiens
gcttgggtcttagcatgctgattgactcccagaacaaccagtatattttgaccaagcccagagattcaaccatcccacgtgcagatcaccactttataaaggacattgttaccataggaatgctgtccttgccttgtggctggctatgtacagccataggattgcctacaatgtttggttatattatttgtggtgtacttctgggaccttcaggactaaatagtattaagtctattgtgcaagtggagacattaggagaatttggggtgttttttactctttttcttgttggcttagaattttctccagaaaagctaagaaaggtgtggaagatttccttacaagggccgtgttacatgacactgttaatgattgcatttggcttgctgtgggggcatctcttgcggatcaaacccacgcagagcgtcttcatttccacgtgtctgtccttgtcaagcacacccctcgtgtccaggttcctcatgggcagtgctcggggtgacaaagaaggcgacattgactacagcaccgtgctcctcggcatgctggtgacgcaggacgtgcagctcgggctcttcatggccgtcatgccgactctcatacaggcgggcgccagtgcatcttctagcattgtcgtggaagttctccgaatcctggttttgattggtcagattcttttttcactagcggcggtttttcttttatgtcttgttataaagaagtatctcattggaccctattatcggaagctgcacatggaaagcaaggggaacaaagaaatcctgatcttgggaatatctgcctttatcttcttaatgttaacggtcacggagctgctggacgtctccatggagctgggctgtttcctggctggagcgctcgtctcctctcagggccccgtggtcaccgaggagatcgccacctccatcgaacccatccgcgacttcctggccatcgttttcttcgcctccatagggctccacgtgttccccacgtttgtggcgtacgagctcacggtgctggtgttcctcaccttgtcagtggtggtgatgaagtttctcctggcggcgctggtcctgtctctcattctgccgaggagcagccagtacatcaagtggatcgtctctgcggggcttgcccaggtcagcgagttttcctttgtcctggggagccgggcgcgaagagcgggcgtcatctctcgggaggtgtacctccttatactgagtgtgaccacgctcagcctcttgctcgccccggtgctgtggagagctgcaatcacgaggtgtgtgcccagaccggagagacggtccagcctctgatggctcggagatgatggaccgtgaaggaagcgtctgtggggagtgagcgcttagatggccagcagctgctccttctggaagctcgcaccttggcaacagaacagccctctagcagagcgtcagtgcagtcgtgttatcccggcttttacagaatattcttgtcctattttagaattttccggagtagtttatttgcagtctgttgattatgtgcagtagacccgggacactgcgttttaccgatcaccttgaatgtggtgcctggatgtgcctttttttttttccctgaaattattattaattttctattgtgagttcatcagttcatagtttttttagtaaagaagcaaaattaaaaggcttttaaaaatgtacaacttcagaattataatctgttagtcaaatatttgttattaaacatttctgtaatatgaagttgtaatcctggccgtgagcttggaagcttacttttgattcttaaagcctatgttttctcgtgccgaattcgatatcaagcttatcgataccg

SEQ ID NO: 1495 - DNA, 740 bp, Homo sapiens
ggcacgagctcccagctacggccgacatgggtctggctccggtcggtcttccaccagtggccaacatgggtctggcttaggcgagtcttctggctttggtcaccacgagtctagctcagggcagtcctctagttacagtcagcatgggtctggctcaggtcactcctctggctacggacaacacggctctagatcaggacagtcatctaggggtgaacgacacggatctagctcaggttcgtcttcccgctatggtcagcatgggtctggctcccgtcagtcttcgggccacagccgacaagggtctggatctggccagtcccctagccgcggccgacatgggtccggtttggggcactcctccagccacggccaacatgggtctggctcaggtcgttcttccagccgtggcccatatgagtctggctccggtcactcttctggcttaggtcaccgagagtctggctcaggacagtcctctggttacggtcaacatggatctagctcaggtcattcctctacccatgggcaacatggttctacatcaggacagtcatcgagctgtggccaacatggagctagctcaggtcagtcttccagccacggtcagcatggctctggctcaagtcagtcttctggctatggccgacagggctctggatctggccagtctccaggccacggccagcgtgggtctggctcgtgccgaattcgatatcaagcttatcgataccgtcgac

SEQ ID NO: 1496 - DNA, 1015 bp, Homo sapiens
  misc_feature (365)..(365): n equals a,t,g, or c
ggcacgatcactccccacagggtgtattgggggctgggggtaagcacgtgtcatggggcaccaacgctggtcccctcaagccaagactccctggtgtggactcagctgtggcgagaggacagtttagcactgggaagttcatgccgcaacatggccttcttctgtagctgtgggtctagggccgtggagacctcttgggtgtttctcctgattctctgccagcctcctggggctgtgtgcacaggcgttggccacttagctcccttctagcctgggccgaggggaaggctcatgtcctgcggggtcccctgactgctgctgatggcactccatgctgagggcggcctgatgggatggtgtgctangacctgggcaacgggacaccagcagctgctggcaggaccttctcacttgtcagtctgctgggttttcttttttttggagatggggtcctgctgtgtcacccaagctggagtgcagtgatgcgatcacagctcactgtagcctcgacctcccgggctccagtgatccccctgcctttggaccctgtcctcagagctcctgggggccgccctgctccatcccagaacttaaccacgctccctggaacactctgaagggcctgtgggcaaaaaacctgctggcctcctgttgcaactcttaatctgaagtcctctgaactctaaatctgaactcactccacctgtaagaaaaacggctccgctgcaaactggctggtgcaatcccaagctcaagctggggagctgctgcgtctgtggtcaggcctcctgctcctgccagggagcacgcgtggtcttcgggttgagctcggccgtgcgtggaggtgcgcatggctgctcatggtcccaacacaggctactgtgagagccagcatccaaccccacgcttgcagtgactcagaatgataattattatgactgtttatcgatgcttcccacagtgtggtaagaagtcttgaataaacacttttgccttcaaaaaaaaaaaaaaaaaa

SEQ ID NO: 1497 - DNA, 1906 bp, Homo sapiens
  misc_feature (9)..(9): n equals a,t,g, or c
  misc_feature (20)..(20): n equals a,t,g, or c
  misc_feature (35)..(35): n equals a,t,g, or c
cgggctcgnatgttgtgtgnaattgtgagcgatancattttcacacaggaaccagctatgmccatgattacgccaagctcgaaattaaccctcactaaagggaccaaaagctggagctccaccgcggtgcggccgctctagaactagtggatcccccgggctgcaggaattcggcacgaggtcttaaccatgctgttggatttgcaagtcgaaccagtaaagctttcagcaacaaacagactgtgaaacaatgtggctgttccgaagtttatctggactgtttacagacattcttgccagccctcagttgtcccttacaaaaggatattctcagaagtggagtccgtactttccttcatcgaatgattatttgcctggaggaagaagttcttccgttcattccatctgcttcagaacatatgctcaaagattgtgaagcaaaagatctccaggagttcattcctcttatcaaccagattacggccaaattcaagatacaggtatccccgtttttacaacagatgttcatgcccctgcttcatgcaatttttgaagtgctgctccggccagcagaagaaaatgaccagtctgctgctttagagaagcagatgttgcggaggagttactttgctttcctgcaaacagtcacaggcagtgggatgagcgaagttatagcaaatcaaggtgcagagaatgtagaaagagtgttggttactgttatccaaggagcagttgaatatccagatccaattgcacagaaaacatgttttatcatcctctcaaagttggtagaactctggggaggtaaagatggaccagtgggatttgctgattttgtttataagcacattgtccccgcatgtttcctagcacctttaaaacaaacctttgacctggcagatgcacaaacagtattggctttatctgagtgtgcagtgacactgaaaacaattcatctcaaacggggcccagaatgtgttcagtatcttcaacaagaatacctgccctccttgcaagtagctccagaaataattcaggagttttgtcaagcgcttcagcagcctgatgctaaagtttttaaaaattacttaaaggtgttcttccagagagcaaagccctgaggactggatttccctgtgcctacttcatgatcatgaattccagttaatttataaagaggcgatttttgtgtgccattcacactggtctttttcacattgttttgagcttattgcagtatatgttttgggatttttctgtaaaatgggtgtaattttcctaatacaggtatgtaacaacaaaagaagttgcctgcatgccggtccaaattgttctgtataaagatgctcttaaaagacacaagagttatcctagaaccttaattcttttttatttgaaattttaagtcaagtcctttataaagaccatagcagtggaaaacagtgtactttttaaaaaattgctgaatataaaatctttgaaaattttctttatgtgtgaagacacaaagtatgggggaagacagcaatcaaaactaactttttgtagatagccatttcatttctttaaactgtttcaacgccaatatgtattctacaaaagagaatggttttaggctccagtgttatacttttttttatatatatatataaaaataaactttacgtagtgaaatcttccaagtcttttctggaattattataaatactttagttttattttctcatcttaatctctccataatttcccatttaaaggtttacaaatatgagtgtgtggatgctttaattcatttaacctcactcctcaaaggtaacatgcaacttagttctgttatatgagagtctttttctttaatgtactggaaaaagcctatgtgaatctgttgatagaatttaaaattcca

SEQ ID NO: 1498 - DNA, 1216 bp, Homo sapiens
ggcacgagtttttgtttctcttctatgtcaatacttagtgtttctcattttgaggactttttctctctcctgtatctttgttttagtttctttggtttttattttgtagtcctttcagttatttttaatgtgccaaaaatttgtacatgttcaattaaaaatgttgtataatagtgtaatacttttctttgtatgaaaatgtcctcttcttcaaaggtataggctttgtaatgaattagattttctgccaataattgatatacaatttatattctttattgtgcctgtgtgttaccatgctaagaatgtctttgtttaaagggaattaatctttttatgatgtattaatctgtgttttcaattgttttccaagtacagttcaaataacttgcatatttactatacaaaatggttgacaagtgttctttttgcaaagacttgaatacattggcagaggtgctaatcacatcttccctaaggcacctggaagaattatttgaggaaaaaatgagttttcacattgttttataggaaattaaatttgtccaaagatttggagactatttttaaaacataaatacataaaatttcattatttcctgctatcttgtttgctggcagaagtgaatgtttggtgaggttattttgggataaattacaaaagaaaaaaaattagacactgcattaatttcttgttcttttggaatatcttagtaactgaggatcattttctaacaatgtggttgacataccttcagttgctttccacatctaaaagagttatctttcatatatgtacaagttattggtagtcttatttttgggctgtttgttgacttatgccccatttgttttacttgttctttaatataaacccttccattttttaacaattcctaacacttgatatcttaatatcagtcactaacattagtaacttcttgtatgttatattatggcagatctctttacgttttttctcacatctatctgctagtccaggaatttgttactaaatagattttcttggatatttggttgcctcaaagtgcttacatttgttaacagattgtaaaccacatttatttacattgatgaatgggctgttgaataatcattgtaaagcactttgtatatataaggtgctatataagtgtgaaatatcattcatttataaatgaaatgccttctaactttaaaaaaaaaaaaaaaaaaa

SEQ ID NO: 1499 - DNA, 1191 bp, Homo sapiens
ggcacgagccggccggacagactgacgtgtgagctgcatcgcgggaggcgcatggcggggatggcgctggcgcgggcctggaagcagatgtcctggttctactaccagtacctgctggtcacggcgctctacatgctggagccctgggagcggacggtgttcaattccatgctggtttccattgtggggatggcactatacacaggatacgtcttcatgccccagcacatcatggcgatattgcactactttgaaatcgtacaatgaccaagatgcgaccaggatcagaggttccttggggaaagacccaccctacgaagttggaatgagaccatcagatgtgataagaaactcttctagatgtcaacataaccaaccttataaagactaaaattcatgagtagaacaggaaaatcatcctgactcatgtgttgtgttctttatttttaattttcaaagaggctcttgtatagcagtttttgtctattttaacattgtagtcatttgtactttgatatcagtattttcttaacctttgtgactgtttcaatattacccccgtgaaagcttttcttaatgtaactttgagtacattttaattgccttctatttttaaaactcaaaatcattagttgggctttactgttcttgctattgtatggcatatacatctgcctggatatatttctactcttgacccaaagttttgtaaagaacaatataagatttcgggtaggggtatggggagggaagatattttattgagaactacttaacaaaagatttatctgtaagcttgaactcaggagtacagttttagctatctagactctaacagcttttgctttaaaattattaaagtgtttcttaatgaaaaagaaaagatcttgctaaagttaaaataaggaacatttcaccttttaaatatttaattcttatgtggacttatttccagaaaactttggtgataattcttgagacaaaggtggttaagtagcattattatgtaatgcttatataccatagagtttttaatagaagagaaatccatttcctccgagggtcactattaacaatgtacttccttaaatttagtttaatgattgtaatgggtgctgcatttgcacattgcattaagttatgatgagacgaattgttgttaaaaaattatagcaaaaaaaaaaaaaaaaa

SEQ ID NO: 1500 - DNA, 1418 bp, Homo sapiens
agtggaaaggtcagcctgggagccttttggaaggctctgaatcgtaggctgaggaattaggttcaactctscctatggccttggcagtggggattattggatgtccctgagtagggaagtaatttcttagagcttagttttgtggagaaacagatgaggtgcagaggagcggccagccaggagctgctgtacttgtttaggtgtgagytagcctcagggtgggttatgtggagctgttcatactgcagatatgacagggggcctagctgcaagagcaggtgggagggcttcattccaggggcctcagtgtggctaactcaggttgagragagaagatcctgratggtagagragsccaggttgaataccatactcaacccttggaaggcagaaagcagcragggaggtgattcactacaatagctggggcagcagattttgcggtgctgagtcccacctttcagcttgatggatgctcacctcttctcagccccagctcgtgccctgtttttctagccatagcccccagattactcacagctcctcatgccatttcctgtccagattgctatgtatgactctgacctctcttgtccagtggtctggtgctcacctcctctcactgctagaatattcaccaagggtttgcatttgggaagtcccttaccagctcctgcttagagctggtagggccatacatgtccacactcccaactggtggctctcccgctgaatggggcctcagcaggtgcccaagctgctacaaccttggccactctgtttctccaccccagcactgggcatggtaattagcctttccccatgttaatttattcagttttttcaagggtcaactgaattccccacttcctgggtaagaagcatgatctccttttaatttcacgtctaagatcctggcagcttcccctagctggttcctctgtagtcctgctgggactgtcagctcatttaaatgtgggtctgcagaaggctttaggtctcccccaacccccttacctttcacagaggaacctttcatcaggataaatgattattgctgccctgtgggtcttgctcaatactgttcatacctggagagagaaggtattgaaacatctcctttatgtgtgactttcccaaatttttaaaaattgtttatggtttaggccccttaaatactgtgtagcaggatgaagtctaccattaccagctgggtcaccttggatgggtctgtcaacatctaagcctcagttccctcacctgtaaaaatgagggtagtccctacctcataagggatattgtgaggatggaaagcgaaagtgtgagaaaatacctcccaagtgcctggtacatagtgggtgctaaataaaccactttttgtctgcaaaaaaaaaaaaaaaaaaaaaaaaaaaaaaaaa

SEQ ID NO: 1501 - DNA, 1854 bp, Homo sapiens
  misc_feature (1851)..(1852): n equals a,t,g, or c
ggacgcgtggggagagattggagtcctggtctccctaagggaatagccctccacctgtggcccccattgcattcagtttatctgtaaatataatttattgaggcctttgggtggcaccggggccttcattcgattgcatttcccactcccctcttccacaagtgtgattaaaagtgaccagaaacacagaaggtgagatcacagctctgctgkcagagattactagcccttggctctctcgtttggcttgggtattttatattatttctgtcataacttttatctttagaattgttctttctcctgtttgtttgcttgttagtttgtttaaaatggaaaaaggggttctctgtgttctgcccctgtaattctaggtctggaacctttatttgttctarggcagctctgggaacatgcgggattgtggaattgggtcaggaaccctctctggtattctggatgttgtaggttctctagcagtctagaaatggatacagacatttctctgttcttcaagggtgataggaaccattatgttgagcccaaaatggaagtaataataaatgcctcctggaggctgtgggtgtgggggattctgtatctggattccgtatcactccaactggaggctgtgggtgtgggggattctgtatctggattccgtatcactccaagtggaggctggcaggtttttctgcaagatggtccagaatctaaaatgtcccattaatctggtcacttgggtttggctctgctgtatccatctatagtggtagagacccaccagggctcaagtggagtccatcatcctcccacgggggcctgttcttagcactgagttgatcgctccatgggggagagatcagacattccttatcagagatgatgtgaccttttctgactctgcccagtctctatgaatgttatggcctagggaagaatcatgaaactctttagcttgattagatggtaaacagtgttaacccatcctttactacagaggcatctgggtttgaatgttacctggggttctctctattgagttgagccccttcttcctttagtgggttttggacatcttctggcaagtgtccagatgccagaaccttcttttcctctagaagggatggtgcttggtaaccttaccttttaaaagctgggtctgtgacctggtcttcccatccctgcattcctgtctggaaccagtgaatgcattagaaccttccataggaaaagaaaaggggctgagttccattctgggtttgctgtagtttggttgggattattgttggcattacagatgtaaaagattgactagcccataggccaaaggcctgttctagttgaccaagtttcaagtaggattaagaggttggttgaggggtgcagtttctggtgtaggccaggtaggtagaaagtgaggaacagggttgcctcttggctgggtggagtctctgaaatgttagaagaagcgctgaagccttgattgatagttctgccccttgttgccctggggcttatctgattatgggacgagggtagamagtaagaagcacttttgaatttgtggggtagaacttcaacaataagtcagttctaagtgctgtcgcctggggactagtgagaaagctactcttctccctcttccctctttctccccatggccccactgcagaattaaagaaggaagaagggaaggcggaggagtctataagaaggaatcatgatttctatttagcagattggatgggcaggtggagaatgcctgggggtagaaatgttagatcttgcaacatcagatccttggaataaagaagcctctctgtgctgaaaaaaaaaaaaaaaaaaatnnct

SEQ ID NO: 1502 - DNA, 695 bp, Homo sapiens
  misc_feature (1)..(1): n equals a,t,g, or c
  misc_feature (602)..(602): n equals a,t,g, or c
  misc_feature (677)..(677): n equals a,t,g, or c
  misc_feature (687)..(687): n equals a,t,g, or c
ntgtgatccccgggttamsaattctgaacatggcggcggtggtagctgctacggcgctgaagggccggggggcgagaaatgcccgcgtcctccgggggattctcgcaggagccacagctaacaaggcttctcataacaggacccgggccctgcaaagccacagctccccagagggcaaggaggaacctgaacccctatccccggagctggaatacattcccagaaagaggggcaagaaccccatgaaagctgtgggactggcctgggccatcggcttcccttgtggtatcctcctcttcatcctcaccaagcgggaagtggacaaggaccgtgtgaagcagatgaaggctcggcagaacatgcggttgtccaacacgggcgagtatgagagccagaggttcagggcttcctcccagagtgccccgtcccctgatgttgggtctggggtgcagacctgaggagcgctgcgaccctcctaggctattgactgttaagtcctcaggtttggcccagattccagttcgtgcctctgaggtccaccagagggcgcatgaagcccaggctgttgccaaaccctaccctgccccacaccaaggagccanccaaaggcaaataaagttattgagtgtttagtagaaaggaaaaaaaaaaaaaytccaagggggggccccggtaanccaatttggnccctataa

SEQ ID NO: 1503 - DNA, 686 bp, Homo sapiens
ggcacgagtctgcattggaaattggctgaatgacagtatgtgggtcctttgcaatttttctctgtataaagagtgccatagtggctgcatctgagcatgcctgcattcctacagatatctaaagattcctccatgtcaggcagttgtaagggtgattgcttcctctaggaggggacatttcctgttttcttagatctgacaagattcctccctgtccccaactatcaaagtatccgtttccagcaagatgagattcctcttcagttaaacaaaacttgctactttttatattttaaaaatctttatatatatatatatacacacacacacacacacatacatatacgtacacatttgcacacatatatgtatatattttgaaaatttgctggatgtggtgactcatgtctgtaatcctagcactttgggaagctgaggttggtgggtcacctgagctcaggagttcaagacaagcctggccaacatggtgaaacccatctttactaaaaatacaaaagttagccgggcatggtggcaggcaccggtaatcccggctactctgtggctgaggcaggagaaccacttgaacccagaaggcagaggttgcagtgaaccaagattgcattactgcactgcagcctgggcgacagaacgagaccctgtctaaaaaaaaaaaaaaaaaaaaa

SEQ ID NO: 1504 - DNA, 2310 bp, Homo sapiens
ggcacgaggcaggtggggggctcagcctgcacccacttggagcccctgcaagagcgaaccggtcagcaccaagtaacaccacacacacgcagcacccaggatgatggtttcacttcagtcttccccatcccaggttttatgttgctgggcttccggagagccggtccaagcggaggctttcagtgatttaagtacaaacatgcatctcgtgatagtcctgccttgagagcttaggaatcttccggataagtatgaagcaattcgtaggcctgtttcccatctgattccatagggggctgggtgtggccttcgggttgacatgagaaaggtctttagcaatcatttctgcaccggagatgagttttatcctgtgttggggagaggtgctcaccctccaccctgtgtccctgttttggtagcaagagtgaccgatgtcaagaacgagcatcaaagccagaatcctgcttgtttgcttaaaaatgtaattgggggcggcgggggaggagaggggaaagagacattcgcttggtttagtgaaccgaggtgactttgtagctctgtggtcagcctacttgtctgctctgagggagagtgcgtggggagccatgctcaccgtggcaaacacaggaaccccatgactcgcccctcacctggcgtggagctgcctggtttgggctggagcagagctggtttcctggaatgttcctttggcccacatatggttctgtcccggtgagctctgttgtcagaggctcacgggacagaaccacatgctagggtctagggcccctgtctactgatagtcagtttgctgtgtcagaaagcacttctgaaagcagatatgagtcaccagacaggcaggatcttacaaaactcacgggcctctttggtctgcatgatggccccatgcgtttcataggctgtccactgagcgggattgtctgctgagtgggatgagccaactccagtttcttaaggaaaccactggaatctgcagcccccacatgcatctgtctaacgcatgcctcgtgttcgttttgcaaacatgcctgtggtggagggtggtcagttgtagccctgtgcgtctcaaggctgccttgtgaggccattcccagtgcgtgcccttgagctccttaccaccccttttcctgctcggccctttaatccctgacagacctggactgtgtggctgaagggggacctgcagcactgcagaaatgcctctgcgtggtgccatgaaggaaagaaaccttggcctggtctcgagaagcttcccatgcttcaggaagttagtaagggtggggtggcttgcaggattggcctgtttccagggcctcccacactcattggccagattgtgaactttgtcaggcttgtccctccctgataccaagtatgtcgagaaccgatggccccaccctctggctggtgctgggccggaggtggctatggaggattttggcatgcgtggcctgtcgccacctggacagcgtgacctcaggggttgtccactttacctttatggtgaggcctgtcggatggctaagtccttgaaaccctagagctgtgacgtagaatatgtgctgtctgtgagaccgtgttcccaggagcactgactgcagttgagagagacccattttgctctcccttaccgccccccgccccgggtgctttctgcacaaagcctagagcctggcactcaagcccaccggtggcagctcctagtgactggacatgcctggaagacccctcagccttctgtttgcagaacgttcatttcaggagcttctccttcccacagacatcttacacttgctcgacactgccacctgcagaagcctggcgggctctggtcaccatgtgtctatctgaaggttgcactggccagcatgggcctgtcccaagcgagaggggagacacagtggactgaaaggactggttgaaagtggccaatctctatcagcttaatttggcagagaaaatttgtaacaactctgagcacatgctgggtgaagtcacagctcaaggaaagataaagctgggcggaaggaggtgtgcgtggcttctggggtggggacccagaggggaggctctgggacaggggctggggttcagtgccagggccctgaggaagaaatggggactgatctcaaaattccagaattccctgtacatctgttcacgtgcttgtgtccaggtgtgacttgtaaactgtctagtgtttgcattaaataaaatggcaccgagcagaaaaaaaaaaaaaaaaaaaaaaaaaaaaaaaaaaaaaaaaaaaaaaaaaaaaaaaaaaaa

SEQ ID NO: 1505 - DNA, 774 bp, Homo sapiens
tgaaaacaagggccaagtgatgaagactgaagtcaagaatgaccatgttcttttctacttggaaaatagcaaccttgtgttcaacattcagccagccccagccatggtctacgattactatgaaaaagaagaatatgccctagctttttacaacatcgacagtagttcagtttccgagtgagacaaagcaattactagaagaggtaaagaaattttattacgtcataaaccattgaaaacacatctagtaagaaaatgaaaacctgaataagataggacaatagttgaagaaagaaaagtgtctggtacttcattagacttgtgtagctgtgtactgcatgagtaatctgataatcattaagattatattaatttctttaaaaatagctttaaagaattcacagctatatatgtaccttttataaatctctcatttttgttttgtaagttgacaggtcagtaaaaatttaggcatatatatttgtacatatgtgtgtgtatgtacatgtctatgtgcctatatatgcatgtttttatatctaaatatctatttatatatacatacaaacgtgtttattgtttaaatgatgttttaaatcccagttggagaagcatttcttgtaacaaactgattcttctgtatcaaacctggaaaaaaatcatgaaccatctgacatcgtgaacagtctgcagtgggctatggtttcttgtcaagtcttatttccttatcatcccattaaatgttgtcattttgcaaaaaaaaaaaaaaaaaaa

SEQ ID NO: 1506 - DNA, 614 bp, Homo sapiens
cggcacgagcttttgtctgtgttatctgaacactctacttcctttgcagccttagtcacacaactgagtcatctcaagtactctttaaggacacacagcccaggctgttctgagtcagaataggcccctacaggtatattttaaaactcttcgtaattctaatgtgtactgctggtatagctgaactactgacctggatcttagtcctagcctttttgcttttgcaatttcagtatcttcatctctaaactagggaaacactgggattctttcttagctgtgggggaaggtatttggttagatgactttgaatgaatagactgctgtgctgaaagagctttatcacactgtctcaaagtatgtaaagatacataggtggatgctcttactgcagcagtcatgaatacatttttagccatttacctaaggaaaaaggcagtttttctaggtaccatgaaggaagattgaccctgttggtatgcctgtgggggtgggatgtgagtgggactgataaactgatacttttggttcgtatgtacatactggaagaatcttcataataaatgagactacacaacaataaaaaaaaaaaaaaaaaactcgagggggggccc

SEQ ID NO: 1507 - DNA, 849 bp, Homo sapiens
ggcacgaggtccatggcaacctctttcctgaagttagggtgtatgccatccaggcctgattgtccaaaacacgtatctgctttctccatgccattgaacatccttccatggcctccattttatatggctagaggatgtttccttgcatagatgtattaaaatgtatttagttatcttctcttgctgccctttaggtgtattcccttttttctctcatgtgaacatttttcacagatatccttgtagcttacttaaccttcaggcacataccatgttgcatagatcataatttcctaataattagtgttattccttggtcagatggcatgcaaaattataagactttaaatgagtcttatataccactacttacagtcacttatgatattataatcacttatgataccaccagtgatttttatttaattatctgcttgttagtacaagcttgttatgtaacatatttgcttgaagttattttacttctaatatatgctttggttgttaagtaaaggagtttcttgaaatgcaaaaatttcactatttatacttaaatgaggaaacagccatttaaaactagagtgctgatggatggtagttttttaagttggagaaaacaaatctgcatttagtgatccagtgaaacaagacagttcatggggatcaatactcagctgagaccgggtgcggtggcgtatgcctgtagtcccagcaatctgagaggccaaggcaggaggattgcttttgcctgggatatcgaggctgcagtgagctgtgatagcgccactgcactccagcctgggtgacagagtgagagcctgtctccaaaaaaaaaaaaaaaaaaaaaaa

SEQ ID NO: 1508 - DNA, 762 bp, Homo sapiens
ggcacgaggattcctgttggctctaaccctcaattacctaatcttatgctttaacacataactgcattggatgtgagagtaacgtaccgtatggtcattgttctatatattaacattgaacactgctgcgattgctcaaggacattttatgttacggctttaaagcaaaggcatgattattagaaactatttaagcttttttctttgaaaaacaagctccttttacagaatataaacaacagtagtgcctgtggtttagcccaccaatcttgatgactaaaagtagctgatgcattgtgcatatgatgcttgagatggtttttgcaaaagcagaaatcgctgcaaggtaatcacaatagataaaagtggtattttaaacctttgaaataaatggatgtaactgtaccttggtacagcttttcacttgtttagtttttaaacgttagtataatctgaataaataaaatgttgccaaattcaatgtagaaagaatgtgacaacacaccttgggtagttctgcttgtgtttttgcatattgtaaaagcagtgtcacagctaaaaagaaagaaatcgtttctaacagtaaattattgtgctttagttgctagtttgtactgagagttgacctctccctgtgcagttttttgttctaaacttgtataaataacaattgtgtaatgtgtctccctcctacattgtaacaattgcttcagcctacgttataaataaagaaccactagattaaaaaaaaaaaaaaaaaaa

SEQ ID NO: 1509 - DNA, 778 bp, Homo sapiens
ggcacgagatttcttgaatgaatttcacatttgtaactatgattttggcagaatagaagattggctcatcagtgaagcgcagtatcttagctctagattctattttcatgcatcacagaagtgctatacggttaggtctgtttgtgcctcagtcaagaactaagaaatagtatgaattgtaagtcaagatgggcaactcagatggagcagcttagtctcacagtttgcttgtctatttattttatttagtgccaaatgtattccattttaaaagtaagccagagtgagtcaaggcatatacacactttctcacaaaacttcctaaacagatttgggggtttaatatgtccaactcctcatgaaatatattcaatccacttaaatatattccatctttttaacataaaatgtaaagcttagcacccatcattaatttatgtctctgttttatccagtggttaaaaaaggattctgcctctttagtcctcactgttaaataaaacccaatcatagtaagtgattaactagcaaaaagtaaagctatttatagcaaatttctagatcattagaaaagcactggtagttgtacaatatcagtgttgactttgaacttctttaacgagatcatgaattcttttcccttagccaaaacatgaaatatttaacctagttgtctctaaaagttttgtaatcatgagttagatatatgtcatctcctattcattgcttttatgtgatcaataaatcttttacaaacccaaaaaaaaaaaaaaaaaaa

SEQ ID NO: 1510 - DNA, 1621 bp, Homo sapiens
aaaaagaccctggcattttttcacatacttgaatccctaaatgcacctgtctttcactttttgagacagactgaatatatctaaaatttccagcaataaaaaaaaaagcatttaacttgcaccaagcaagaaaatataaatacagttaactgcattaagataatcacgttaaaattgttactatgcagcacagaacttcattcttatagtattcttgggttcaacctttgaatcaattttaccactgattaaataaatgactcaaagacatctgtaagtcatgctgctgtgttttgaaagtctttaactaaattaagattgcagaatgatagtgattattcaattagattttaagtaaggattgtgatattagaggctggaaatccttattttttaaaaaatcagataggcataaatagttaaatcactttcattctccccaaacctgtagttacagaaaaagttttatgctagaggtgggatgccaagttttcactatccatgaagcagcgctgcatgtcactaggtaacacagatccatccagatggtgtttacatttgatttatttgggatcttattgacatcaggtatacttggaagacatttcttttattcttcagcgtatgaatttaaagctattttttgtaaatatttctaatcagcgataatttctacctatgttctcaaccaacttagccagtttgtttttcagagcctgtagtcttattggaaatctattttatcagtgtgctttattgagtgtggattttgcatacgttcaaaacattaaccacaaaatacagcaagtgcacctatattcaccattaacttatatcccaagtccattttttcctgtacactacaaacaaaagatatattagagacttttgaaaaatgctgaaatactttgcttcagaattggaatgtttatattatgtagaaatcttcaaaggtagcattattaaatagcaaagaataattagaacccacatatctttttttgtgtggatggggaaaatgttttaaaatccagttatttaatatgagtttgagagagaaaattgttttttaaaaatatatgtgcattgaaatgatggcaatgcttatagtatgatcaagtatgaaaggaactttaaattcttatatttacttttctctcagtaaattgttaaattttcactcagcaaaagattggcatttgttaagtgttctatatttagtactaaaatcacagtcatgaaatcatagtcataaaatggtcttcacacagcagtcatccgtgtcatttatcattttgtaatattaaattatggcaattttatttcaaactaaagtttgaacaccggaaagtcattactcagtgatttgtaatttgggacttggattatttatctagagatgtttgtatattttgtcagtaactaatactgcgctgccatcatggtgactgtcatggttctacagaaatgccctccatgtgtccctctaatgttgcatgtttcagtgggttggaagttttgtatatttattgtattaacacagagtgtcataaaataaaatgctgtttactggaaaaaaaaaaaaaaaaaaaaaaaaaaaaaaaaaaaaaaaaaaaaaaaa

SEQ ID NO: 1511 - DNA, 962 bp, Homo sapiens
ggcacgagtgaccacccagccctccggctgctgatgtcatgagtaacaccactgtgcccaatgccccccaggccaacagcgactccatggtgggctatgtgttggggcccttcttcctcatcaccctggtcggggtggtggtggctgtggtaaggagccctcatatacacacagacacccacagctttgctaaggcaggggctgggtgggcctggtccagtctgcacagagtccccactgtcctgttaagggagtgaagggtgtggaggtgggcctctctctgcctgtgggccttcctgggctcagcagcccccacagtgctgtgtctctgttgcaggtaatgtatgtacagaagaaaaagcgggtggaccggctgcgccatcacctgctccccatgtacagctatgacccagctgaggaactgcatgaggctgagcaggagctgctctctgacatgggagaccccaaggtggtacatggctggcagagtggctaccagcacaagcggatgccactgctggatgtcaagacgtgacctgacccccttgccccacccttcagagcctggggtcctggactgcctggggccctgccatctgcttcccctgctgtcacctggctccccctgctgggtgctgggtctccatttctccctccacccaccctcagcagcatctgcttcccatgccctcaccatcacctcactgcccccaggccttctgccctttgtgggtgttgagctcaccgcccacccacaggcactcatgggaagaggctttccttctgggatggcggcggctggtagacacctttgctttctctagccctcctgggctgggcttgggcacaaatccccaggcaggctttggagttgtttccatggtgatggggccagatgtatagtattcagtatatattttgtaaataaaatgttttgtggcaaaaaaaaaaaaaaaaaaaaa

SEQ ID NO: 1512 - DNA, 841 bp, Homo sapiens
ggcacgagctcgtgccgaattatataggagccctgcagtcctaaccacaggagtggggccagggactttttgtgcttggttaatttggggggtcatggaggtcagaggtgagatgcagcctgtccccagagagccccatcctccctctgctcccgggcatgggcacacaggacaagtgtgagtgtgttgctaggcagctggacatgacatggctgctctggcagcttgtgccacctcgtcaggcaccgtatgtgttcctgcctgcctggggagtccaagagaggaagggggcaagggagccctggagaatgtgcatcttcccctttccttagccttggcccacctcgccacacgatctcagtcaagggcctctcctcaccccatgggcttctatctcagccttttccactttggcaaccctgggggtgagagtgaaggcctcaagatgcctgtcctgtaggtatctctggtgagcaaggccggggacatgttacgggacaagctacaggctgatttgtctcttcatagtgtagattgcagagtgggacaaatgttgggctcctcttcctcccttatggaggtagaatttgtgtgtgtcaatgcctgcacctgagtgttcatcctgatgggcttttacatgtgtgtatacccatgtaactactgctctgatcatgttatagaataagggtatccaatctttttgcttccctgggccacattggaagaagaattttcttgggccacacctaaaatacgctaacactaatgataactggtgagctaaataaaacaagcaaaaataaaaataaaaaataaagtcacaaaaaaaaaaaaaaaaaaa

SEQ ID NO: 1513 - DNA, 458 bp, Homo sapiens
ggcacgagtatttttgtaactttaaggtctaaatgactaaacttcaaagtaagattttgtcagaataaattgagaccattaatctaatataatacttgttcatgagcactgaaatcctgaagaggagagatttggttataaattaaaaaggttgggtgatcttaagtgcctcagttaatgcacgtacagtattcatttggttggttgtactacctctcagaagtaaaatttgtcaccttatggaatgagagtttttgggtttgggggttgtttttttgttgttgcttggtttggtatttttggttttgtgtgtatttgtataaattttctgtataattagcccaggctgatgtaactataaaaattagttgaaaaaaaaaatattgtttccttaatggaattctcacttcatttgaatataagattttggatgaaaaaaaaaaaaaaaaaaaaaaaaa

SEQ ID NO: 1514 - DNA, 1537 bp, Homo sapiens
  misc_feature (1424)..(1424): n equals a,t,g, or c
  misc_feature (1426)..(1426): n equals a,t,g, or c
  misc_feature (1433)..(1433): n equals a,t,g, or c
  misc_feature (1440)..(1440): n equals a,t,g, or c
  misc_feature (1476)..(1476): n equals a,t,g, or c
gcgtccgagacaccacccaaagagagcatttgctgctgcttcccagaactgtccaacaataccttagcaacaccaagagttgggccctagatgggcccagcacattcacaggtcacacccacttccctgcaaaacccaccccctcccagcctcctcctgactctaagccctcctcttcctctacctctccagtgtatgtctgtcaccccccatttcaccagagcgtccttaggggctgggggtgggtttgttaatggggtggaggcaatgatgggttggaggatcttggctataggggctgtgctgactgcagcaggtaggttgggtttccctcttccttccctaatcttggttctctaccctcctttccactcctcacctgattctctctcttcctcctccttatatctgtgaggcagaaggcatctgaagctcatattagcccccattgggtgggaattaggagtgggtagttaactcagggagacttgagataccctggaaaaaatgctattgagatgtcctgacattaggcagggtggatggaacaagaaggagcaagaaaggaacctcaggcagatgttaggacatggacttgatcatgtggcctgggagtttagaaatggggagagacatcctcctagatcagatcgtgggctcagtaggcatgttgattcccagggagaggtgccaggaacagcatggtaaagaatgtactcttcacagctcacatccccaggttgctgatgccactcactccccctctcctgccatcgagtggccttgccggacacatcaccctacctaaaaagccagtaaatgagaacctgtcagctatagccatcatttctgagatgcgattttctttgggattgagctgcagtgggcagtggctccttacactgtaattttaattctctgcctgcccagcctctctgtcaaagtagctggtgatctataaagatgctaaaaggcaccaggggactttgccatttaaaggactcctgcagtgaattcttttgtaaaatgaatatggcaccctaatttatccactttctaaatttgggtccatgggggtgtccagggcatgcttatgtgctgtcaccagcagacaaacagagggaatggaatctgggggttccttccctgctctcccgccatactcaggataccctaccataagtgatttcctctcactgacttgcagaaaatgtgtgagatacccagcaagctaagaaggcagttttgctgggtatctcatacccaaggctggggtttgggtgatctgagaggttagctccttgatcctaggatggaagggagagcttatatagaagcttttacttggaaggttttgtatcctaaggtcagacatagctatattaccaagcctaaatgccatgtggcccaggaaataatttggncntttgttntaaaccncttgtggtaggtattggtctctctgcaactcagccnttaattagaaattagactgagccgaataaaaaaaaaaaaaaaaaaaaaaaaaaaaaaaaaa

SEQ ID NO: 1515 - DNA, 519 bp, Homo sapiens
ccacgcgtccgcacgtggttagtggcatctatattggacagggcagatctagagagaatcctgtatctaacaattttaatttttttccctttatgctgttattccttacctagagaaacaatttccctccaaagttcctttgaggggtctgtttaggccaggccaacacaagtgacctatgtggattttagcatcctttttttgaaatttgaggttttatgaagcttgagtttttctggatatttttagtaatttgctggtgtgtacttagctcagatacttgattgcaactgtgttgggtcaactatttctaatgggacttttccatttgcatgtacagtcactggaaactgctgggcagagaaactctaaaaggtagttggggcacactttttccacctgtcagattggtgaagaattggtgaggctgtggggaaaatggcattctcccacttttgatggatatgtatccaaataaaagtcattcccatgctttctttcaaaaaaaaaaaaaaaagg

SEQ ID NO: 1516 - DNA, 1734 bp, Homo sapiens
  misc_feature (191)..(191): n equals a,t,g, or c
gctgtgttgttgagtgcagagtctagggccargtggaatgtgtcatcttgtgargaaatgtgtttgtgttgttttttacttaaaaattgtcagcgtagtggagaggggaatgacagaagtaggaaggcaccccaccattgtgtagtgaggcagtatacagagaggtaaggcagccggggcagatggctgcngccctgcacggggcttttttctggatctggttgcacgtgctgtgttctgagaggcgaggttagagcccagatcatctctattcatgtgacacagccattcccaaaaggacttagagcagagggaacttgacccccatcttaactgtctcttttgaggatgagcagagttctcaggtgtgcccccagcctggtttatataaatgtagctttaatctaggtgtgagcagatgtctgttggggatctctggacaccaggcctactctggagtcagagaggggacccgccatttggctctctggtacatgtggacagtgtctgctcctctacttgtcatggctgaaagtactgcagctgtcatgacattctctggtgtagaagaaagaacttcccagagggtttcctggcactgcggaaagacccagaatgagggargccctkggacccacagaggcccctgcaggcatttcagcacgcctccctccgctctcacttgttcctcagttctctcagaaatggagagaaatgacggtccttattccttctttttttacaggtgggcagatggaagagggtcgatgttttgctcaggatcacaaacagaggtcctgaggctccctctcctcactaggatccaccctsccccaaagcaaattttccttttgcctgttcactctgtgaagagggctccttgccaagtcacccagcatcccctcccctcctcctcctctccttccagcccaccctcatctcaggcaatcacatatacaggtaacaggtgttctcagcctcatgaaaaacccatgctagctgtgacattgaattgctgggctggcagacatctgcggaggagcaaaaggcatatttgctwcttmctgcctctgcgcggtgccagaragctaaagtcatggtctaacagggggagcatgctgtctgagagaatgktctgctagctttyagatgcacaggkttataaaaataccaccctgscatttaaaacatgtttaaaatgttgatagaaaacaatgaatcgtatccttagaaagacagaccctagtgaaagaaacactaactcacacaggtagggtctagcttccataacatttaagtttattctatggaattgttcattggtgctcctgttttagttacttctccatagacttgtttttcccttgactaatcaatgccatctggtgccaggtggtatcctgggtgtagcacagtgacagggtggagactgccctggccgtggcatgtgcagggggcgttcttgagcctgtcttctgggagccctttcttttcctttttccctcctttaggttgaagacttcatcattccctgcgggcagtttctctgtttttcctattttcttttcctcaagaaaaatgtaatttttaagtaacagaattgktttctgtgttrcagcatttaagttgctgagttgagaaatcatggctgagtttgccaagtaaagtttttaaagcaaaaaaaaaaaaaaaaaaaaaaaaaaaaaaaaaaaaaaaaaaaaaaagggcggccgc

SEQ ID NO: 1517 - DNA, 1908 bp, Homo sapiens
  misc_feature (1868)..(1868): n equals a,t,g, or c
  misc_feature (1887)..(1887): n equals a,t,g, or c
  misc_feature (1904)..(1904): n equals a,t,g, or c
cttttcttgttcctttcgtagcctgcattttccagtgttatttgtacctgttctacagtccagccaggactatgaaggtggtgcttatgctgctctttatttgcctgggcaacatgtacctgcacgggctgaggaacctctggcaaatccttttccacataggagtggcttttctgtcttcatatcagatactaacaaggcagcttcaggagaagcagtctgactgtggagtatgaggatgacactgtgatgaatggattctttgattttcttttgaggatcaatctatgtttctctttctgcttctctactttacactccagtttccatccttttcagccaactggactgaaaaaccaggaattggggatgttaaacagttgcagtggaagtcatgaggttgcttgatacccagccttggttctgtgccaagcattactgcaggatctccagccagttcagcacgtttacctaggacagctggatctgggggctcatccasaaagagctttattggaagagagaaaggaaatattttggtcttttaagttgaatgatacagtaaaccacttgattcaataacactggttttagtcattgagagttgtctccaaggaaccactttaaaatccaaatcagctttcagtctaaacataacttgattagttttttttttcagagggtcagtacaggatgaattaaaaacctaaaaatatggttcataaatgtaagctagataaattttgtttacattttttcaatatcttaggttcgatatacctttggaatatttaattatattttggatataaattggacttcatttagggtgagggcaaacttaagctgagaaaatggttaagaaatctgagtttatttaatttatatgtaaccttttatagtggtgggactgtttgggtacagagatgttttatatttatttgcagggtatatccgaatattttaaaaattaattgaataaccagtacttctagatgataagtttgtcagcatgagcagaaatgagaatttcaggattacttacaattgaccacaacctggagtaggtgaatgaacatggattcagtggcactttacagatccgcttgggaggggctgctgtcatcagccttttcagtagagctgagtgcctgttgttttaatgatgatgactactgtaccctgtgtacctgttcccagagcgcctccaaaattaattactcctctgcacctttcccagtcatcttaattagcttgagggcctcattttttatgaacaagagttaagtatctgttaactttttaaagcttgatagagatataattaacacatactctggaaagttactctctttcactgtcaaaaaattgattgatcacagttttccaaaatatggttctggataagatcccttaggtttcccgaaatttcagcctggcttgttttgtaccacgcaggaggtcattttgggagtttgctctttggattgttcttggtagaagtctggaatctgaatagttcaaccacagttgcatggaacactttgagtgttcaactgcattatgtggtcttgataaatttttaaaaatcctattttgatagtttttaaaagtggaaaaccattacaagagttgagtggatagggaatgtaagaatgtagttttagaaaaattcaattatatttggttatcactggtattgtattgttattgagctaccttgttatcattttaagaaaaataagtttatatactgggaactatgttgggaaaatgttgccatagtaactttattttttataatagaattttctatttttgaccaaacattaaaatatttgggatatgggccaggcmtgrtggcctcngcccgtatttcccagcacnttgggaagggccaagcnggtt

SEQ ID NO: 1518 - DNA, 513 bp, Homo sapiens
ccacgcgtccgcccccctgtcttcccccacatctttgccagaggtgtgacatggtcagggggcccatctgctactctttcccaccagctcccctgttccagttctggttgctgttagtttccctgaggtatttgcaaccaccatggctgggtaaccaccgatcagcacagctgtccccttggtctcctgtatcccagtcactagtcctccctggtccaccccaccctcatcctcaggagccacagccatttcttagagggtttcaaaaggacagcctttggcgccttttccttctaacctttgagtccagccctttccagttttcattcactcgaagtaactgcactcaagctgtgctcaaaatcggcaacgcatttatttacaccaagcccttcccataaaacacaactgctgaagaaaatagcagacgtttcccctctctctaactctgggtatcccacagatgcaaaagggagaataaacctgaatattattaccaaaaaaaaaaaaaaa

SEQ ID NO: 1519 - DNA, 1030 bp, Homo sapiens
ggataaaattcacacataagaaaaaatgcatagatctgaaatgtgtcactagagagtttctggcaaatgtgaatacctttgtccccagcacctaaggtagcctgaagagcaagtctctccccaaaacatgcgtctttttctatgcctgtggtcaaatcctgcatggggaaaggtttcgatttctgacactatagatgtattttattctgctttgaactttatataaatggaatcaaacattatagactttttttggtaaggggctacttttctatttttgaggttaattcatgctagctaatgtataaaattagatcaacatattgtcgtttattcaattcatagacagactgtgatatgaaccaccaaaattttcatgtacatggaaagagagagagagaaagagaggaagcagagatattttatatctgagtcagtccattaagtaaataaatgacaatattttcatttatttttatgtcagtggactttaaatttgtgtccagtttatgaatattatatgcagagctgttacaaatatcttagtgtaagttttctgatgttctawttttattgagaaaatatgaagtatgtatttctttattctaagagtaagtttaatttttttcagtggtattgaggcataattgraatatttttataatatatatgtttaaggtgcaccaattgatgttttgatattgtattagtccattctaacactgctataaagaaatgcctgaggctgaggtgggcggatcacgaggtcaggagatcgagaccatcctggctaacacggtgaaaccccgtctctactaaaaatacaaaaagttagctgggcgtggtggcaggtgcctgtagtcccagtactccggaggctgaggcaggagaatggcgtgaacctgggaggtggagcttgcagtgagctgagattgcaccactgcactccactccagcctgggcgacagagcgaaactctgtcaaaaaaaaaaaaaaaaaaaaaaaaaaaaaaaaaaaaaagggcggccgc

SEQ ID NO: 1520 - DNA, 1063 bp, Homo sapiens
ccacgcgtccgaagaaagtaactataaccggttctgaactattaggtgaagagatgcataatcttatgctaatactcataagtttgttcatccttcagattagcaaagataagggaattttttgttttgttttaatcttggcaagactgcgaggaactaggcattcttatacattgcttggtatgaatagataattgaaaatctctggaggtacgtttgactattctaggaatttcttaaggctgtcttcacatgtatgcagaatgacatgtaggagaaatttttggctgggtgtgcttgctcacgcctgtctcaaaataaaaataagccgggcatggtgacatgtgcctcaaaaaaacaaaaacaaaaaaggtcggggggtcaggcacggtggctcatgccttgtaatcccaacaactttgggaggccgaggcaggtggatcacctgaggtcaggagtttgaaaccagcctggccaacgtggagaaatcccatctctattaaaaatacaaaaattaggcgggtgcctgtagtcccagctactcgggaggctgaggcacaaaaatcacttgaacccaggaggtggaggttgcagtgagccgagagatcacgccattgcaccccagactggacaacagagcaagactccatctcaaaaaaaaggtctttataggaagtctgtgatgttgtttttcataactccaacccgcccccaaaatcagggtgaatacccagaaaacaccttgagaagggagtatgtggctggactcagtggctcacacctgtaatcctaacactgcactgcgaggctggaggtgggcagatcacttgaggtgaggaatttgagaccagcctggccaacgtggtgaaaccccgtctctactaaaaatacaaaaaaaaaatcagccaagcgtggtgccaggcctgtagtcccagctgctggggaggctcaggccggagaatcgcttgaacccaggaggcggaggttgcagtgagccgagatcgctccactgcactccagcctgggcgacagggcaagactgcgtctcaaaaaaaaaaaaaaa

SEQ ID NO: 1521 - DNA, 1749 bp, Homo sapiens
ccacgcgtccgctttgtttctggatgttttcagaggatcagagctctgcacaggatctttatgcttgggtgaattcttgtgtttggtttcacagatgcatatattagtaggataatttttggtgttgcagcttaggctgtgatccagtagatggtgtggaagagtgatggccaatagctaggctgatagccagtcacactactcttttgtatctcctcatgttggcaggtgtgctctgcagtcgggggtggagacaaatggccccttcaccaggtctgctcatgagccttggggagacccttttgatcaccacttatgtgcccgtgtttcttttgttaggtgttccaggatgcaggccccctctgggaaaggctgtaacaggaagatgttcttcaacctttctggattgaccctgtggagggaggcatagcttgttcccaccctggcccgggaacccatttgtctcaccccttgccacactctgagggtgggggatcctccctcactcaagtgccaaccacagatcctggctttgtattcctgagctgctgtactgtggccctggggcaccagaacatcccatggctctgtctgaatccatggttggattctggctgcactggggattctatgtgctccagatcaccagaaagtactcaggtggagcaatgcgctcaggctgggccaaggagctgtgctgtgcacctgctcctgcaggtggctaggcatgggccctgggaaaggctacatgtatgaagcttgcagaacagatgtgcatcattcccagggaagccagccctgctctctcctggctggaaggtcagctggggccagcgcctcccagaagggaatagaatcctgggggatgaccatctgtggctgctctctgctggactgtcctgtgcacacaaactcctcagctccatgctgtctgaaggcctgtctttgcctgttccctggggagatccccctccagctcccacgtccttgtgtgatgcagggtcccctgtagctagaatcccagagctggtggcaagagtgaggcatccttcagttccctcactcactgctttcccaggagctgtttgggccaggaactagcctaatagcgtttgggtaccctgtcagggttcccagcttttccctttcagcctcagcttcagcatcacttctacccacccctggctttttctttttgaagagctacccaaattatggtggcttacttgatagtttggtctctctcagtgggagcaacacatcctggctgcatgtagtcggccatcttgtttccgcctcctgctgtctttgaggaatgctcagccaccatccagctgggccacatctgtctgtcttagcagcagcagcagcagcagcagcagcagcaggaggaggaagacagcaatgatgaggctgcctaccgagcattcatgaggacctcctatgagaagaacccaaagctgttagcatccctggctgctgaataggtctactgtgcctggcaccccaagcagccctccttacagccttgcagccaagcctcttccagcctccctcctctccactgcatactaagtagatttcttcaaggtcaggcatagtaaattgttggagtgggattgacacctaggtctacttaggctgtaaagctacagcatgtaaccacgacatgatatgctatcatttctaaaatagaataaatttaaggaaactaaatattcaattcttgaagatagaaaaaaaaaaaaa

SEQ ID NO: 1522 - DNA, 138 bp, Homo sapiens
cccacgcgtccggggagatgaagggctgggatggaaagagctttattctcagtgcctcatcttttggttgttttggattttacaacatgtgcatgcattgcctacacaaacaaagacactaatttgaaaaaaaaaaaa

SEQ ID NO: 1523 - DNA, 1985 bp, Homo sapiens
  misc_feature (310)..(310): n equals a,t,g, or c
tacttactttgcaaagctcttttacataccttgtgttatttgattccaacaactcagagcggtccagtaggatggataatgttcttattttacagatgaggaaactgagatacaggaaggtgagttacagaactctggctactgttctgctcatctcccagccccgtgaattttcatctctctcttcccccagtttatttatggagattcttagttcctgttcagattgtgatgagatccaattcatggaagatggatcctggtgcccaatgaaacccaagaaggaggcatctgaggtttgccccccgcnagtactgggctggatggcctccagtacagcccagtccaggggggagatccatcagagaataagaagaaggtcgaagttattgacttgacaatagaaagctcatcagatgaggaggatctgccccctaccaagaagcactgttctgtcacctcagctgccatcccggccctacctggaagcaaaggagtcctgacatctggccaccagccatcctcggtgctaaggagccctgctatgggcacgttgggtggggatttcctgtccagtctcccactacatgagtacccacctgccttcccactgggagccgacatccaaggtttagatttattttcatttcttcagacagagagtcagcactatgggccctctgtcatcacctcactagatgaacaggatgcccttggccacttcttccagtaccgagggaccccttctcactttctgggcccactggcccccacgctggggagctcccactgcagcgccactccggcgccccctcctggccgtgtcagcagcattgtggcccctgggggggccttgagggaggggcatggaggacccctgccctcaggtccctctttgactggctgtcggtcagacatcatttccctggactgagttccctggattatggaaacttcgctgtcccccaacactgagcaagtatgctgtggagtcccaaccccagctactctgatccctctgggggctctggccaagggccagacagaccttcacagatgcctacttttggcctcatctctgcctgacaaggcagcacccaaagggttaatatttaacctctttttaaggacactggggtctgtttctgggaaatgttctttagatggtggcacattcctttgggtatgttaacctaggcagtgggaggcaaatgggatggtatgtgagctaggagaagggctgaaccctcagccttgactatgtctagagcctcttggggaaggggcacctctcttgaaccccaaatgctctctcttcttattacccaaacccatggctctatttcttcttcacatccattgtctcttcatgtctattccattcccttcggccaaacagacaggtggaaaaactgagacaggcagtttcagagatggacagagaactttattttggattgtggatgtggacttttttgtacataaataagaaaaaccaaaatactccaaagatgacttcccctgcctcctactccagtatgacagaggaggatgtaaggccttagccatgatctgcaggggtctgggagtcaggcccggcctattgcttgggtctctctctatttatatatctaagttcacagtgtttcttattcccccctaagcttctagaggctcatggccctgtagttaggcctggctcattctgcacctttccagggaggtggaaggaccctgtgccctccttcccaatcttctttttcaggctcgccaaggcctaggacctatgttgtaattttactttttatttctaaagttgtagtgaagctctcacccataataaaggttgtgaatgttcaaaaaaaaaaaaaaaaaaaaaaaaaaaaaaaaaaaaaaaaaaaaaaaaaaaaaaaaaaaaaaaaaaaaaaaaaaaaaaaaaaaaaaaaaaaaaaaaaaaaaaaaaaaaaaaaaaaaaaaaaaaaaaa

SEQ ID NO: 1524 - DNA, 1576 bp, Homo sapiens
gtcgacccacgcgtccgcgacctatcacagacaatggaattcgtcagtggtggtaagactgaaatcctgatgcttttcacacttcttgtctcttgctatgtatttctgcctctagccttgccatgttttgccttttttttttctttttggccaattcctttttatatgtgcccacaacagaggtggggagacacggagcaccctgggtccttcccagcgctgctgggcaggccccgtctccaggccccagctgttgaaactttgaagggcaacaaacaaccatccacactgccggaccctaggctgttcagggaggcagctcatttccaccccggccccaggacacccagcctgtgccccacaaggatctctctaaatgggagggattgaggctacttttctgccaagccctattaagtagtaatgtggggaaacccactgtgtcagtgcaggaagccctagacaaatgttttcaaataaatttcactgcccagcctgcacagatttccatttgaagtacttcccatccaccctgacacccaaaggggtttttttgttttgttttgtttttgagacagggtcttgctttgttgcccaggctggagtgcagtgacgtggtcatagctcactgcagcctcaacctcctgggctcaagtgaccctcctgcctcagcctcccaaagttctgagatgataggcatgagccattgtgcctagcctattttgatttttttcttagagtcaaggtcttgctctgttgcccaggctgatcttggacttgcgagccaccatgcctggctgggttttttaaaaatagaatctcactgatagcctgcaagaaacagatgcagtgcctgcttccgtatcagtccaaggagccctcgtgtttgccacctttacctttgaacctccccctgcctccctgcctgtgtccgcttttgcagctcaatgcagccatgacaaggaaagaaaagacaaaggaaggccagagagccgcgcagttctctgcaggtgcagatgcaggcagtggaggtggcctgagcaggcagaaggacaccaagcgccctatgttgcttgtcattcatgacgtggtcttggagcttctgactagttcagactgccacgccaaccccagaaaataccccacatgccagaaaagtgaagtcctaggtgtttccatctatgtttcaatctgtccatctaccaggcctcgcgataaaaacaaaacaaaaaaacgctgccaggttttagaagcagttctggtctcaaaaccatcaggatcctgccaccagggttcttttgaaatagtaccacatgtaaaagggaatttggctttcacttcatctaatcactgaattgtcaggctttgattgataattgtagaaataagtagccttctgttgtgggaataagttataatcagtattcatctctttgttttttgtcactcttttctctctaattgtgtcatttgtactgtttgaaaaatatttcttctataaaattaaactaacctgccttaagaaaaaaaaaaaaaaaaaaaaaaaaaaaaaaaaaaaaaaaaaaaaaaaaagggc

SEQ ID NO: 1525 - DNA, 2238 bp, Homo sapiens
  misc_feature (393)..(393): n equals a,t,g, or c
tttttcaaaagcagagcgtagaattaattgtagcagctgccccccccacccaccacgagcagcgcccccccaacactattttaataaaccattaaaaaaaacacattttcctgctggctggccacattgagagtgctttgtgaaaagaaaaaacaaagacattcacaaatcagataaaactggagaatgacatttgtctgtaaatggcttcttggtctggaaatggcgtggtttcttttttttttttttttttttttgtcctcctcaaggtgggaggggggattgagagtgctctaaggagacttttcctccaggtgggaagagataaaaagacattaattagttgtttatcaagtgacatttagttgtttggttttgggttttctttttttnattgcgatttttcctctgattaaaaaaataataataaaataaaaaaaggttaactataaggagatggcctttcctccttttttttcttaaggtgctgttttgggggaaaaaaatgtaatgaaatgaccaaaagaattacacagcattaattaaaaatggaagttttccacttccttgataatttggctatctgaataaatttgtgaatttgctaggttaagacctagttcgtggtcacatttcaacaaaacagcttgagtataaagaaaataataaaaggctgttcttatttattttcctttggtggcttttggtttgctctttttgcataagtcatgactttgttctcctgggtccagatttataaaagcagaaaattactaattaagtcaaaataagtgtctttggtgtttatgcatttgcaatttcagtaattaaatggtacatgtgttgctgtcttgcctaaaacttttaaaggcagaattatgctgttgggatattagtatgcgtataacttgatttcaaagtataaatctggaaaagtctagaatcttttctgtgaatgctatctcagtactactttaagtcaagtgtgatgctaatgatatcttaaaatttccaacaccttttgtgcagtgatcacaaagtctccacttaatttgagactgttactcagaacacgccttgcgtcacgggggctaatctaagtgtcctagtctatatgactacattacatcatgatgtattgattgcctctggcctaggaatctgcagcttaagccagtgacacaayattttgcatttttaaatggtgattctcaccaaataatgcctccccacaaaagaggaaacctaataatgccccaaatcctctttttactccatcttaatgacataaaaattaagtgaattagagaactacaatgatcttaaaataatttttcagscacatttcataaatgtggaaactgaggcacggatctgtttttgcctatgaaagataggtcctgtaactgttacacagtttaacacttctgaaattagaatattagagatcctgctaaatattacgtattgtttccttggcctctcttaatagtgccatttatatttttaatttaccagagttaggctcattaagatagtgtttgctttgaaatcaatgtttctgtggaaactaattttaacttttacagatattgattacgggcttgtgaaaaggcaagtaaaggaggaatgctgtgctatctgggcattaaaacaaaacaatacaattaaaagttaaaaaraaaraaaaaggtaataacagatttgtgtggaaggarggcaaaaaaacttcmcacgtggattatctgttggagaatgtgcattgcaaaargatgcaaatagcaatccgccctctagctttgatggaaaggtgtttttcccatgaaccgtaggggatttttaccaagtgaacgtggtttgaaatggagggcatgttgttcaaccctgtggtttgggaagggctgggacttttcaagttaggtcttcccaggaggagttccttttgagaaagttggtccaaggcactttacggtgtttgccggttcccaagcgatgggccaggactgttggcttaaaggtgtttccaagtgcgattttgggccccttcccgcaattgtcccggggtttctttagagatgttggaagggtggtttggaaaaccctgggggttttccggggccccctaacctttatggggaccccccgtggaccgtggtgcggttcccgcaatgttttgtggggtcttgttccgagtccccccttaaaaaaaactttgtcgcgcacccggaagggtacggg

SEQ ID NO: 1526 - DNA, 1126 bp, Homo sapiens
acgcgtccgcggacgctggtgttgcatgtactcaatacatttactccaagattcttctgacaagggacacttttagccaattccccaatagctctcatcattataggattaaaaaactaggcctcctgtgaatttaaaaatagattaaaatactccctggtactcagatgtgttcccactagctaattccagcattggtcaacatggatcttgtttgaagctaacccagtttaaatattccttttgcaaaacagatttttagagctatgccttgctaaagattcttccaaatagtaatctctcctggcacaggagctaaccactgcccaggtctctaggctcatctcctgctgtacactccacattcactcttccttccattagcactacttgcagttccccaaacatggcatgcctctatttttgcctgcatacttcctgtgaatgctatttctttatctagaagattctctccccacccccacctgccttatctggcatcttcagagattcctgtgtctctttgagatccaatttaattgatagttcctttaggaatcattcctatacttcccaaactaagataaatgccccttcttatgcccatatccatctgggattttgccttccttcatactttatatccaatacaccaaaatctcttgtggctctaccttcaaaatagatccagaatctgatgacttatcatcttctcaactgctaccaccctggtccataccaccatctctagcctacatttctgtgatagcctcctagttgatttattcttacctacttcaacctagcctccacaatctattctctacatgatagccaggatgcccttttaaaatctaagtcaaagtccttcctctactcagaaccacttgagttcccttgtttcactcatagtgaaagtcaacagccttccaatgtgctgcccccctcttaatactcaccaataaattctacttcctgtccaaaaaaaaaaaaaaaaaaaaaaaaaaaaaaaaaaaaaaaaaaaaaaaaaaaaaaaaaaaaaaaaaaaaaaaaaaaaaaaaaaaaaaaaaaaaaaaaaaaaaaaaaaaaaaagggcggccgctctagaggatccctcgaggggccc

SEQ ID NO: 1527 - DNA, 1141 bp, Homo sapiens
  misc_feature (1125)..(1125): n equals a,t,g, or c
ggctatgggcttttctttattttttctttttttcttacctccttttgcagttttcccagatctgcaccttctgaagagcaaatgcaccttcctgggtttgtccaaatgcagatcatttatgctctcttatcacacacccacagaatgccgctctcataccgcaaaagcactggcttgccacattgtcatgtagtctcccagagacctgtctatttctagttgtgttttgtgaggcaggcaggagagtctcctgtgattacttcctctgatccttaaataaatctttctggttgtttttttctggggcgcttttctccgattctcagagggagcacagaccccaagaaaggataagaacttctggtctctcccagcttgtgctcctcagagctcatggtttcctkgcwaccaacaccaaggaaatatcaaaaggatatttaaagaatcataggtgcaaactgattagaagtttggcaaaaagagaggtacctgaagggccaaaaatctgccactttgaaaaccaacacacagggcacttggataggtttctctctgttgccagagtgccaaagaagatttttcagctaaaagaatagccgggctctgatcaagaggacagaataataaaaagggtttgattagaggcaggatataggargaaaaccccaktgtgggtgggtatctagtaaatgaaaggccaggaaggcgatgggsgcctgactttccatctcagctgagcctagggcaaggaagagacttagggacttcctttttttttttttgagacaragtctcgcaccgtcgtacggactggartgcaatggcacaatctcggctcactgcaacctccgcytcccaggttcaagcgattctccttgcctcagcctcccgggtagctgggattacgggctcccaccaccacgccctgctaattttttttgtctttttagtagagatggggttttactatgctggccaggttggtctcaaactcctgacctcgtgatccgcccacctcagcctcccaaagtgctgggattacaggcatgagccactgcgcccggccttagggacttctaataaaagacttagggacttctaataaaaattgaaagaaaaaaaaanaaaaaagggcggccgc

SEQ ID NO: 1528 - DNA, 1580 bp, Homo sapiens
ccgggtcgacccacgcgtccggtagaattattgtataaattatagaaacatatatatagttaaattcaagtctgaatctgacctttatgactataaattgatacgctcaaaatttcaaaattatacttctttgacccacacaatggtagtagcttatgggagagtgtttatgttgtatttaagcttgcttttcaatttttaccaaattaagggaagcaaaaatattaatttataactctaaattattaattctgagtgataaaaaagattgttttgaaatccacaaaatttaatttgttcaacattatggccgctttaaaacatacagtagagttgaagttattttacagtaaacagttatatacccatcaccttgattttactactaacattttaccatacttgttggttaatacctatccttcattaatctttccaaccacccatcaatgcatcttatatctgatgcattttaacataagttaacaatattgaatagccaaaatgccaaatttaaaatatttagaaaaacataggtctattttaaataccctgcaataatggccaaaagtcacatgaattcggtacaagttctagccacatacatatgtatccagaaaacaaaagcaaatcctacatattttatatttcagtcgaatgtatcagccagggtctgatcagaaaaacagaaactactgtgagtggttccaaaagaccaaaatattaccgtaagatttttattgattattttatcttggctgactgtagagtctctcatttttctgttcatttttattaatagaactgaaatattagggggctctaatatttgaaaggaaaataattagagtgctgagttctctgtctttttggccttgaatcctttcctatctccttcctgctttactctgtagagcagcgaaactgatccctgtaggctgtctcactgacacttaagtcaataagaagtctaaaaataatttgatatattgaattaatgcagtcaaagactatatttccaatttaattttgcagactcataagcaatttatcaatcctgctgatacggtttggatctgtgtccccaccaaatctcactttgaaatatattccccaatgttggaagtgggtactggtgggagataattggatcatggggacagatttctcatgaatggtttagtaccatccccttggtgctakttttgcaaaagtgagtgacttatggagatctagtcatttaaaaaagtgtagtacttccctccctctcctctctctctctctctctctctttctcgctcctgttcttgccatgtgacatgcctgctccctctttgtcttccaccatgattggaaacttcctgaagtctccccagaagcagatgttgctatacttcctgtagggcttgcagatccaagagtcacttactcctctttttcttatggattacctcatctccagtatttctttatagcagagcaagaacagcctaatacacctgccaaaccagaataaactgtgcttgtccaataactcctgtatcccgtagcttgaaataaatcaccaaaaaaaaaaaaaa

SEQ ID NO: 1529 - DNA, 2138 bp, Homo sapiens
cccacgcgtccgtacaaaagttatgaatagtgctgtgatgaggaaaactgccagttcttgcccagctagcctgacctgtgactgctatgcaacagataaagtttgtagtatttgcctttcaaggcgtcacaggttgcccctagggcaggtacaccaggattcagagcaccagaggtcttgacaaagtgccccaatcaaactacagcaattgacatgtggtctgcaggtgtcatatttctttctttgcttagtggacgatatccattttataaagcaagtgatgatttaactgctttggcccaaattatgacaattaggggatccagagaaactatccaagctgctaaaacttttgggaaatcaatattatgtagcaaagaagttccagcacaagacttgagaaaactctgtgagagactcaggggtatggattctagcactcccaagttaacaagtgatatacaagggcatgcttctcatcaaccagctatttcagagaagactgaccataaagcttcttgcctcgttcaaacacctccaggacaatactcagggaattcatttaaaaagggggatagtaatagctgtgagcattgttttgatgagtataataccaatttagaaggctggaatgaggtacctgatgaagcttatgacctgcttgataaacttctagatctaaatccagcttcaagaataacagcagaagaagctttgttgcatccattttttaaagatatgagcttgtgataatggatcttcatttaatgtttactgttatgaggtagaataaaaaagaatactttgtaatagccacaagttcttgtttagagaccagagcaggattaataatttattttaacattttagtgtttggtggcacattctaaaatatagattaagaatacttaaaatgcctgggatagttcttgggactaacaacatgatcttctttgagttaaacctacctaagtagattttaggtgggttcctattaggtcagatttttagcttccctaattacctttcactgacatatacagaaaaaggagcagttttagttttaattaattaaaattaacagatgtgatgaggatttaatgaatcaaaagacttaatttgtaattctttaaaattatgagctagtatatttgggggaaactcaacctggtgctggtgctcttaacaattttgtaaataaagaaaataatttccttttctagaggtacatattaggccttttatgaacactaaaacaatgaggaaatgttggtcatggggcaaagtatcacttaaaattgaattcatccatttttaaaaaacacttcatgaaagcattctggtgtgaattgccatttttttcttactggcttctcaattttcttccttctctgcccctacctaaaacattctcctcggaaattacatggtgctgaccacaaattttctggatgttttattaaatattgtacgtgtttacagttgggaatttaaaataatacatacactggttgataaagggaagctgcaggaccaaggtgaagattgatagtccaaatgcttttcttttttgagttgtatattttttcacaccatcttagatataattaggtagctgctgaaaggaaaagtgaatacagaattgacggtattattggagatttttcctctgcgtagagccatccagatctctgtatcctgttttgactaagtcttaggtgggttgggaagacagataatgaagtaggcaaagagaaaaggacccaagatagaggtttatattcagaaatggtatatatcaatgacagcatatcaaacttcctatgggaaaaagtctggtgggtggtcagctgacagatttcccatttagtagtcatagaatacagaaatagtttagggacatgtattcattttgttattttgagcattgataggtcagtatatctacctaatctgtttggtaagtataggatatataaaccattaccattgatctgtcttatgccataatcttaaaaaaaaattgaatgctcttgaatttgtatattcaataaagttatccttttataaaaaaaaaaaaaaaaaaaaaaaaaaaaaaaaaaaaaaaaaaaaaaaaaaaaaaaaaaaaaaaaaaaaaa

SEQ ID NO: 1530 - DNA, 2489 bp, Homo sapiens
  misc_feature (143)..(143): n equals a,t,g, or c
  misc_feature (177)..(177): n equals a,t,g, or c
  misc_feature (179)..(179): n equals a,t,g, or c
  misc_feature (193)..(193): n equals a,t,g, or c
  misc_feature (2378)..(2378): n equals a,t,g, or c
  misc_feature (2486)..(2486): n equals a,t,g, or c
ctcgacctgggggctgcagccgaaacggtaccccggactgggtgatcctggtgggcactggcgcgctcgggctgctgctgctgtttctgctgggaaagggcccccgacgacctggccttgctgaagaatctccggagcgaggnaacagaagaagaagaaccggaaagaaactgtcgngngaagcccaaaccgnatgggcggactgttgaagtggctgagggtgaagctgttcgaacacctcaaagtgtaacagcaaagcagccaccagagattgacaagaaaaatgaaaagtcaaagaaaaataagaagaaatcaaatcagatgctaaagcagtgcaaaacagttcacgccatgatggaaaggaagttgatgaaggagcctgggaaactaaaattagtcacagagagaaacgacagcagcgtaaacgtgataaggtgctgactgattctggttcattggattcaactatccctgggatagaaaataccatcacagttaccaccgagcaacttacaaccgcatcatttcctgttggttccaagaagaataaaggtgattctcatctaaatgttcaagttagcaactttaaatctggaaaaggagattctacacttcaggtttcttcaggattgaatgaaaacctcactgtcaatggaggaggctggaatgaaaagtctgtaaaactctcctcacagatcagtgcaggtgaggagaagtggaactccgtttcacctgcttctgcaggaaagaggaaaactgagccatctgcctggagtcaagacactggagatgctaatacaaatggaaaagactggggaaggagttggagtgaccgttcaatattttctggcattgggtctactgctgagccagtttctcagtctaccacttctgattatcagtgggatgttagccgtaatcaaccctatatcgatgatgaatggtctgggttaaatggtctgtcttctgctgatcccaactctgattggaatgcaccagcagaagagtggggcaattgggtagacgaagaaagagcttcacttctaaagtcccaggaaccaattcctgatgatcaaaaggtctcagatgatgataaagaaaagggagagggagctcttccaactgggaaatccaaaaagaaaaaaaagaaaaagaagaagcaaggtgaagataactctactgcacaggacacagaagaattagaaaaagagattagagaagaccttccagtgaatacctctaaaacccgtccaaaacaggaaaaagctttttccttgaagaccataagcactagtgatccagccgaagtactcgtcaaaaatagccagcctatcaagactcttccacctgctacttctaccgagccatctgtaatcttatcaaaaagtgattctgacaagagctcttcccaagtgccgccaatactacaagagacagataaatccaagtcaaataccaagcaaaatagtgtgcctccttcacagaccaagtctgaaactagctgggaatctcccaaacaaataaaaaagaagaaaaaagccagacgagaaacgtgaaattttttttcctgaattggacatgtgtttgcaaacacttgtcttgaagattatgctgtttatgcaataatttgtgaacatgtacagagttttatataaatttaaaccaatttttaaaacaaaactgcggacaccaccataaaaatggaatcaaaagaaagttaatttatgaaattaagaggtcagcagaatatactcagtgatggaagacacttgggaaagtctttttaatagaacaagaacgatcttaatttaagaatattatcctggtttaacaacagtgccctgtttacaacagattgtgccctatctcatctgcagccgaggaataaaggattctgattagaaagagggttgcctacagattagtaagcaattccttggatcttatgcacagaacttgtaccatttgaatctgttttatgcttaaatcaaagtgctttgatcaaatgcataacctgccatatctttacatatttgttggtagcaatttgtattaaagaaatcacaagtgcaaataaaaagtcatttatcatttgtttaactaaactgtcatggtttagtttacaatttttaaaaagttcttaaaatactgaaaatgcagttgacacttgtgtatggcttatgaagttatttttgatagtcttacattacttgaattgttcaaagtacagtatattttaaattaagaaaagtgaactatatgtatttgttttatacatttaaggcttagactcataaataatgctattgtttatgatttgaaaactttcaggcaaaatccaatttacatttttcccttccctagcaattacttttttnccagctycaactcttcttagttactaatactttgttgactttaaaaatggaatycattcacaaacttttggggaaaaaggatgggggggaagggaaaaacccctaggnggt

SEQ ID NO: 1531 - DNA, 1060 bp, Homo sapiens
gcctgaccttgtgatccaccggccttggcctgccaaagtgctgggattacaggcgtgagcactgcgcccagccaaaagtgttaatcactgagatgtctactgagaactccagattcataaccactctcagaagcattaatcaaaccagaggaacttagaaccttatcagtgtaatcttgatattttgcatctctaccctgtggacaagtattttatttttytccctttgagtatataatgcattaatatttcaaaggactttgcaattaaacacagaagaagccatctttagactcaaccctaatactactttcagtagtgcagactaccttccatttggcatatgtttgtatactgtatacattttcatagttgaaatcatttatattctgattctttgcaccagacaaatactttctacaaattatcttcatatcattttagtaatttgacatttcgttgtgttactcatcttattccactcttgttggacaagtggactgttacagtgatgatagctttatggagtatttgcttttattgaattatatcaccaagataaatatccagaagtggaaatacttcgacagagagtatgaaatggctcttactacatattactgtattgtttttctgaagggctatatcattttaggattgagcaagttttaaaccaaattttatgtaataagtgtatcatagaattatatagatggaaaggatttctctggtgraccyccctgtttacaaatgaggraactggccaggcatggtccctctcacctgtaatcccagcactttgggaggctgaagcaggcagatgccctgagcccgggagttcaagaccaggctggacaacatggtgaaaccccatctaccaaatatgcaaaaattagctgggcatggcggcgctacctgggaggctgggaggaatgtttgagcccgggaggcggaggttgcagtgagcagtgatcataccattgcactccagcctgggtatcagagtgagaccctggttcaagaaaacaaaaaacaaaaaaaaaaaaaaaagggcggccgc

SEQ ID NO: 1532 - DNA, 3333 bp, Homo sapiens
atgaagatgggcaagaatatttggagattctggctaagcaggctggtgaagatggagatgatgaagattgggaagaagatgatgctgaagagactgctctggaaggctattccacaatcattgatgatgaagataaccctgttgatgagtatcagatattkaaagctatctttcaaactattcaaaatcgtaatcctgtgtggtatcaggcactgactcacggtcttaatgaagaacaaagaaaacagttacaggacatagcaactctggctgatcaaagaagagcagcccatgaatccaaaatgattgagaagcatggaggatacaaattcagtgctccagttgtgccaagttctttcaattttggaggcccagcaccagggatgaattgagttatctctttctttcctgctgtgtgcttgtagtgaagagcttgtgttcctcctagtagtggttccagaactggttcatgttatctattctaaactaataatcaatagatggacaaaagaaacaacaaccccaggagatgggacctgatcatgcaacctggcactggaaaagaaatcagcgggattttgggggtggggggggatgggaggtaccttagagggagtattttctttattttttgaagaaagtaagatcctgactctgaagcttcaaagtgacactgtggaaatctgaaacgaggggatgtcatgaaggcagcttttctttttctgaggaaaaaataggcatgggctacaggactatttaaaatgtctcatttacagtataaaactcaaaggtagatgtaatttttacacctatgagtatttgtccaatttctgtctcttcctcaccattgggtatctattctttatatgtaaataagataaggtcatctgatagccttattcagtcttcatcattttcatcattgttcctatgtagattattggacatttattgtagcactacataactgattataaaaatctgtaaatgaattagcactttcatattgaaacaagcctgctagcctatgtataaaatagcaaaatgtttgctgtttataaaaagatgtaatggggtggggggcaggggtaatttcaagttattaatttaaaaatgaactagcaattttgtacctggtgactttgtggtgcactcacctctgatagtgacttgaattcggtatgtaaaaaggggttagtggtatttcattgctgctaaaaatgacaactccctctgtgtcctgtttttcttaaagctgtcagtgtacaagtgggtatttgaataccagaccttactgtaaaaaataaaaaaggtggtatctagagcatgtaaattggatataaagttctgctcttaaagagttgatctaagagtatggctaaacatctatatatgcaatctattaaaagaacttaattcggctattatgtcttgatttgattgcagttttttcctaattataacaaatttttcctcattggcctgtttttaatcctgtgcctagaaggagtacaaaatgcacactttacaaaattgatatttaacacttacccactcccctttccccatctcttctaccgctcttgttgatcgtggtatctgatcttgactagataggctgaaggcacatggttccctccaaaaaccactattgataccactacaaaaacaagccagcaaaaagatactgtagagaggttggcttgcttccctctcttcctaactgcatgttgaaaaataagccgttattgatcttaaacatcggtcagatgagtcatacattgggttattttttatatacatgtatacacaaaatatttcaaattgaaagcaacatcttaatggattcaaaactattacaagctgttgtctaaaacaggtgagaaaaaaatttataactgtaaaaacaaatgcacatattgatatttaaaatgcgtaattaagaaaacccattgttgttgtgtttttcttgtataccaataattaagccactactgttggcactgtttggttttctrttttaacactgaaggagtgaaagtatttcctatatttatgaatttactactaaaatcttggcaaaaaaagaaaaaaattgtctaacgtgtgtgggtgaaaactgttaatcaagtgtttctactcccccccgaaaatcccctgaaagttggacaccaactgtataccctaggttgcttaaagggatttcactattatataaagtcaataaaaatgaagtagttgtatatatgcaacattgtgtacagaggggaaataatgaatagtattaaagaaacattctcgtcttcctttacctttaatcccctaatacctagtctactttttaaattttcagacttcactgctttttgaattcataattctaattttcacattattgttaatggaaaatcatatctaataaaggttttagttattcccatgcacagtatgaaaattctcatttgctgaggttttgtttcaagaaaatgtattggcatgtctttgagaacatgttttattgtctcctgtgtcatataatccaaactaatctccgtttacagactttaacttgaaattagaccttataattaaactatttaaatagtgktcaaatgatagtttctaatgcatcaaatatatacctcagttttcatgatttcctttaacattataatttggtatagatcaagaatcttaacatgtatcagtttctagatgaggctgcaggatttttggaaaactttttgaatgtatttacaatattctctgtaattagctacatagggacttgkctttttttctttttacatacagcttttcctacagttttattaccctgtaatttttttttagttgtagaagttaattctgattttgtgtggatttcagtatttgtctttgttaatggcacatattagcataaatcacttttgtaaatgtaagctttctttttttttcttgaaaaagcctttctatttatcagtattaaataaaggaagttaatctgtttctctgcaggtaataaaatagtgacacactgtattaagatagtgactgctatactcaactctggaagagactagagtatagagcatgagtggcaaaaccacagcccttgggccatatgctgctattcagtcccagatgtagcccctgaagcaagcataaagaaaaatgaattaaaaattaaattaatatggaaagttaaaaaatggattacattagtatgactaaaccatgtctttggcaaagatctaacacaatgtcttaagtataataggtagtctctgtttgtaaaataaatgacttaaatttaaaacatcaaaaaaaaaa

SEQ ID NO: 1533 - DNA, 2020 bp, Homo sapiens
gcggacgcgtgggttggagaagaacagtacttcacttaaagagaaagagcacaataaagaaccagattcaagtgtgagcaaagaagtagatgacaaggatgcaccaaggactgaggaaaacaaaatacagcacaatgggaattgtcagctgaatgaagaaaacctctctaccaaaacagaagcagtataggaccgacaagtgtacctctgcactcaatgctggaatcaaatccaaagcttttaattctctcaacaagatgtaaacaggaaagaaatctagttgagcatgaagataggatctaacagcttttccagttgttagatgactttgtggccatcttgttattgagtaagaaaataaagcatggacatcatgaaaataacagatgttacccaaactcatcttctaaaatctgtgcatttccatggtggctgacacacttgtcatgtggtctgttagtgtttgccaagaaccattgcaaataaattgaacatcaaagatccaagtttgtactatccctaaagactggagataagcattggaggctcttttaaaaaatgctagttactgaattttgtattgttttacttttttttttatttcaatatatacagtttgatgatgtgcttgaaattggtgcaaatatatacacacccttgtaagtgcaaagtatgtaagaagttttaacatttacttcacaggacttgtgattgtgttaaattctcactattgtgttttcttttgctcactgtttaggacaatttttctttaaaatagttttgcagattaaaattgcttaaataagtggattaaaaaactgacaatgcatgctactgttctctttcaaaaggaagagcaaccgtgttgaatactaataatgatgaattagtattcagtgtttagaatcattgggactacccacaaagtgagcatttctttttaaattttcttgacatttccaagcttattatgaataatattgcagtgtgtcttgtcagctgtaggtggcaaaggtgcccttataaaaaaggaaactggcttttcaaaatgggctatgggagcacaagctgaagctttagtgccttctacaatgtggtatactgttttctagaattttatatgtgctagtcattctcaattcatatggaatctagatggatatttcatgcatacccatagagaagtgtgtaagtgatatgtcagaagagcttcttactgatttcacctaaaatgagaaggaagtcctgttttcaagaatgacattagagtcatgcagctttgggaccatcagttttatactgtgataattgaaaatgaaacatgttcttattttccttaaattgaagaaaaccctttagttgtctacattggatggccttattacctctcaatcatcttttcataaatgatgtgcagaaattgtacttaaggacttaggagtatatgggaggttattggttttatgtttaaggatacgtttacttgagtttaagatacaggtcatccatcattcttaggctcactttttacagaaagtatgcaaatagtaaagtgacagcactgctaatgtttttccccagtactataacttgtggtttctgaactcattattgttgtatttccaaaaaagtaataccttttaattagtgtattaaaagttaagtataattattttaatgcaatctaatacaatcagattactcagttgccttacctcatgggaagagttacttttttagatctaaaaagctgaatagcatgttagttacttggtttcaacttgagttttcttttaatgttaataagattgaaactttagtatttagtggggaatggaaagagttgcccttgttgcaagtaatgaagcctgatttgattatgaagctgcttaatcactcttcatgtgttcagaattactgttttttttgtttgtttttcctttttgtcactgtgtacattaaaattttggaagatgctttactatgtaaaaaaaaaaaaaaaaaaaaaaaaagggcggcc

SEQ ID NO: 1534 - DNA, 747 bp, Homo sapiens
  misc_feature (9)..(9): n equals a,t,g, or c
  misc_feature (15)..(15): n equals a,t,g, or c
  misc_feature (20)..(20): n equals a,t,g, or c
  misc_feature (63)..(63): n equals a,t,g, or c
  misc_feature (87)..(87): n equals a,t,g, or c
  misc_feature (105)..(105): n equals a,t,g, or c
aaaatggtnggtaancaaanttccggcccccattgaccgcaaattgggccggtaaggcgtgtncggtggaaggtcctatataagcanaagctcgtttagtgaacngtcagttcgcctgaagacgccatccacgctgttttgacctccatagaagccccgggaccgatccagcctccggactctagctaggccgcgggacggatacaatttcacacaggaaacagctatgaccactaggcttttgcaaaaagctatttaggtgacactatagaaggtacgcctgcaggtaccggtccggaattcccgggtcgacccacgcgtccggactagttctagatcgcgagcggccgccctttttgaatgctttctaatggttttcctccttaagtgtcaagttaacaattttaaccctatccagcaatactcccttttccctctgaaatccagtggcacatgttctatttctctcttttgtatgcgtggtttatatttttgtcttggtgtggttatttgcacacatgccatacttctaaaacccagctgtttggtgcttttcttagagtccttctttttccctgtgctgatgtatgcaggattcgggaactcttcatgaatagcacacactttggtgagaaatttagacttacctgaagattctgtggaacaggtggagaggattttcttttctttttttcacttttaataactttcactttaggatgattttaaaagtgaaaaaaaaaaaaa

SEQ ID NO: 1535 - DNA, 735 bp, Homo sapiens
ccacgcgtccgctcacggcttcaatgatgcatttctcgaaggtcttggccacactgtcctctaagcctttggtgtcccagcaactattgcagtaggcagtgatctgggagaggggttcctcctgcaaaaatcaaaggggggtggtttcagagctttcggatgcagcgctccagtgctctatgggatgaaaattctttcatcatttttactttcctgctgttttactgtttcccccaattttaagcttctcctggcccacgcaaagcatgtcctccctgccccccaccagtagaccaaaggctaaaatttaaaagagtctcttttcccactctgcagaaaaagcacctggcttgcaaaaacaggtaagttatgagacataggtcatttttccttgtttctgacttttccctttaaagatccatttaacagttacatataggccgggcgcggtggctcacgcctgtaatcccagcactttgggaggccgaggcgggtggatcacgaggtcaggagatcgagaccatcctggctaacacggtgaaaccccgtctctacaaaaaatacaaaaatatagctgggcgcggtggcgggcgcctgtagtcccagctactcgggaggctgaggcaggagaatggcgtgaacccgggaggcggagtttgcagtgagccgagatcccgccactgcactccagcctgggcgatagagcgagaccccgtctcaaaaaaaaaaaaaaaa

SEQ ID NO: 1536 - DNA, 1723 bp, Homo sapiens
  misc_feature (1675)..(1675): n equals a,t,g, or c
  misc_feature (1680)..(1680): n equals a,t,g, or c
  misc_feature (1682)..(1682): n equals a,t,g, or c
  misc_feature (1684)..(1684): n equals a,t,g, or c
  misc_feature (1694)..(1694): n equals a,t,g, or c
  misc_feature (1696)..(1696): n equals a,t,g, or c
  misc_feature (1709)..(1709): n equals a,t,g, or c
  misc_feature (1716)..(1716): n equals a,t,g, or c
ggcacagctgagaaggagatggtaagttcaagaagactgattgcacctgggacccaggccctttctttgggatccagtcccagccttcatccatgtgattaagatccaggccgctgaagttccccaggaaatgatcttccacttgagcaaccttttacttgatacgatttgcacctttctgttttcctgcagtcagggtggtggcctgcagggacctgagctttgctacccaaccagattcctcatagagattcctaatcactagtttcttgtattcataaactcagagatacagagggcttggtttgaagttggggtgagatgaaacctttgctctgagccaaagctctggggccttgcattccctgcattgggttgatgactgtcagcatcactgccgcaggccatgcttgactaaggtacctggttttagccacagccacctccttgtatgttacctttcagctctggccaagagtgggacagggttttaaccacaaataggagcagcatgcaattcctagtgacttgctgcacagtattgtatcataattacaggaagtttttatttttaaaactggatctggggtatattcatttgccccatcacctctgtctaaaggcccaagtcctagggctgccatggtcacaagcacactgatgctccttaagattgtttatctggagcccacatagtgtggaacaaaaagtcacctagaaagcatccttggtcatcattgtctccttcccacctggcccagagatgcttaaatccaagttgtttctccagctgtcacctcccccaggagatcaggattccactgacgtcctgggcagccagtgaatttaattttccatgagaaacaacagagttaacctgtggcattaggagacctacttcatgtggaccctttttttccttcagtttaacttttctggagcagtgtgctgcgtagttcggcctgagtttgtgcagcttgttaagacaactcttgtgtacgctatgttgaagctcaacaaaaaagtcatgggaccacttctagaaatctttcagctgtcaggcctgtcagtctcatgacagtttgttggttgtgccaaacactttatttgggaaaggaaagcccagatttgaatgggtcttttcccctggccttatcctatagaggcatttgtaatatggagaaaataatttttcatttttgctcatttaattctataaattctctttataaatgaattttgtgttctttagttctccttaaaagaacttttgaattataaaaataaaatctttacctgtcgaattgttgctgcagatgattgttgtggaaaatctggatcattgacctctgtgctttcattcctagagatgttttatagttacatgagcaaaagctgttgccccaaagtgatggccctggaggcggggctgaggaacagggaaatgccgctgtgaagtcttaaagcacttctgcttaaactccatgtgtgaggagtgtgcctccctgtgccctctcagctctgaggctggccgtctttcggggtgttccttttggcaaatatacactgtaatcttgagtctaaatttatatgttgaaatgctaccttttttaaaataagaaactaaataaaattattttactatcaaaaaaaaaaaaaaaaaacccgacggggngaccncntncccaacacgncnaaaacgtacgccnacacagngggaacc

SEQ ID NO: 1537 - DNA, 1054 bp, Homo sapiens
ggaggaattcaactgtacttcactgaagggctgtcagctggcttattaggataaattctgggattttatgctgggcatagtgatttcgtgcttattttactgctggaccaaatgggaagcaaaggaagtgtgtcaaagaaggtggagggttagaaggtaccatctgagtaaaattagctgaatttccctgacttccatattcttccattatttctcttatcccctgccagtcactttagcctgaattagctgtgaggcaaactattttgctatttctatgtgtggatcttccagtgtgactttatgcagtcattgaaattgtcttaagcacaaatgaaacctcatggaaatgttaattactgctcctacaattaaccttcctcatatattcaacaagcaaggaattattgagaactaatacctctgagacactactccttagtaggttccaaccaggaaggaggcaagttgaatagagtctaagttttataatccagatcaacacagagaagggtactgctctggtattgagggtgggagtggtcagagaaggcctcctggaaaggttaggcctgctgaatcttcaagaacaagcagcagcccaagaggggaggtgagtgagatgagccaccttcctataggtctctcctccttccatgcccccactccccacccaaacttttcacactggggagaagtttctgacatgaacatctaacttgttttctctcttctgtgtttcagggaacagcggatgaaagagcacccctcattcgaacctaaacattgcctttgcttggtgaagaaactgtgtgagctgtcctgacctggacgatgacgtggggaaaccctccacctccttgcaggcttgttgcctgttgaaagaaggaaaaagacacggcgctggcaagtgataggaacattctggccagaggttaaagagcaggctgacatggctggccattaagctttataaaatcatgtgggctctgaaattgttcttttatgtgtctagcaagtatttaataaacccttgtatagtaaaaaaaaaaaa

SEQ ID NO: 1538 - DNA, 1401 bp, Homo sapiens
ggcacgagggctactatgctgtcttgtcatgcccccaccctttctctagcactttcttacattcttacaccaaaagacattacagcctcatcttgtattttccctgcttctgtccagaattagccattattccaaagatcccgagttcctttattggagaatgatattagacacaaagatgtgggtactaagtatactcgttgctgttggggtgttaattgcttctagggcttcccaagacagagctaggaaatgaaagcatacataataacccatgcatacacacagatcaatatctatgcctgtatctatctgtatacatactcatgtgtcctttctaatccacaccacggtattcatcctaaccttccctttttatttttaacttttttcctctgatagtgagaaaataggctctcattatctactctatatacatttatttgttcaacctcagtatctacatacttacatatgcctgtgaggaacagatttactaactagaatcctgtatttgtgtgcaatcctttttatctttattataaatatagcacctccaggctcctttttattagtgtcagcatgacatagcttttcccatctttttactgttaatattttaaactcaaaaaaagcaaggaggaaaacagtatgctactatctgtgtgaaaatggaaaataagtatggatatatttgctcatatgtatatatataatatctatgggagagggaaaaccaaaatatcagtttggaggtcaactgattaactggggaaaagagatgaggggaaaacttcgctgcatactctactatcgttgaaatttcttaaactttttcattgagtataattcacaaatcataaaactcacccttttaaagtctacacatcagtagtttttaacacatttatatacaaagttgtgtaactatcatcactaattccaggacattttcatcacccttaaaaaaaaagccatgtacccattagtagttaattcccatacccctcacccctcactcacccatctactgcccttcacaagaccctggcaaccactaatctgctttctgtctctatggatttgccaactcttgatgtttcatataaatggaatcacacaatatgtgaccttttatgtctggcttctttcacttaacatcatgtttttaaggttcatccatgttgtaccatggatcagtactttgttcctttttgtagctgagtaatattacattgtatgtatataccatattttgttgatgtactcattagttgactgtttttctaaatttttgaattatgaaaatatccattcaaaaattaaactttaaaaaatagaaacaaaatgaaaaagcccttctcataaaaaacagaaaaatgtaaaaaaaaaaaaaaaaaa

SEQ ID NO: 1539 - DNA, 1447 bp, Homo sapiens
tttttttttttttttttttaaaaatggtattcatttttatttcaacatgtcaactgtgcatttccaaaacagcaggcttttcaaaggaataaatcagaactgtaaacacaagatacagtacaagtttttgacttcctacagtcagtttcacaaatccacatactgtacattcataggtgaggttaagcctgtcacccatttctttatttctataattacacaagcataataaatacatctgattttaaaggtcacttaaaatgagtcataatttacagtacagtacgtttcagttcaagtgcaaaaaataactatttgctgaattctatttctttcagttattttatttttaagctgtgttttattgtgaagcgagacatccaagtgtagaatttcttatcccaaatgcagtattgggcagaactatggtgtcatggagaagccctcactttacaattgatcctgtctaatcagggtcagagggtaaggtgagttgctcatttcgactgttcttttctttcctctctctcctgtgctcatccacagctattataaattatataattcacctttattcagctaaaacagttttcccttttccacactccccccaggtttcctgttaacctctgctttgatttttagtggcaagctttacgtgcgatccacccagccattgttctggctgcagttgtaacgtttgcagttgcatacattacattgtccagtgtctgactgtgtcttcatgagaacgaatatactgagattttctttctttagtcattggaaagtatagttgctacttattgccatccttcccattcatggtttcctatttaccaccttttcctcaccaaaaacaaaacaaaactgacccaatatgtaatttctaaaaattgtatccttcccccaggcacttaaatcttatactgtgatttgtaactagtactgcttatttaaggaactcttaggaattcagtgatttttgtgtgtttcattccctcagctaattagagcctgaattactataagatagtaaatagcgagagaggctatttacagtatcaatatatttagtaaactcttgtctatcaaaacacaggatactgagttggttggttgatttgaaataatcgcttgtttctgttttttttctcaaagcccatttaaaacaaaaggcatttttaagctcggcttagcttgcagtagttaataatagcttctgttgctcaaagaattatttccattatatgccatacacatataaaaatatatttgctaaagatatgtaaagtttctgatgaaacttttaacttcattttttaactttaacttttaactttatttttaacaaaagcacatgtgctacttttatctggttactttttaaatatatcttgtaattttttaaacggttctctccaagaaaaaagaaagtatagatgaa

SEQ ID NO: 1540 - DNA, 1821 bp, Homo sapiens
ggcacgagtgaaaaagcaaaattgaatattttgtcacaatttcctgttttgtcatactgaggaacaaaaattcctctttatgtatagaaatacactaaagtgttagcttcttttagcagtgaagttcttgccagcttcccaacctgcattaggtttcatgtttcactctaaaataaaagaatatgttagaaatgcttttgagacttcttcgtgctatctgggcaaatgtgtttctttggcatttttattttactaactctatttcctctatatgatgctaatttagatagagtgacactgctagagtaagggtattatactcatgttgagctctggttatacaaataatagagctgatgtactcattcagcataattgtgtccggactatgtctccagcacagcctttcttatatctttaatgttctgtgcagtatagacgtactaatcagaggtgattgtctcaatcattactgctgggcctttatgcatcctgtatttttctttcagtgcctagatattgcattagtctctcaagcacatcacaaaactggtttaaatttcatttgtctcagtgttttcttggtctggagcctttgtagttcctatattcacatgatttatactgcacacctggggagctcttaagggtcttattagaatttgtggattttatttttgtaaaaaaaggaaaggattgtcttttgagtttgctttctcctgtgtagaattccattatgactaggggacttctgaatcttatgtacatatggtaattatatatcaatgtatgccagtctaggcagagctatcaaaatatcccctttgatactaggagaatcatataccaccttgcgaataaacatgagtmggtttcaactcatctctttgctttatcgctctttagaaaggatccttcttaactggcttttattatatttttctatataagagaaaacagtttaaagtaaaaagactatgacaactagaatggaattttttcatgtttctgggagagcaagaccttgcctaccattctgagataattttgtttaattcaatgccttatggttcagattatagtgaagtttgacttgagtgttggttttagcccagtactttaagaaagagaatatcccaacttttctgctaccattactaacctaagtaaaacaattgccttttaaagttactcctaagaatgttgtgccaaaactttgaggtttcttgtcaattatttggctggcatttattcttccctcctgaaaccgtgaagaatggcttcagcttgtatctagtctgttttaccagcttacaggagagtgccttctggcacaaatagtttctgcctcagtgcctccctactcctaaccaggtcatgacctgacccagaaggacccataggatatctagtgcatgaacttcctgaggaaatcaagttggcacaccaggatgcacaaatctgaactgaggcatcatgccttgggctcacaagtgaactgcatgggtcagaggctttgggactaaattatctcattacatgtactggggccttactaagttacagagtcagcaaaccacttttcaatcaccagcactattttatttggcctgaagttgtcttctgcccttttgttttctaaatcaggggttggcaaactttttttttttaacagtccagataggaaagattttaggactgcaggtcatatggtttccctactcaactctcattgtaggcagtcatgggcaaaactagacaaatgagtatggctgtattccaaaaaaaccgtatttacaaaaaaaaaaaaaaaaaaaaaaa

SEQ ID NO: 1541 - DNA, 3168 bp, Homo sapiens
ggcacgagtttgtatttatattgaatgcatcccttccttaccatatgttagcaacctgtgcagaagccctacccagacctaactgggaactggctctgtatatcatcatctcaggaataatgagtgcactgtttcttttggtcattggaacagcctatttggaagctcaaggaatatgggagccatttcgaaggcggctatcctttgaggcctcgaacccgcccttcgatgtgggaaggccatttgatctcaggagaatcgttggtatttcatctgaaggaaacttgaacacactcagctgtgaccccggtcacagtagggggttctgtggagcaggcggttcatcatcccgacccagtgccgggagtcataagcagtgtggcccatcggtccacccacacagcagtcacagcaatagaaactcagctgacgtggaaaacgtcagagccaaaaacagttcaagtacctctagtaggacttctgctcaagcagcttcttcacagtctgctaacaaaacaagcccccttgtcttagattcgaacacagtgactcaaggtcatacagcgggcagaaagtccaaaggggcaaagcagagccagcacggcagccagcaccatgcccacagcccgctggagcagcaccctcagcctcctctgccaccgccagtgcctcagccccaggagccgcagcctgaaaggctgtctcccgcccccctcgcacacccttcccacccagaacgtgccagcagcgcgaggcacagttccgaggactcggacatcaccagtctcatagaagccatggacaaagacttcgaccaccatgactccccagccctagaagtgtttacagagcagcctccatcgccattgccaaaaagcaaagggaaaggaaaacctcttcagcgcaaggtgaaaccacctaagaagcaagaggaaaaggagaagaagggaaagggaaagccacaggaagatgagctgaaggactctttggctgatgatgatagctcctccaccaccacagagacctccaaccctgacacagaaccgctcctcaaggaggatacagaaaagcaaaagggaaaacaagccatgcctgaaaaacatgaaagtgaaatgtctcaagtgaagcaaaaaagcaaaaaactcttaaatattaagaaagaaatcccaacagatgtgaaacccagttcattagaactaccatatactccccctttggaaagtaagcaacgtagaaatctcccaagcaagattcctcttccaactgcaatgacaagtggatccaaatcacgaaatgcccagaaaacaaaaggtacaagtaagttagtggataacagaccacctgccctagcaaaattcctcccgaatagtcaagaattaggcaacaccagtagctcagagggtgaaaaagactctcctccaccggagtgggattccgttccagttcacaaacctggcagctctactgatagtctttataaactttctctgcaaaccctcaacgcagacattttcttaaaacaacgccagacctcaccgacacctgcttccccgtctcccccagctgccccctgcccctttgtggcccggggcagctacagcagcatcgtcaacagcagctccagcagtgaccctaaaataaaacagccaaatggaagcaaacacaagttgacaaaggcagcctcgctcccgggcaagaacggcaaccccacttttgctgcagtcacggctggctacgacaagagcccaggtgggaatggctttgctaaagtttcttcaaacaaaacaggtttctccagcagccttggcatttcacacgctcctgttgacagcgatggctcagacagctcgggtttgtggagtcccgtcagcaacccaagcagccctgacttcactcccctcaattcgttctccgcctttggaaactcttttaatctaactggtgaagttttcagcaaactcggattatctcgatcgtgcaatcaggcctcacagaggagctggaacgagtttaatagtggcccttcatacctttgggagtcgccagcgacagatcccagtccttcctggccagccagttccggctccccgacccacacagccacatcggtcctcggtaacaccagcggcctgtggtccaccactccattcagcagctccatttggtccagcaaccttagcagcgcccttcccttcaccactccagcaaacacgctggcaagcatcggcctcatgggcacagaaaactcccctgctcctcacgctccctccacctccagtccagctgacgacttgggacagacctacaacccgtggcggatatggagccccacgattggaagaagaagctcggacccttggtctaattcgcactttcctcacgagaattaaattaagcaaaaaacaaacaaacatagtgggccctcgtctagatcatgatgtgccagtttctgagacatctttttaaggctcttactgcagctcccctccccaccctcctcttctttgcaaaacagacccaagcagggcaggctcagaccactcgcttctttcagatctttcttgcaattatgataacatgagatttgctgttgtgcttttagagaaaagtctggactcagccacaaactctaataagacctgtacatctgagaacctttcccgttactgcgttttcaccacctgtcttccccatgctttatttatctgtatgaacacagatttgacattacagctaaggaaataatttgagttgattcagaaatcctggcatgtgacaattttgttaaattaccaagtttggtttttaataatttctcaatattatgcgccaagatctaattttaaaactgtatgaggactttgtgctgaaaatagagtatttttttaaagtaaggctgtcttggtttaaaagcagattacagaaatgtaagtcaacttaagaacagtgaatgaatgtaaaaacattcagtcgagaccatatgcattttctgtgctgtttgtacttgaggtatgtaacatttgtatacctgaacttattttaaagatgaactgaaatgcacatagccaagtcttgagatacaagattgaatgtgtatttcttaaaaatacaactttgtgttgtactttgaaataaatgatgcttttttcaaaaaaaaaaaaaaaaaaa

SEQ ID NO: 1542 - DNA, 1302 bp, Homo sapiens
ggcacgaggtctgtttgatttttaaaaggaaaggatttgtttcagattatacaagaataaaagtattatagacccaagggacttcttatgaggtcaaattcagatatttatatgaatatgaaataccatggtccctagtagtcagttgaagtggcaatgtctaaacagaaatgaacaaaactaatgctagcaggttaaaatcaatcaaaatgtttaaaaattgattctgtcctcagcatgttacttcctcagctctgataatttactggtcttgagtattttgagaatttgatgttgaacgttataaagtcaaagaactgcttgtttagatgaggtttatttttatttttgatattattcattcttgtcacacatcaagaagaaaacactagagtgctgctggaattccaaatctgaagaattctaacgactgcattctttgttattaaaaagggcacaatccttcctttttatttggcagtttaatttcagtaggaagcatgtcacatgtgcactgttggttagaattatgcatctgtcatgcctgactgctgaaccctacctaagccttttggcgcagtttaaaacttatactggtggactgtgaacctcaaaacaaatgggtatttttgggttttgaggatagatgttactccttaaagtttgtatttggggcatgaaaaactactgaaagaagaaaagtgctacagatactacatttcaaagagttggcattttccctttggccactcaagcagcatttgatgtatctaaagaaacaaagtcattgtttattttaaaaaattatatgcagttgtacaagatactacattccattgaaatgttggctatgtcctaaccaggcaaccagataacaaaaacattttgagtcttttatctaggtagttctaattattcagctacttagtttaacaaaggaaaatatcctgacttctctcatttcatttgtagacttttcattgtataggcacaaccaaagagtcagactggtttaaaactccagaaggaaaaaaagtatcccacacagtggatgttgtttctaagaatgctacaaaatcctgacatctcagacatctcaatgttaaaggaagaaaaaaaataccttttcatttcaaagaactaatatactttgatattgtgtaaaccttactcaagtttattgtcaagctttaactgcctttttagaactttttaaaatttcgagcccacaaatctattgtattagttgccttctataacaataaatcttcactgagcaaaaaaaaaaaaaaaaaaaaaaaa

SEQ ID NO: 1543 - DNA, 1158 bp, Homo sapiens
ggcagagatgggtcagatacatgcagctgtttctgttatatataactctggagccgagaaaaattagttgatttacatggagatcaaatccctgtccttggactcagtaatatgttatggttaagttaacaacttggcaaagaacttctttctttgtctcatagttacagtacctctgtaagaagagctctgctggtcgaaacaaaaataatttccattgagaaaatttaagcataaaagctatgaatcaccgttaatgatatcagaataaaatactggattttcacagttaatttgcttgttttgttttatcagtatgatcgccctggagcatcccctaagaggaatcatgatggagaatgcacagctgcccccagtgagtcaggagtctcacactggttctttgctagacagtagtaatattgttattgttagttgtattatgatagaaatatgtagttaaataagctacatataatagtaatatataaatgttatagtagtaacagttgcccttgtaaaacacaagttttaactgcaggcacctattatacacagatttttgttttcaataagtatattggattctttttctggagattgtcacaatttgaaaaaactcccagttgaaccacatagcctagaaatattgaaaaagttaaggaagccgggtgtggtggctcacacctgtaatcccagcaccttgggagccgaggcaggtggatcacctgaggtcaggtgttcaagaccagcctggtcagtgtggcgaaaccccatctctactaaaaatacaaaaattagctgggcagtagtggccctcacctgtaatcccagctactcaggaggctgaggcaggagaattgcttgaatccaggaagcagaggttgccgtgagcacacatcgtgccactgcactccagcctgggcaacagagtaagactccgcctcaaaaaaaataatgtttagtgggacccatacgaagtgtcactagtgacgctggaagtgctcccaaagagcagaaaaaagtcataacatgacaagaaagagttgaactgcttgatgtctactgtagattgaggccggcagctgaggttgcctgccatttcaagaaaaatgaatccagtgtaaggaacattgtaaaaaaaaaaaaaaaaaaaaa

SEQ ID NO: 1544 - DNA, 2046 bp, Homo sapiens
tgatttggaaaccagaggaaaggcgctgttttcaccgaattagaatcgcgggaaaatagagaagagtttgtttgaaggtctcgcgagatcgagtgagtacggctcgccaagttggagcgctctcggattagacacagcaactattcagctgcgaggggacgggagaggtggtgagcactctcgcgagatttgaaggagcggcggaggccagagggaggagaggtttgtaaactaggaggctccgggtttccgggcacttttattaggtcgtcttctgggccaccagtgccccttccatctccacaggcagtccctccatcgctaacctttttttaaccggccttttaggaccggaagtccttcatctcaagcatccaatgctgaaagcggcctgattttctctaccggaagcccttttccagaggctgggaacacggcccacctagcaggaagtcccacctccttgagctccgccacccttcccgaagtttttctgtcacctgtgttaggctccgtcccctttccgcgttttatccccgtaccagaaaaggatacatttagtgcctcccacccagctccactaaacgggttggatatctcattctttgagttggtgttccttccccggcgcccccatgtagctgggaagtgggacctgggggtggttggacccctgggatcctaaaggaggggcagggagggcgcagaactccgcttctgctccttgctaccaggacgcgcggcctcctcagcctctttcctcccgctgccatgcaccctgcagccttcccgcttcctgtggttgtggccgctgtgctgtggggagcggccccgacccgggggctcattcgagcgacctcggaccacaatgccagcatggactttgcagaccttccagctctgtttggggctaccttgagccaggagggcctccaggggttccttgtggaggctcacccagacaatgcctgcagccccattgccccaccacccccagccccggtcaatgggtcagtctttattgcgctgcttcgaagattcgactgcaactttgacctcaaagtcctaaatgcccagaagctggatatggtgccgctgtagtacacaatgtgaattccaatgaacttctgaacatggtgtggaatagtgaggaaatccagcagcagatctggatcccgtctgtatttattggggagagaagctccgagtacctgcgtgccctctttgtctacgagaagggggctcgggtgcttctggttccagacaataccttccccttgggctattacctcatccctttcacagggattgtgggactgctggttttggccatgggagcagtaatgatagctcgttgtatccagcaccggaaacggctccagcggaatcgacttaccaaagagcaactgaaacagattcctacacatgactatcagaagggagaccagtatgatgtctgtgccatttgcctggatgaatatgaggatggggacaagctgcgggtactcccctgtgctcatgcctaccacagccgctgcgtggacccctggctcactcagacccggaagacctgccccatttgcaagcagcctgttcatcggggtcctggggacgaagaccaagaggaagaaactcaagggcaagaggagggtgatgaaggggagccaagggaccaccctgcctcagaaaggaccccacttttgggttctagccccactcttcccacctcctttggttccttagccccagctccccttgtttttcctgggccttcaacagatcccccactgtcccctccctcttcccctgttatcctggtctaataaccccccacacatacacctctggtgacctatttgcacagaccgtcgtcttccctccagtcttctgagggataggggacattccatcccaagcttctcccttacccacacctatccttttgaggggctttggggtggagctggggcaagcagagggactgggtcttcacttcttgggctaataaaattgtttctttgtggactaaaaaaaaaaaaaaaaaaa

SEQ ID NO: 1545 - DNA, 1590 bp, Homo sapiens
  misc_feature (1)..(1): n equals a,t,g, or c
  misc_feature (981)..(981): n equals a,t,g, or c
  misc_feature (1083)..(1083): n equals a,t,g, or c
  misc_feature (1124)..(1124): n equals a,t,g, or c
natttcctctcctctccagctccgacattgtgctgtaaacacaggcctctgccttgaacacatgtttgccagatgctccctcttactcatttcttttctcttgtttactgccaggttttctcaagtgcgtggtcaccagccatggcctccatttccttagtctctaccctgtatcctctgcccgctgggtcctactgctcaacctctccctggctgctaaatccaatagtcttttctctgtccttacctgcagggcctcatgggactatttggcaatactgaccacaggattgtctcataactcgtttttgctttggcttccatgacactctggcaagcttagttcttcctccttttctggcttccataccagctgttaaatgtgagtgttttggtacttggccttctcttctctctgtatgttcccctgggctctgctataaacttcagtgcatctggttctcagttttttatacttgttatttgtcttttgacgaaaagcagatctttggagtttgactcaagcctgctaggtccacctgagcagcagaacagctctggctgggtaacccttgaattttcatgtgtttcttgatgtgtttcaaagaagagctgggatgttgatccttcttatcgctgcacccatttatctcagggcatgttgagtgactcagctctcttgcagtgtaaacccaagaggagctcatgggtcattcctgggattcagctgcttctacagtccgtgtcactcattagaggcaagctatgttttgcctagacttttgcttgtactttggcttgggaaaccctctgtggcatcctgtgggggtaggtctaatcttttcgactgtgtggaaggtcaattcaaaagtgagacgtaacttcttagatcacgtaccatattttcctcttgtgtgtacagctgctctggggctcagctacagttacctcatgttgaattgcctgcttttgagttgctgnattctggtgtaggtgtaatctggttatttgaactttactgatattacsaagagctttggggatttttttttaaagaattgagatgggttattctgaaccatncatatttaatscccgattcttgktagaattattaacagtanttcttggaagagagttttctttggaggataaarctttttttttttttttgaggcagagtcttgctctgttgcccaggctggagtgcaatggcgtgatcttggctcactgcaacctccatgtcccgggatcaggcgattcttgtgcctgtagtcccagctactcgggaggctgaggcaggagaatagcatgaacccgggaggtggagcttgcattgagccgagatcatgccactgcactccagcctgggtgacggagcaagactccgtccccaaaaagaaaaaaaaaaaagctatgtaaaacaatgacagccacgacgacagcagcaccagcagcattcagtcgattgtgtatttcatttgggcaattcaattggcaggtgtagttttgcgttttgtagtctctgttttctgacttaaaactttgtttaagtgaaacccagacaaaaaaaaaaaaaaaaaactcgag

SEQ ID NO: 1546 - DNA, 1711 bp, Homo sapiens
ggcacgagccaagatgttcctcttgtcaacttggccaaccttttgattcattacggccttcatcttgatgccactaagctgctacttcaagctttggccatcaatagctctgagcctctgacctttttgagcctgggaaatgcttaccttgctctgaagaatatcagtggggcacttgaggcctttagacaggccttgaaattaaccaccaaatgtccagagtgtgaaaacagcctgaagttgatccgctgtatgcagttttatccttttctgtacaacatcacttcttctgtttgcagtggtaattgtcatgagaaaaccctgggacaacagccatgacaaacagaaatattttggacaactcacagtcactggatgctgctgaagaagagccctctgagagaggaacagaggaggaccctgtattctctgttgagaattcagggagggactcagatgcccttagacttgaaagtacggtggttgaggagagcaatggttctgatgagatggagaattcagatgaaaccaaaatgtcagaagaaatactggctttggtggatgaatttcaacaggcatggcctttggaaggctttgggggtgcactagagatgaaagggcggcgtctagacttacaaggaatacgggtgctgaagaaaggtccccaggatggagtggccagaagctcttgctatggagactgcagaagtgaagatgatgaagcaacagaatggattacattccaggtcaaacgtgtaaagaaacccaaaggagatcataagaaaactcctgggaaaaaagtagaaacaggtcagatagaaaatggacatcgttaccaagcaaacctagagatcactggccccaaggtggcatctcctgggccacaaggaaaaaaacgtgactaccagcgtctgggatgccccagcccggacgaatgcctcaaactccgctgggtagagctgactgccatcgtgagtacctggcttgcagtttcttcaaaaaacattgacatcacagaacacatagattttgccacccctatacagcagccagcaatggagcctctttgcaatggcaatctccccacgagtatgcataccctggaccacttgcatggggtttccaaccgagccagcctgctctacacaggggagagtcagttaacagaggtattacaaaatctcggcaaagaccaatatccacaacagtcgcttgaacagattggcacccgattgccaaagttttggaaaagaaccagacgtcctgggtcctctccagcatggcagccctctactggagggtgaaaggccaaggaaagaaggcaatcgactgcctccgccaggctctgcactatgcgccacaccagatgaaggatgtgcccctgattagcctggccaacatcttgcacaatgccaagctctggaatgacgccgtcatagtagccaccatggcagtagagatcgcaccacactttgctgtgaaccacttcactctgggcaatgtctacgtggcaatggaagaatttgaaaaagcactggtgtggtatgaatccacattgaagcttcagcccgagtttgtcccagccaagaaccgaatccagaccatccagtgtcacttaatgctgaagaagggacggcgctctccttagtgcacttcttccttctctctttctcttgactcatgctctaaaaaaaaaaaaaaaaaaaaaaaa

SEQ ID NO: 1547 - DNA, 2764 bp, Homo sapiens
ggcacaggacaaacagatatgaggaagtattgtcttggattttgctattcagtatttatccttggtcgtgttttgaattttatgcatcttcaccttcttgcatgtggctgtgctaagtgttgatcttaaagaggatagattttcagcaggattgctaactggtcctggctatgcctgttgcgtgctggccctggcacatcagttaatttccttgaagctgtcttccaccacctaggaaggggcaatggagatgggcctgtcttaattaccttgaagttggaatgggaggctcagacaatggattttgtaaacaacagtgttgtgcagttgttatatctgaagatggtcatgaattctgctgacagaaatgagactttacccagaagcaacgtgtgaaggcatgggaaggtggtggcccatgtaaactgtacattgcttgttttttggtgcaagcctcctctgcctttatcttacttccttttattgtttccaaatgtgtccccttttttggagaaattaggtcatattgaaagacagcttgaagcactattgtgttgcaatctctcagcctgacaacagaccttaattctcattttcaaaataactatccaagttttcagctagcagatcccctcccccacccttctcatcccatttccccttgcacttttgtttccccaagtgacaggggctgggcttgctgatgggggtgtctgagtcagaaccagctcaaaagagggggccactcccagggagggagtccaggaatagggtggggcagtgaacactcaccccaggcacataatttaagacagcaccaaaagctcagcagtgggataaattatattttaacataacacttaaaatatcaaaattatcagcaccacaggaaaggtaacaaatacaatatcggaatgaatacaggcagtccctggtgaagaaaataacacgaccataaaggaagacaggcttgggccgactgattttccctgttgccctgggccctgatacatacggcttgtcaccacacagctactcatcctgccattagttaaaagtttcatattttggtcatcatagattttgtgccttgatttggacttttaaaaatattgcattcgaatattatttcccctggtttctgaattttgggggcaccccattaaattttgcacccagaggaagttcctcattctcttctgccactgggtggcccttggctgaacattggagtccttgtgctcagtgacaggcagggtagagacgcggtggaggggaagaacactggacccaaagtcaggatcacggagcctgatcctgtgtctggggaaccctgggggagctgcttttttgtcatatttttgttttatttgtttgtttgagatggggtctcgctgtgtctcccaggctggagtgcaggggcctgatcacagttcactgaagactcaacctcccagctcaagtgatcctcccacctcagcctcccaagtagctgggactacaggcatgtgccaccatgcccactggcttttttactttttttgtagagatggggtcccactgtgatgtccaggctgtgcttttctgctcatctgtccagtgaagggctggccatgtcctgagtccacgttgatgcagcacccgtcctctgagagcactggagcctgccatggccagctctctcttgggtcctcagagggacatgctcccaaccccatctttcttttctcttgccgtctgatctgagctcctctccccaaaatcatgaaagggagacaccggagtctcaaagtggccgatccagttgagttttgacatgtgtgcattgccaattcaaagtgcaggcaaacttggtggggatgaaaaggatttgatattggggtcagtacagtgaatgctggagtcggcctgagtgtttgtcccggctcagagagcttgggcaattaacctctgcctgtttcctcatctatgaaatgaggatactccctgccccccataggattgtgataacatggacatgaggttggataacctggacatgcaactgaatccttacgagaccgcactctgcaatctccaccctgcactggtagaacaccatcctaggaaagtctgcttccaggccccagagtaagtcctggaaagtgagcaccactgggccaaggaaaatcccccgcttcagacaggctcgtccctacctccatcctagcaagttatgtcaagccaagtgcctaggactaacacactgatacgtgctgtaaaagtgcagagggaggtgtcaaccgcaaagcttccagcacaacaaacaaaccagaaccattccctggagctccatagagcagctggggcctcttgcagaactgcccacacctagcttcttgtacactctcctgctgcctgcccgacactaccgagcggagagagaaaggaacgtggctcatgagttcattgaaatgaaatctctaggccgggtgtggtggctcatgcctgtactctcagcactttgagaggccaaggtgggcagatcatttgagcccagtagttccagaccagcctgtccaacatggtgaaaccccatctctaccaaaaaactacaaaaattagctgggcgtggtggtgtgcacctgtaatcccagttcaggaggtgaggtgggagaatcgcttgacccgggaggcggaggttgcagtgagtcgaatcgcgccactgcccccagcctaggtaacaggtgagaccctgtctcaaaaataaaaatgttaaaaaaaa

SEQ ID NO: 1548 - DNA, 1019 bp, Homo sapiens
  misc_feature (833)..(833): n equals a,t,g, or c
gtagaaataaatgaccacccccctggtaaattacaggcatgagccaccatgcccggcccaaagatgattttttaaatgctcaacaggacaaagcctaatggtagtcttttgttaaaaacaaaatttaatatcaatccattgacaggactctttgtgtactgagctatatagtaatttcaccttaatagaagttcttcataaccaccccatataaaaccatccattcttatctcttttttttttctccatactgcttatcacagctgacactttatactgactttgtttccccctctataccctttactccagattataaattctgaggacagggtctttctttcactgctttatattcccactgcctagaatagtgcctaacatatattaggtactcattatatatttattgatgtcaaatattgattgctgtattatagtagtgttaatggaaggtgtcatttcttagattttcttttctgaccagcacagttcttgggttgatggagtatgtcctcaataaatctcagcatcaaataaacaagaattttctttttaatacataaatttgtcattttgttacgctttttagtttcctcagtgattttttagaataattcttgttcatgaatttgggatcagtgaatatctacagttggaatcttaggaaggaatgttaatgggcaatccagaatgttggataattaaatcagttatttgccatttgatgtgtaatatagtggaccacatttagacaaaaaacaagctaccccataagaccagtttttattttctttgattcatgtcttcaggattttctgttaactcagaantattatagcattcattattgttttgtgaaaatactagttaataatctccggttaatgaaataattatcttagataaatttactgaacttaatgtagaatatgttttttgtttcgttttgtttttgagcctgggcgacaagagtaaaactccatctcaaaaaaaaaaaaaaaaaaaaaaaaaaaaaa

SEQ ID NO: 1549 - DNA, 1279 bp, Homo sapiens
  misc_feature (1188)..(1188): n equals a,t,g, or c
  misc_feature (1224)..(1224): n equals a,t,g, or c
  misc_feature (1278)..(1278): n equals a,t,g, or c
gaattcggcacgagtcatgaagggcttcttcctcattgtcttcatgttgagtagggctgaggaggaggaagatgaggggttagtcttgctgtcttgcgggtgacagatgtggaagtaaatcctcatgtaggtgggaatgagcagttcaaacctatgttgttcaagggccaactatagttgattaactcatatctctacagttaattttcaaacagatgtgatagctgaatgagaacttttaagatagtactggacagtaaccttattggaactggaatggcctttagactttttgtgtccagtttcttctcacctcctctttctcttcaaatgtgcaactgaaactgagagacctcagtcccatgtccaaggtcaggcagatacttagcggcagagtgaggactccagcccatttctgcagctctgctgtgcagtggaagatttgggacaagtacattatttaaaaatgcccacccactaaatattacattcctaacttttcccaatacacaaatatgcttgaacttttaaaagcttgtttttggtcgtgcttggtttggaatgtgaatgactaaaactacctttagcaatttcccaaagtgtaagttcaaatgtacagagaatttttttcctgaatgcccaacacaatatgcagttttacaacacataccagattcttagattcatttggtgaaggaagcctctgaattaaaacttttaaatatttctgatttgcaaccagacgaaaaagaagaaaattgacaacttttttgatgcaactttgtgaaatcatggtgttcctggtttttctggtctggtttttgttgttgttttgttttgttttgccacagtttagttcctcacctgatctttccttgtatccacttcagartctctgaaatgttatctgtttgttggttcctgggaaattgagagcctttycaaagactccatctagaagcatatttaaaagtgtgaaagaagacatttatgcgaccaacaaacatatgaaaaaaagcttatcatcatgggtcattagagaaatgcacagcagaaccacaatkagataccatctcatrccagttagaatggtgatcactaaaaagtcaggaaaggccaggggcggtgactcatgcctgtaatcccagcactttgggaggctgaggcgggtgggatcacctggaggtncaggagtacaagaccagcctggccaacatagtgaancccatctctacttaaaaatacaaaaattagctgggtgtggtggcgggcactgtna

SEQ ID NO: 1550 - DNA, 724 bp, Homo sapiens
aaaacacagaactcggatgaaacgtcacacggtctgggctaaagatcttgctctttaatttcccagcaggtaaccttgtggcagtcactaaccctctctacacctcaatgttctcatctgtaaaatggaaatgatgacccctgggtctcccaggaccgtgaggggtcctgaaagggcaggtgtgcgcggtgctttgtagatgataaggcatctcagaaacaccggggctttactgttattttctctccagcttgtttgggcagacaaaagagaaatcgagcccagtcattcttagcacagccaagaagggcagatttcaaaaggagccttgcttcaaactgaggaaaaccaaaaaggaaaaaacaacaaacacagctgcccctaccctccagtccacaaaacagtctgtgtctgacaagctgggctctgccagcggctcacccccagactcctgcaccagctggccttcctgacctgtgtgccctgggagccaggccgactcttcacacttccagtcaccgacacagtgcaatgcaacccattcttgctcaaggcctccttagaaattattcctcccattgctcgaacctgggagttggagattgcagtgagccacgatggtgccactccactctagcctgggtgacacagtgagaccctgcctcaaaaaaaagaaaagaaaagggaggggagggaagggaaaattaaaaaaaaaaaaaaaaaa

SEQ ID NO: 1551 - DNA, 859 bp, Homo sapiens
ctgggaggcggacgttgcagtcagctgaggtggaatgactgcactctagcctgggcgacagagtgagactctgtctcaaaaaacaaaaacaaaaacaaaatttaaaaataaattgaagtagggtacaggattttaaagtcccattatcaacacattcaactcagaatagttaatgtaacctgaatttaattacctttgattttaatttaggaatgaattttttaaaatgcatataaccagctcagggtctgtgcttcatcatctccctggctttttttttgtgctaatttttcctcttactacttttatgagtaccagaaaattatccaaagctaagagaagaaataaaacactgtttttgctccttattaataatttgcttctaagtttttgttagagagtaggtaaaaacgtttggcaaagtagattgctcatagagtttagctatccatgctttgtttttacctttagtttagttttatggcaggggaataggacttgttgaagggagtgggaaagaagggatgcaggtcttcataataaggaatgtcggccaggcgcagtatctcacacctgtaatcccagcactttgggaggccaaggcaggcagatcactaggtcaggagttcgagaccagcctggccagcatggtgaaactccatctctactaaaaatacaaaaaattagctgggcatggtggtgcgcacctgtaatcccagccacttaggaggctgaggcgggagaattgcttgaacccaggaggcagaggttgcagcgcgctgagattgtggcactgcactccatccagcctgggtgacagagcgagactctgtctcaaaagaaaaaaaaaaaaaaaaaa

SEQ ID NO: 1552 - DNA, 1932 bp, Homo sapiens
gttattttgttaatagtttcttttgctatgcagaagctcttaataagtttaatgagatcctgatatgtttaggctttgtatccccacccaaatctcatcttgaattataatctccataatcaccacatggagagaccaggtggaggtaattgaatctgggggtggtttcacccatgctgttcttgtgatagtgaatgagttctcacgagatctaatggttttatgaggggctcttcccagctttgcctggtacttctccttcctgccgccttgtgaaaaaggtgcattgcatccctttcaccttctcctataattgtaagtttcctgaggccttcccagccatgctgaacttcaagtcaattaaacctttttctttataaattactcagtctctggtggttctttatagcagtgtgaaaatggactaatgaagttcccatttatgaatttttgcttttgttgcaattgcttttgacatcttagtcatgaaatcctkgcckgttctaagtccaggatggtawtgccwaggttgtcttccagggtttttctaattttgtgttttgcatttaagtgtttaatccatcttgagttgatttttgtatattgtgtatggaaggggtccagtttcaatcttttgcatatggctagttagttatcccagtaccatttattgaaaagacagtcttttccccattgctcgtttttgtcagttttattgatgatcagataatcatagctgtgtggctttatttctgggttctctattctgttctattggtttatgtccctgtttttgtgccagcaccatgctgttttggttaacatagccctgtagtatagtttgaggtcagatagcctgatgcttccagctttgttctttttcttaagattgccttggctatttggcctcttttttggttccacatgaactttaaaacagttgtttctagttttgtgaagaatgtcattggtagtttgatagaaatagcatttaatctgtaaattgctttgtgcagtatggccttttaatgatattgcttcttcctatccatgagcatgatatgttttccattttgtttgtatcctctctgatttctttgtgcagtgttttgtaattctcattgtagagatttttcacctccctggttagttgtattttaccctagatattttattctttttgtgaaaattgtgaatgggattgccttcctgatttgactgccagcttggttactgttggtttatagaaatgctagtgatttttgtacattgattttctttctaaaactttgctgaagttttttttattagcagaaggagctttgcggctgagactatggggttttctagatatagaatcatgtcagcttcaaatagggataattttacttcctctcttcctatttggatgccctttatttctttctcttgcctgattactctggctgggatttcctatgttgaataggagtcatgagggagggcatcaaatctacacatatcaaatactaaccttgaatgtaagtgggctaaatgccccacttaaaaggtaaaggggggcaagctgaataaaaaagcaagactcaatggtatgctgtctttgagacctatctcacatgtgatgacacccatcggctcaaaataaaggaatggaggaaaatctaccaagcatgtagaaaacagaaaaaagcaggggttgcatcctaatttcagaccaaacagacgtcaaacaaacaaagttcaaaaaagacaaagaaggggccgggagtggtggctcacacctgtaatcccagcactttgggaggccaaggtgggcggattacaaggtcaggagatcgagaccatcctggccaacattgtgaaaccccatctctactaaaatccaaaaaaaaaaaaaaaaaactcgagggggggcccgtacccaatcgtcct

SEQ ID NO: 1553 - DNA, 1302 bp, Homo sapiens
  misc_feature (158)..(158): n equals a,t,g, or c
  misc_feature (749)..(749): n equals a,t,g, or c
agctggcatcaggggccggcctggaggtcagcgtgcagggcccgttcctgagtgtgtccgtcctgctgcctgagaagttcctcacccacacccacggcctcctcgggacactcaacaacgaccccaccgacgacttcaccctgcacagcgggcgcgtncctgcccccaggcaccagtccccaggagctgttcctgtttggggccaactggaccgtgcacaatgcgtcctccctgctcacctacgattcctggttcctggtccacaacttcctgtaccaacccaagcacgaccccaccttcgagcccctcttccccagtgagaccaccctcaaccccagcctggcacaagaggcagccaaactatgtggggacgatcatttctgcaactttgatgtggcagccactgggagcctgagcacgggcactgccactcgggtggcccaccagctgcaccagcgtcgcatgcagagcctgcagccagtggtgtcctgtggctggctggccccacctcccaacggacaaaaggagggcaacaggtacctggcgggttccaccatctacttccactgtgacaacggctacagcctggccggggcagagaccagcacctgccaggctgacggcacctggtcctcacccaccccgaagtgccagccaggacgcagctacgcggtgctgttgggcatcatctttgggggcctcgcggtggtggcggcggttgcgctcgtctatgtgctgctgcgccgcangaagggcaacacgcacgtytggggtgcacagccctgatgggagcagcttggctgtgagcaccaggccaagactcctgagaacaggcagcccagtcctgcgactyccgcatccccaggaccagacacctgggacctggatacttgatacctgggcatttaaccccctactctgtcatctcagaccccaggcaggaggcccagtgttccaacacccaagccccgtgctagcagcgctccgtgctcttccccaaatactcacggctctaattccccaaacctgaaacttcataccctgggattctaatacctatgtcctgagccctgacactcccacacctgagcctcagattccaatarctcaytccctararcctgackccggggcccctgacccctgarcctyarawtccaatacctyactycccagagcctgatgccggggcccctgacccctgatctacggaggcctgctcccggaccgtgcgggcaccagtgcagagctgccttggttcctggacccctgggcccatcctgggaccccagatggggtaag

SEQ ID NO: 1554 - DNA, 545 bp, Homo sapiens
ggtgaaatagtaccttgagtttaaatagaatgcatttaggcattgtagagatctgaaatagttttcttccactacattgttgaaatcaatgaagcaattagtttctcattcagaaatgtgcacactaatatttagttttgctttctcgtggataatattaagcacttactctgcagtttcctggaagttgtgtcaactgcagtgatactattcaggatggtgggaaatccccaaaaatatgtatgtgtgggcttgcttagattactatatttcatagttaatcttttgtctcttgcggtgctcatgatgtgtggggcacacggaaggcattgctgtagtcagtcattttggttttcttctatagccattttattattttagtgtattagttatgaagataatattatctatttgtaaattgctactttgtattttatgcatgctctgtaatttgatttttttttagttattgatttggattatattcacattctaataaacagttatagggggaaaaaaaaaaaaaaaaaaaaaaaaaaaaaaaa

SEQ ID NO: 1555 - DNA, 1141 bp, Homo sapiens
ggcacgagtctgcatcttgatgatcggtggtaggatacacagtttataaacgaacctgaggctaacaaatactgtcacttttcttaagtttacacagcctattggtggcagatctgggatatggatctgttcggtttcagagccctgctttcctttcactggaatgtgctcttcgctttagcccttttttttttttttttttggtttctgctagcctttatttgagaaaatttacacaaaaatccccaatgcaacatttacaagtgaatctgtataaatcccatatgcctgtttcccaaactgaaaaatggctttatgacaggggtccatgacaatggtataaaaatacttacttaaactgcatcattctcatttatattatacagaccattttggataatatgctcaaaagtggaggaaagcacataacacccctgttttttaagattatttgctcttgtatcagtcttttgtcaaaggcaaatacttttacttcttggataaaaccaaggtataatatcaattaacttttaaaccaaaagcacaaaatgtcctagttgatagttttggcatgagtaaagggaagggacatgagagaacatcagctcctacaaagcttaagtttagggtcacacttgggaacaaaagcatcaacaaaacaaaatattctcttctcctatcttcttgacattttgtcacatcagaagaacataactaacagagtagctttcattgctcctgaaaaggggaaaggcaccagtcagaaataggaaagaaaatcttgttaggttaatggtacatgatagaatttcacattaaaaagtttaatgatggaggatgggcgtagtggcttacactgtaatcccagcactttgggaggctgaggtcagtggatcacttgaggtcaggagttcaagaccatcccggccaacacggtgaaactccatctctaccaaaaatacaaaaaccagccaggtgtggtggcatgcacctgcactcccagccactctggaggccgaggcggaagaactacccgaacccaggaggtgaaggttgcagcaagctgagatagcaccattgcacttcagcctgggcatcgcagcaagactctgtcccaaaaaaaaaaaaaaaaaaaaaaaaa

SEQ ID NO: 1556 - DNA, 656 bp, Homo sapiens
gagccagcgtttaacgttcaaaaggcaaataactgatgaccaggcggcacattgttctgctccgtgagttctggcactgggaaaggtgtagattgtctagaatgacagcaattccgacgccccagtcagtcctgcgtgattgtggcgagggcgcgtctggcaccgggaaggtgtagatcatctagaatgacggcgattccgacgccccggtcagtcctgcgtgattggcgagggtgcatctgtcgtgagaattcccagttctgaagagagcaaggagacagattcccgcgtagtccaaggcattggctcccctgttgctcttccttgtggagctccccctgccccactccctcctgcctgcatcttcagagctgcctctgaagctcgcttggtccctagctcacactttccctgcggctgggaaggtaattgaatactcgagtttaaaaggaaagcacatccttttaaaccaaaacacacctggctgggctgtaaacagcttttagtgacattaccatctactctgaaaatctaacaaaggagtgatttgtgcagttgaaagtaggatttgcttcataaaagtcacaatttgaattcatttttgcttttaaatccagccaaccgtttctgtcttaaaaaaaaaaaaaaaaaaaaaa

SEQ ID NO: 1557 - DNA, 798 bp, Homo sapiens
tgagcgcgtggtgctgataccgccatggtcgcgggcttgatccccgcaccggccctagtcccagttttttgttggtttgtttctttgttttctccccatgaactgtttctgcaactctttttcaaaatgcgcctttcaggttctgtaagccccatgcgggcaggagcgacttgcgggatctcttggactcggcccagaggttgtcgaggacagcctggcagggaggagcgggagaaacccggccagcgctggggcggtggctcctccccggagtccccgcggctggggcaaagcggaaggcagccagaggcgcgcgggcttggcgaggaatcgctcgtggacgggcgcgaacgtggagcccttttatacgctccaggggcactgtgccgtcgggcggccggttagctcagttggtaagagcgtggtgctgataacaccaaggtcgcgggctcgactcccgcaccggccacggcgttagctttttttttttttttttccccgccgccaccccgccatgaactctttctacaacagtttgtgaaaaatgcgcctttcgggtactgtgagcggcgtgcgggtaggagcgaactgcaggatctcttggtctccccgcccagaggttgtcgagggcagcctgctggggagagcgggaggtaccaggcatgcgctggggcggtggctccgcacccgagtccctgcaccctccgccacctgcaggccactcaggatatccaaagcgatccacatctccagcctgggcaacagagtgagaccgtctccaaaaaaaaaaaaaaaaaa

SEQ ID NO: 1558 - DNA, 1221 bp, Homo sapiens
gcacgaggtggattccagagaagaaagtagatgggagcaagtgtccaatacagcaacagctggaaagaaaaataaagaattttgttctttacctaaaacacttcagttaactaagtgtgagtttaaaaactaaagacttgagaactttatcagagttaataagaacgagaaatatgtatgtacatttacaatacaaaattactatttaataatttacacatggcattaattctaattgtgtttaaatatcagagctttttcaggcttcattcatgtaatcaacagccacatgctaaggtactcgaaccagcagtggaattacaagatgaagatggcatggtccacctctcaacagtcataagctataatctaaaaaacagacaggcaggcaatgtctatatagagtcatatataccatgacagatatagagcagggcactactggaacacagagaagggacatctacccacttttatgtcatatcatgggctttctggtggaggagatacataggttgatacctgaaggacaaggaaaagcttcccagatagaggaaagaggcaaggcaaagagcctgaggtaaggaagagccctgcagagttccactccatccagtttggtgctagagcaaagggcagagtgcagtaagcggtgagaaacaagactgagtaacttgacaagaatcacattgacatgggtgtttttatttcatggtgaaaaatttggaacttttcctgagaacaagtgtaagccaatgacacagttaattagaggagatttaaaatgtcacctgtcaagtgactgcttatgaagggttattgctcagctaagtatttctgaatgagtcttaggtctgttggccttcaatctctaccaaaaccctgagaacttgatgatgcttttgttttctgagaatcgtttcagtgtgctggctgacagttccatgaggatggcaaaacttaagaaagtgtagagccaatgaaaaagagatgcacagacatcttgggaactgtttaagctttggaacatgatgaatttatggtgcataagtacagtcttctctgtgaaagtttttgttttcacatctttcattagatgtgtgtaagaaaaaaaatattgatgtagtatctactaacccaagaatgaaaaggaatgccatttgctatttacactttatttctaaaataaacctaaatttaattaaaaaaaaaaaaaaaaaa

SEQ ID NO: 1559 - DNA, 438 bp, Homo sapiens
cggcacgagccgacatctactgcgagaactgcaagaccacgctcgggtggaaatacgagcatgcctttgagagcagtcagaaatataaggaaggaaaattcatcattgagcttgctcatatgatcaaagacaatggctgggagtaatgtgcgaactttcccttctccttcgaatgctgttttgtgaaagaaactgtgaatgtaatggaaacgtaggagcatctggtgacagcctttcttgccctctgacctcaaaggctagctgcgcatagctcttgacactcccggccatctctgtgggtaaggtgtccctcggatctgtcctcttcgtgtacacagttgtttctgaaaattttcaatgagctttttctaacttctcaagttctagagaaagaattaaccaactgatgacttaaaaaaaaaaaaaaaaaaaaaaaaa

SEQ ID NO: 1560 - DNA, 442 bp, Homo sapiens
agccttcctcagcgtgcctcactgccactcccagagccagggagccccataaaacccacatcatgtcttaagagtatatctggctccttgaccagcaatcggccctgggagccaccaggtgggaaaagcgcctctgccagagtccaggccttgggatgacagacagcttgcccgcacactcgggccccactcaaggatgtagggccttttctggcccctgacccctccctggcatgggagcgtggggacggggctggccttgggaggagcggcaggggcatcacctccttctgctgcttctccctgctcctaccctcaagggcctgggggctgcccagctgcctctatgcccttctgggggtctcagcccactgctgacacttctgcaatccagagaaacactaaataaagcaatacgtgtttgccaaaaaaaaaaaaaaaa

SEQ ID NO: 1561 - DNA, 542 bp, Homo sapiens
ggcacgagcccaagttgattttttttagttttgaaaatcaaacaaagttcaaaaagtaaacatcacaggttgacatcccagcccaaagctgaggaaaaatgtctcttgttacattttttggcacataatagaatttatgagcattttcagtgttttgatttttttccccagtcactgttattccttaccctccagagttaggtgtggagagattatgttggcctgtttccatggtgacactgaagaaaagtaattttttaaaggaggtttctactgtgttatttcacatgcatgaaacatcaacatctatgctgtgtggctattacccctaaacataaagacacagaaatggttggagtattttatataaatagacaagtagggtgatattttccttggtctcgtgccgaccctagtaacaaaagtctctcagttacccagggcacctgggagagagtgagggaacagttctgttcagtgttaagcaagctcctctcctgtgaataaccttttctttaaaaaaaaaaaaaaaaaaaaaaaaa

SEQ ID NO: 1562 - DNA, 1060 bp, Homo sapiens
  misc_feature (1060)..(1060): n equals a,t,g, or c
gcccacgcgtccgcctcactgaagccaaaagaggggagactggagtgaaagtgagggcaaaagaggggagactggagtgaaagtgaactctgcttttgccctcactgaagccaaaccacagaagactttgaggaatgagagacaaatgaggtagagctcacctgtgctcaccagctccgtcaggtggtcagccgacccctttccctgggaaccccacttctctctgtggctggcttggttgtcgggggtgagatgccatattgattacagggcagcaaagaaccagtaccaggaatttacttgaccattccccttatttttcatctagaggaatctcggattcagccctttcattgctaagacaccttttcactgaggttcttaccagctcagccaaatctccactctgctatagcagaagcaataatgtttgctttaaaaagatttcttgacctatgccttttcttagaaagtttgatagattagttagaacttcagatcatcagatcagtctcaaatgggtttcttggaattttatatttgacaatatttatactataccaaactcatttgcagttcttaggtttgttggttaaaacatttttttaaagcagtaagtttatagaaaatgttttcatttaatggaaggctggggaatgtccagcatcaacccctatggcatgcattcccagtggccttctcatctgggcctggaacctttggttcagggcttaggggagaacaggccacatggcaacagccacacagtcattgccttcaacacagagccacgtgtccccaaacagcaatagtcatgcccttgtccaggctgggatctaattgatacaataggtcgttgactccctcctagtagagctatctaggtttgtctggaaagtttccgaccctggcttataggcaccacacctcatgtactcctcatggcttggatctctgtattcagcctttgttcagtccaataaactttgagtagatgatctcaaaaaaaaaaaaaaaaaaaaaaaaaaaaaaaaaaaaaaaaaaaaaaaaaaaaaaaacn

SEQ ID NO: 1563 - DNA, 1240 bp, Homo sapiens
  misc_feature (1039)..(1039): n equals a,t,g, or c
  misc_feature (1052)..(1052): n equals a,t,g, or c
  misc_feature (1063)..(1063): n equals a,t,g, or c
  misc_feature (1076)..(1076): n equals a,t,g, or c
  misc_feature (1175)..(1175): n equals a,t,g, or c
ggcacgagctcagcaggttaatgagagtcgctgtggggcaggcattgcaaataatggtgattgcatggtgcaccggcctttctttagtagcagaagcccttctgtgtaagggcaagagcagggccactgtgacaggggaggcccagaggcctcagccccacactgggctcctctgcaggttgcccctggacctaagagtgctacacctctggaaaacagtgtggagagcagtgctgtggcctggagggaggaggacgcagctagcaggcagttagtcggttccctgggcatttcctttgcctccataggcctccttgcctccagtgatctgttagcaggtgttgggtgatggtgccccctagtggacagtttgcacaagggcacccacactacctcagggcttttggttcctgcagtggcgggctcccccattgtcggctctgaggtacttctgagaagcctcgggaccagcccaaagctataaacgtagagctsgtgggctttgaagtactcactccccattgagggattattttcttctcctcagggtactcctaggaggccttgaattcttcggggcctctttagagtggggctggcctccctgggctccggtgccagccgggtgtagctactgggtgcacccaagattgtgaggaggggaggaggcgtgttgtgcacacgtgtatggggtgagaggcattataggtgtggcctggggatgccggcctccctctctccgtcaggaaagccagcattgttgccgcacctaggaggcagcaaggcgcggtgacaggaatgtgtcaggacacaaactcaggcttcactgccagctctgccatatgctcatggttacctgaagtgtatacaccaccgtgtgtttgttggctggggctgccataacaaaataccacagacgaggtggcttcaactacagaaacgttcttttctcacagttatggaggctgggagcccaargtcactgtgaaagcaggtttggcttcccctggggccgctctcccgggtttgtgctggccgnctttttggtctgnccttacatggnctattctctgtgngggcgccttcctgctgctcttcctcctcttataaggaataccacacacacacacagacacatacacacacacatatgccacacacacaccacacacacnacaccatacacatatgccacacacacacaccaacataccacatacacacatacacacacacacac

SEQ ID NO: 1564 - DNA, 826 bp, Homo sapiens
ggcacgagcagaggttaaactgagaggctcgtaattccctgggtcttatcttttactttaaaatgaaatggcatgtgctattttctagtcattagcatcattctctgtattttcagactatttaatagtcaaatgtatatgattctcccatgttttttaaaaaaaaatcttagtattatgtgaaatacaaaactagcatctcctttagttacagtattttttacttagtctaaaattattgtgattgtagtcattaattaatgtcctttgctattatgaaaatgaagctgtttgctttagtacttttacccatagaggaaatattttgtcatttataaagccgtattgctactacatatatctaaatgactttttattttttaattgttcttcattaattttagtgaatcttagtatgtgaatgtattactggaatatgaagcttaaaatggtttgttctatctcaggaatattgtaaaaaacatagttttcatactacctatgtatttctgtgatgtgtcttgtaaagtatagtcaaataaattattaataagattcatcattttagttatttctttttctcatactctacactattgacatctattttctcccataccgtcacaatttcacctttagctagttcaccaaagagcccaatattatattttcatttgactttaagaaataaaaagaggtcgggcatggtggctcacagctctaatgccagcactttgagaggccaaggcaggagggttgtttgaggccaggagttcaagactagcctggtcaatgtagtgagacctcgtctctaccaaaaaaaaaa

SEQ ID NO: 1565 - DNA, 1174 bp, Homo sapiens
ggcacgagcacatgtcaaggtgatgacgcacttccaaatgggttagacgttacctttgaagtaactgaattgaggagattaacgggcagttataacaccatggttggaaacaatgaaggcagtatggtacttggcctcaagcttcctaatcttcttggtcgtgcagaaaaggtgacctttcagttttcctatggaacaaaagaaacttcgtatggcctgtccttcttcaaaccacggcccggaaacttcgaaagaaatttctctgtaaacttatataaagttactggacagttcccttggagctcactgcgggagacggacagaggaatgtcagctgagtacagttttcccatatggaagaccagccacactgtcaagtgggaaggcgtatggcgagaactgggctgcctctcaaggacggcgtcatttgctgttcgaaaagaaagcggacattcactgaaatcatctctttcgcacgccatggtcatcgattctcggaattcttccatcttaccaaggagaggtgctttgctgaaagttaaccaggaactggcaggctacactggcggggatgtgagcttcatcaaagaagattttgaacttcagttgaacaagcaactcatatttgattcagttttttcagcgtctttctggggcggaatgttggtacccattggtgataagccgtcaagcattgctgataggttttacctcgggggacccacaagcgtccgcggattcagcatgcacagcatcgggccacagagcgaaggagactacctaggtggagaagcgtactgggccggcggcctgcacctctacaccccattacctttccggccaggccagggtggctttggagaacttttccgaacacacttctttctcaacgcaggaaacctctgcaacctcaactatggggagggccccaaagctcatattcgtaagctggctgagtgcatccgctggtcgtacggggccgggattgtcctcaggcttggcaacatcgctcggttggaacttaattactgcgtccccatgggagtacagacaggcgacaggatatgtgatggcgtccagtttggagctgggataaggttcctgtagccgacacccctacaggagaagctctgggactggggcagcagcaaggcgcccatgccacacaccgtct

SEQ ID NO: 1566 - DNA, 1502 bp, Homo sapiens
  misc_feature (477)..(477): n equals a,t,g, or c
  misc_feature (496)..(496): n equals a,t,g, or c
  misc_feature (513)..(513): n equals a,t,g, or c
  misc_feature (1279)..(1279): n equals a,t,g, or c
ggcacaggtcatctctggcaggaagattggagaaacggactcatgccatggactgtgatttagaatggaggacctcatttcagcttccttgcgctgaagtggagggccggttttcacatccagacttagtatgccacacacagacacacacacaccggaaacaaagttttatgtaaaaatatttttgcttactgcttactttaaaaagcagtttccttacgatatgatacgcactgtgatattttccactctattcctttattcagtgccaggcatgacctactccatagatttcatgacccactaatgggctgcagtgtgaggtttgaaacctckgcccagaggcagattctgcatgcttatttagaggaatgtctgtctagacgagagagattcatagaaaggagatcatttatggraaaatmcagatattcatggactttatcaccaggattctactttgtttctcctcctgcnttcattacccaggcagranctgtatcttcaaatgcntcgtgggtctgcgtacaagccctacaggtgccccaaagccatgtgcagagytaagcaccccatttttctcataacttgacccctctgcctgragctctactcccgctcctctggccctcctctgtgctgccctcccaaatcgccccagctaaaaatgttggcagtcccttccatacctgtctttcttattctgcacatccgctcatctcaagggactattgattctgcctctaaaattgctgccagctctgtgtcatcttttccattaatatagctattgccttcatcatctctaacctggagaacaggaagagaattcctcatactctccctggtctagaaggtgacagaggggctgtttttgtggggtgttccgatccaacctgatcatgtcctttccccctccccaagccctcagcatggcccctgcagtctcctcctcagcacctctccagctatggttcttctctccttgcacagtgcagccatttattaaccatgtcgtctactgaattcaaccaaacagagctgtatattttctctgtatcaggaaaatgaaaamgcctccaccatagaatcttaaaatgtgtttctttaggatcatcttagccactggttctcaaccatcattacacattagaaccacctggggagccttaaaaatacccaaccccggccgggcgcggtggctcacgcctgtaatcccagcactttgggaggccgaggcgggtggatcatgaggtcaggagatcgagaccatcctggntaacaaggtgaaacccgtctctactaaaaatacaaaaaattagccgggcgcggtggcgggcgcctgtagtcccagctactcgggaggctgaggcaggagactggcgtgaacccgggaagcggagcttgcagtgagccgagattgcgccactgcagtccgcagtccggcctgggcgacagagcgagactccgtctcagaaaaaaaaaaaaaaaaaaaactcgag

SEQ ID NO: 1567 - DNA, 814 bp, Homo sapiens
  misc_feature (480)..(480): n equals a,t,g, or c
  misc_feature (504)..(504): n equals a,t,g, or c
ggcacagcggcacgagtttgttcattctttcatgcattcacctcttattcagctaagacttcagctgctgttatgtaccaaagggtataggaacccttcccagtcttcctgagctgctcctagtccttatttagttcgttttttataccaatatagctcttcttcctccttgtcctcttcgtccatcaccacttcgtgtttttaggcttactgcaaatcccaactttcttgttcttgttttggtattgcaagcttgccggctggctccattggctcactcattatcctctccatcacattcttttcttcacttactactgagtgatgcatatgtctgtgtttgtctgtctctcctaatttagatttgattaacctgtatccccagtgccctggcatatagtatttgttaagtaaattaatggataaattcagaattgatcccttttttgccttctgtgctttattctccattatgttatncccaccttgtgctattgaaaaaanggaacttcaggtcaggtgcagtaactcatgcctgtaatcccagcactttgggaggctgaggtgactggatcccttgagcccaggagtttgagatcagcctgggcaacatggcgaaaccccatctctacaaaaaatacaaggattagctgggcatggtggcatgtgtctgcggtctcagctgaggcaggaggatttctccagcccaggaggtcaaggctgcaataagctatggttgcgccactgccctccagcctgggcaacagagcgagaccctatctcaaaagcaaaaaaaaaaaaaaaaaaactcgag

SEQ ID NO: 1568 - DNA, 1303 bp, Homo sapiens
ggcacgagagttccacctaaagatttctccatacataatgaactctaacttaccggcatgtaaacagacctgacctactcttgtgccaatctctgagtttcagccaatcacaggcagccaactgtttaatccctgttcaaataaggtaaatgccaagctgtaaccaacccagctgtttctgtacctcacttccattttctgtacatcattttcctttttatgtccataaatcttgtctatgtggcagctccagagaatctctggacctattttgattcaggggctgctcaacttatgaatcactgttcaattaaactccatcgatttaatttgtctaaagttgttcttttaacaccagaataatgtatatcataatctccctcactctaatcatgtggagattcagattttttcagctaatgaggctccaaccctgtctttgtttaaaaaaaatgaaaaaacaaaacaaaaccatgtcctagttttactgctaacagtatttctctgacttttctggatttcagttttgtacaatttctataataagaggttaacagacattatatgctagcctcacatgaatattacctcctgatacctataataatatgaataatatagagttatgggtaaggaacagacaacttattttacattcttgtcttttcctctccttttccttttcaatcttgccagcaaatcttgccatttaaaattttatatttaaaatgacgtatgcatttttctccatagggaatattagtggtctataaactagtcagtatttcttccctacaataaagcaaaagcagtagaggtcttttgctgtatcctatcaaaccagtaataatccctctgccaaaatcatcatctgttctgagtgtctactttttcatttgtctgatagctcctcttggcatatagtactctcttttgaaccttctgccaaacaagcacaaaataggacaggaaataaaaactctgaggccaaggtctccatggcccacatccccatctgtgagagcacaagagctattgctctcctcactaaagattgcctgatctatttgttggtctccaacaatttcctgagtgtatctgaatgaatgcaagttatttggaatgagtggttgctttttagtctcaatactggctttatactctacctctcgtcttttcctgttccatctcctatcatcctttttttaaagggagcatgtggaagtgaaaggacacggcggagccagaacaagagtgactgagttttgtctccactgcttacttgataagtgaccttggacaa

SEQ ID NO: 1569 - DNA, 1522 bp, Homo sapiens
ggcacgagggcatagtctttaagggctgcagactaagttcatctttgtgctcccgtgctgcttccatttcaaaggcttcgccagcgaatcccgtgagtcattcctggaaccttcaggagtctccatggtgatggggttgagtgggcctgggggaagccagcattcactccacttcctaacaagttcctcttttctgatttttttttcttttttttcaatagagactggggctgaggcttgagcttttttgtttttttaaacaaatcacaaaataagaatccctaagccttctttccccatttttttggaaacccattctagataaatatataatctattcttacttgcctctgttgagaccatataaaacaacaaagcacaacaaaaactgtgcatttgctttctttttttttttttcttttcctgcaagtgttttcagaagggatctggttttcttgttttcctcagtgaaaagatgaaaaggctctgggtaactgattgtagcctgaagcagagatgccggcagcatcaagcccagaggaaggcaggcctgtctagcctactaccgcccctgtggaggtctaccaggagcctgaaaattatgcccagtcatggttggcagaactgtgcatattcttataatccccacctctccttcattctgaaatgctctggaagarcgtagtatctggggtttgttagggaacgagcattaacgttaccattttaggtacaggaaaatgtagctaaatctacaggcatctatgggattttccacatggtaccaaaaattaaaatttgaaaccaatctaatgtgaattgatgaacataaataatctttgggggtataaattctgtgtcaaattccataatggtgttgtggccccaaagttcccacacctgagggtgaaaatgagttttcagtaacattgaaaacttgaattctgctgacttcgttatcccctcaggttgaagcaggacgtgcagcttcctgaggttctgcccccagatttctgggggtcttgggggcattctcaccatgtgctcccactctggagagtgcagccaatctctgctggtagcttaaaattgccaaagccttgcccggggctggggaaggaggtggggaacagcttttctctgctgtgttagtcgctgtgtggggccccacagcaaggctgcttgagccttcattgaccagctatctagtttttgcttccagtctgctctatcctccctcagccccagccttgcccctccaggagcacgccaggttaaagccacatctttgtatttggaatcctactttgctctgacaactgaggcttttctaacaggtcaagctcaccaaatctcattctgggttcttacagcgtggtttcttaagctgtgaaaccttttcaaaagatgataaaagccccagaaattctctcagaaaagtgaacatataggtaacatttcacagacaagctcaggagtttctgggccttcaggagagaatccttcctcacaggaattttct

SEQ ID NO: 1570 - DNA, 1572 bp, Homo sapiens
ggcacgagaggaccccgtcggggtccagatcaggtcactctgccccagtgctctcttgctgtctgctgacaagggggcatggagcatctcttcctcttctgttgccaaatagaaaagggtcagggcatggagaaaggtgaccctgatcccaaacctgccctcccaagtctctggtgttggggagggcccgtgtgtttgtgtaactgtgtgtgcatgttggtctttgtgtgcatatctgttttccaggtctatgtgagtccttgtgctcctgctcctcagctctccaccccaggttgcctctctcctgtgggcctctgtcttctgggaataaagcagggtttcctacttcaggggatgtagagagatgcccaggttgcacaggatgggatggggtgtggtagcaaaaggagggagaggagtcctttttgtgccaaatccctaagtgccgttcgggggccatgtgtgcagcatgactctccctgtctgtggcaggacccaagcgcttgcttaagccccagtgctccatgccagcacttgaactgtctggggtttgatggacagagctgaggaatttcctggcttccccagatagtgtcctgggacatggtatgctttggggctggggtacatggaatccctctgaggacctggatactggtactacggggtggggaagagaaccttaaacttggctttccccagccttcagcctgagtctagcatgtttctagctccccagtcccttgtgaagccttgaggctggcagaagggttaggagttgaactctagattcccttcctgtctttgccttccttttacccctttccctgcaacctccttgactctggcctgaatttgttggtgcctcagtttctctgtctgtacctatttaagccaaaggcactagcctgaattttgcttgaagatcactttgtcttggaaatgactagagaggcagaggagaagggtttccagagttgctaggtttgggatggaaggggcaggcagtgcacttgcccctcctcatgccccttctgacaccagctccctgtggaggcctggtttctgggtaatgcctcccttgggcatcttcatgcatcaaccaaatgggccatcaggtacttcattagtcatggcagaaggaggggaaaagacttgttttccagacagaaaatctactcccctgtccccagccatatccctggataggaagggataggaagagactacttggtgccatggggtaggggtgagggtataagtagatcagagtgggaagacctcagccttgggtggcttgtctctgcttcttgccaggtgggagggcctgtccacaccctggatccccgtaccacagtgccagccatgcccttcccctgggctaccattgtccctttcctcacccagttggtagaggagtcaggaggtgggaggccgtgggctttggttttataatgtaaccactgtgggggtgggggaggatggtgaaccatgtatttcagtgaaatatttaatatatttaaatatcaataaaatcaaactctttgtaaaaaaaaaaaaaaaaaaaaaaaa

SEQ ID NO: 1571 - DNA, 1631 bp, Homo sapiens
gatcccccgggctgcaggttcccctctatgtgtccctgtgttgtcatcatttggctcccacttataagtgagaacatgcagtatttggttttctgttcctgtgtaagtttgctaagggtaatggcctccagctccatccacgtccctacaaaggacatgatctcgttatttcttgtggctgctactgacatagcatctatcttgaaattcatttcattcatgcaaagttgtccagcgcttacacagaacacagagagcagagttgggccaaaggaccttagcttttatcatgtctcccttttttttgactgtgctaaagcattattttgcttttctgtttgttaccaaatcctttatcttcaatggttaattttttgtttatatatttggttaaacaggaaaactgtggtatgtctgtgtgtaatggtaaaatatatatcctgggcggaagacgggaaaatggagaagccacagacactattctctgttatgatcctgcaacaagtatcatcacaggggtagctgcaatgcccaggccagtgtcctatcatggctgtgtgactattcatagatacaatgagaaatgctttaaactctgaagacaggatacctcaccgaagaagccacactgatccaagatgggaggttttaaaaactctacagtgggaacttcacatatctcctttgtgccatatgcaaaaaatagtaaaaataataatttggtgcctttctcctcaaaatatcaatctttcaaactataataaagcctttcctataattgaaaaaaaaaacttttttgttaaaggtaatggtggttgttacttggcctttgaagagtgtacctttgtaagtatttgtaagaagtctatgtgaattaggaaatgtctgtctgcataccttttaggagcgtgtgaatggtgtcttcacttattatgtatgtttatctgtatgtatattccttattttgtcatatatgtagagaaaattgcatgacttgaggcatcatttaggttgaagaagttaatgcttaggatgcattctaggagaaaaaatcagttttaaaaacctttgttgttaacaaagtatatccagattggttaattttattgaagggtttttttctgtaattgataaaaatgtaatgacaacaattcaggcatcataaaatactgaactattgtgactttattcttagaattgctgtcttacattaaacatgtttttagggggaagttaggtaggagatagaaaaataagtgcccctacaagggggattaaaattacaagttaattcctaagagaaaaatggaatggcctttgaaggaaaaatgacccactatggctctcaaagtttttatgcatcatctcttcaatcctctaagaaagcctcttttcttaacttgataaagcagtggaaacccattttgcaatattgttttgtgaaaaacagggacagacagccaggtacagagactcacacctgtactcccaactactcagcaggctggggcaggaggattgcttgagcccaggagtctgaggctacagtgagctatgaacgcacacggcaccctagcctgggcaacaggttgcgacactgtctcaagaaaaaaaaaaaaaaaaaactcgag

SEQ ID NO: 1572 - DNA, 1902 bp, Homo sapiens
ggcacgagatcggcatgagtgtaacagtgataacctgatctgtttgttttaaagattattaccaagtgaaaaattcagaatgaatagaatttacactaacatgctatataaaatgttaaagtctgatgctgtgaaagcaatctagtgctatatttctacctcctcatttgtcttaattatttggtaagtgggattatgatgagtaactggaggggcttagaaacaaaaactggatgaaagagtatgcatgaagaaaagcttctttgataaatgtggagttcttcattataaatatatattcatgaattcacagataagtacttaaagaacagacagtttacttggcctaaaaatattttgatgtttactcaaaaagtacctcttcaggtcttgagaacatggaaaagaattgagtgcttttaaatactttttagaaagtaatcataaaagtaaattgaatttcaaacctatttggcttctgttttgtgaacctttgaactatatgtatgtgtataagggtatacacatacatatatggcatataacaagtgtacacatatacacataacaagtgtagaagtatatattacatacatacactcactctgtctggtataggctaattttgaagaactcccataagtttctgctgcttctcccataactgctgccaccaccatcagaatcataatcaaacctaacctttttgtttggggcaccaaatctgaagacaaaattaatttgcaccagtaaacttcaagctgctttctttcttgaaaactaaacgtttaacgtataatgtctgtttggatactgttccaaattgttgattgcatgtggttaatgttgcattagagcactttgcaattgcataattcattaatgttttgtgagcttgcatttgtgagttattggatgatcagactgaattttgtcaagtatcacattgtacatcttgcctagatgtcgatgactgcaagtaataatacagtttataatgaaactatctacaattcttgttttagcacatctgttatccgtaaaacacctgtaactagcttttttaatttattatttgaattttaggatagcgaatcactaatttttagttgctgaggttggcattttagtgattattaagcacttctgtcagtctttgaaaaaagaacgtattttttgtgctttgaagatctctgaagaatttcttttataatagaatgggcatgtattgtaacagttttatgtcaaatgatctgtgctgtagaaaaacattaacccttgttcaaaaaagaaatggataaacttggcctttctaagtggtaagaatgacctgtcactataatatactgtatgtttacattttatttaaatttaatctcttatgtatagggtgataaccttccccagaaacaacagtgattgcgattgttttctagaaacttctttaaagtgccacatttggcagtacaaatgagtctgagtgtaatagcccagagatttatatatagttgaatggttaaaatggtaaaatgtgccactgtgtcaagttacagtggcttatgtttttcatagtaattcaaatgaacttcctatttttgatagtaaatgtcatttaatagtatacttgccatttgagcctcactgcaaaattagtgcagaggagaaaacaatttttaatgtaatcttgattttacctcatatactgtacattccaaaaactctaaactttttaaagattatagatacactaccaaacatatcaccttaaaattgtataaggctgaatgaacttcatacaaatgaaaaaaatctcataaaaatacataaactatgtagcaaaagtatctgtaaaatccatggaaaataaaagttgtatcattctttttgaaaaaaaaaaaaaaa

SEQ ID NO: 1573 - DNA, 2054 bp, Homo sapiens
  misc_feature (428)..(428): n equals a,t,g, or c
aattcggcacgagtagaaacgaaatttattttaaagcagtagatggtggtggtcaaaatagtaatgaatagtgatcagcacccaagattttcaaaattatgtcaaacacagtgtccaagcagtaatatgggatttaaaaaaatacatttatgggggatgaaatgagcataaggacttggtcatccacacataactactccactgagtaagaagttccgtctctcccacggctggtttgtccccacttccggacctgtcttctttctctgttgcagttggcaaggtggaaggtttaaggaggaaagacttacacaatattgttgtcatgcaacagagcccgtgcatgtaaatgtattatgtgcagaaaacaaacccgcttgtgattgcgatggggactgtttccataaactttttttttttttacaagnaaaggaaagtctattgaattttaaagagccagaaaactgccggatgtgctgacagctagaggtgtcttgggtacaaaacacgccaaatgagccttccctgcattcactctaatatccttcatccaaaagcaggtctttcttcttaaagttcagttttcattatgacatagagatgcatcttggtaacaaacagttagcgtacgtaatcttattaatcttactgtgtccgtcagttgcatttttaaaatagtggtaggcgtatctgcaaacgtacacccaacgtctctgagaaggatatgggctcatccagtcttcatcacgagatccacatacatctcttcatctgagtactatcacacagaaaagactgacggcttgtgacaattgtacaacattgctctttacccgtacatagctaagcaatgttgatatccatgttagtaaggactcaacattcattttcaggtgtcgtttcacttttgattcattttctctctgtgtttatttatttatttatttarartcytgrtctgttcattcattcactttttaaaactaaattataagaaaaaagtgtatatatcggaaatgagaaatataarataaatatcattactactgagaaattgtactgkaattgagragggagaagtkgttkgtttccctttgatctyccccagsacttagcaaaaagccttttacagaaaaakgaagataaacattaataaacaggttgatcagttaaatggtttaatgaaacaaattagtacatctatggaactctttttccatccgtgtttgctaaatcagaggaatgactaattacagagtgctcaggctaattaagaggggactggtaatgtcctaggagaactacagataaggttaaaatcatgtccaacataaacttctgttcccttcctataagcaaagagattaaatgtgtttgggttctcaaaaatcccaggctcacatctttacatttctgtggacaaccaaaaagggaagcaatcaagggtaatagatactgtgtaaactgggttaaaaaatccgtacagtgccagggatgtaataaagatggtctttcattctgtgaaaatataatgaacttcctcaaggcaaattacataatatcatagaactcaatgtttctgctactatcgggtaaggtgaccatacacagtcgggagsctgtggctgcatgcgaggtgtatgcttcgttcctcagggttattgctgcttccctcatctcagctgagcagaaatattacctagctaaaaaagacactctgggctcaaacagatgtgaaaaacacagcaaaactaggacgtgatgctcatctttcttttctttcctttctcctttggagtgacacataaaccaagcagtcaacatttttttttttttggtgtgtttattcaagtaagcaaagcctttttcgtatgagaaatgagaaatgagaaatgtgcctgcttctcatgactgatagaaacaattccgcatgtagtcataagagccccagttcaaggacgtgcctattttagtacaggcctttgcagaacgagagataaatgacccactcagaacaagaactcaggaccaaaaaaaaaaaaaaaaaactcgag

SEQ ID NO: 1574 - DNA, 1003 bp, Homo sapiens
ggcacgagggcatgttattttcatcgcaaagttactgtaagctgggagaagtggcacacacttgtactcccagctactcaggaagcttaaggtgagaagattgcttgagcccaggagttttgagaccaacctgggcaacacagcaagaccccagctcaaacaaagaaaaaaagttattgaattttttatttctatggatcattttttgtagtttcttattcctttcacccttcattcccacttttgatcccatcttttatttatttagttttattaaatgtatatttgtctgataattctgctatctacagttttttgtggacctgactcagcatttctttgtttcttcggattcagactgttggtggcttgtgattttagtgatttttggccgtgaacatgtttcttggacttttgtctgtgggaattctctgtgtactctgtataaattaagttacttcaggtgttttgcattttcttttgccatgcacctggggcctgggtcactacccttctggtaccacttaaaactgaatttttgtcttgggtgctcgtactgatcctgtatgagtacaggtttatacttactgtagaaatatggtgtttgattatggggtattgtcccagatggtgctggagtattaatatgctctctgttaaacttaatgtgttgtccctgtaaaactccaaaattctgaattccagaatactactggccccaaatgtttaagataagggcactgcctgtatttgtttctgcctcccactattttccttagtttaacacaaactcacctttttaaaaaacattttgagagaattcagtattgggaagagtttctaacctgtttctggaaatggaagtccaaagtctgtttctgtaattgttttttttttgagatggagtctcactctgtcacccaggctggagtgcaatgacgtactctcagctcactgaacccgggaggcagaggactgcatctcaaaaaaaaaaaaaaaaaaa

SEQ ID NO: 1575 - DNA, 1832 bp, Homo sapiens
ggcacgagaaacatattcaactgaagctttccaataatctttatatcaagaaagcatgcgtcttgtcagctacattgttttcttagatggatttctcctgttaatcctcaaatatctgaacttctgtgttacccaagtgtcttatacaagcttctggtgtctaggacaaatttatggcaaataaaattagcaaaactgaactgggttgaactgaacaagaggatgggggaattgtgcaaatacgttgttagtagaaggtcaatttaaaatagggactagaaattatttgaagttttctttattacggattcaaagacttattttgaaagttggaaggagaagggagggaagagagcagagggagaggtgtagtcaagctcttgaatataactggtggtattgtgggcagagatctttagttcaaatccacgtattttttaaaagagagaaccggaggtagagcaatgatcagatgggtgcacagaccagtgccaatctgaacattgttaatggcctgtgacatgatgagcacaggaacaggcatgaaagatattgccatacaattttaatttatacaagtattggcccctcaagtggttggaaattttttttttaatctctttttctgaacagggtcttactctgtcgcccaggctggagtgcagtgatgcaatcacggctcactgcagcctcgacctccccagctcaagcaatcctcccacctcagcctcctaagtacctggtactacaggcgcgtgccaccacacctggctaatttttgcatcttttgtaaaacagggttttgccacgttgcttaggctggtcttgaactcctgaactcaagtgatccgcccacctcagcctcccaaagtgttgggattacagacattagccatcacgcctgccctagaaacagttttttaataggagatatttgagaggcattgaggtaggagactctatgacatgccctcagaatatcagaatcttcttagaaataaactaggaaatgcagatgtttttaactactcagacttttgaggaattaatccttttaaaacatttttgttaaagttagtgtatcagtaagaaacagacctagtttaaaaggaataatcaacaattttataaaggagatggcttattcaaccatagcccctccaacatatctactggaaattctgctggttaactttatctctctctctcttaatttagactttcaacctatgaaaatgtaaatacctttgaaaaaactaaactatcagtcatttacatcctctcatgaatgaaatgcagtgtagggagaggagatggcaggacacagcaaacaggacacatttgcctgcttctctcttgcctaattcttcctgacctgtatttactgatgcttaataatacttgtaagactctaggggttcatttcccatttcagcggaaagtacttcactcaacaacaatattctcaagagtcttctactggaagctagaaagaaataggaatttaagtccatagaatgaaggtagttattcctgcctgtgttgcccacctgttcacaaaaagtacctttatgcttgaaaacattaggttctttggttactgcactgtagtttcaaatggatcctccagatggcattcatgtcttactcagaaagggcactgccattgtccccaaggcttctgtctactaattctattggtcttgtgttttgcttgcttggcaaaaaaaaaaaaaaaaaaaaaaaaaaatggagctattttctgtctatataaatctacttatatgaataaccattaaagtgattttgtataaaaaaaaaaaaaaaaaaaa

SEQ ID NO: 1576 - DNA, 2352 bp, Homo sapiens
tcattgtatcaacagtacacttgatctccagtacagacatatggtggaacagaagcctggatacaggactcagactcttactgagttggccaggagcagcaggcaccacagcctgtgtgtgtgcagatacagtgtactactaccaaatggtgcccagctggaagtttaggtctcctcctacctggatctcattacttgggccgttttcaggatcgtttaatgtggataatgattctggaatgtggctatacttactgctctattaacattaaggggttagaattgcaggaaacatcctgtcatactgcagaagctcgcagattgatgaagtttttgaagatgcttttgagcaagaatacacaagagtatgttcccttaatgaacactttggaaatgtcttgacaccctgtactgttttgcctgtgaaattgtattctgatgccaggaatgttctatcaggcataattgattctcatgaaaacttaaaagaatttaaaggtgacctcattaaagtacttgtgtggatacttgttcaatactgctccaaaaggcctggcatgaaagagaatgttcacaacactgaaaataaagggaaagcacctctaatgttgcctgctttgaacactttgccacctcccaaatccccagaagacatagacagtttaaattcagaaacttttaatgactggtctgatgataatatttttgatgatgagccaactatcaaaaaagtaatagaagaaaaacatcagttgaaagatttgccaggtacaaatttgtttattccaggatcagtagaatcacagagggttggtgatcattctacaggcactgttcctgaaaacgatctttacaaagcagttctattaggataccctgctgttgacaaaggaaaacaagaggacatgccatatattcctctcatggagttcagttgttcacattctcacttagtatgcttacccgcagagtggaggactagctgtatgcccagttccaaaatgaaggagatgagctcgttatttccagaagactggtaccaatttgttctaaggcagttggaatgttatcattcagaagagaaggcctcaaatgtactggaagaaattgccaaggacaaagttttaaaagacttttatgttcatacagtaatgacttgttattttagtttatttggaatagacaatatggctcctagtcctggtcatatattgagagtttacggtggtgttttgccttggtctgttgctttggactggctcacagaaaagccagaactgtttcaactagcactgaaagcattcaggtatactctgaaactaatgattgataaagcaagtttaggtccaatagaagactttagagaactgattaagtaccttgaagaatatgaacgtgactggtacattggtttggtatctgatgaaaagtggaaggaagcaattttacaagaaaagccatacttgttttctctggggtatgattctaatatgggaatttacactgggagagtgcttagccttcaagaattattgatccaagtgggaaagttaaatcctgaagctgttagaggtcagtgggccaatctttcatgggaattactttatgccacaaacgatgatgaagaacgttatagtatacaagctcatccactacttttaagaaatcttacggtacaagcagcagaacctcccctgggatatccgatttattcttcaaaacctctccacatacatttgtattagagctcattttgactgtaatgtcatcaaatgcaatgtttttattttttcatcctaaaaaagtaactgtgattcttgtaacttgaggacttctccacacccccattcagatgcctgagaacagctaagctccgtaaagttggttctcttagccatcttaatggttctaaaaaacagcaaaaacatctttatgtctaagataaaagaactatttggccaatatttgtgccctctggactttagtaggctttggtaaatgtgagaaaacttttgtagaattatcatataatgaattttgtaatgctttcttaaatgtgttataggtgaattgccatacaaagttaacagctatgtaatttttacatacttaagagataaacatatccagtgttctaagtagtgataatggatcctgttgaaggttaacataatgtgtatatatttgtttgaaatataatttatagtattttcaaatgtgctgatttattttgacatctaatatctgaatgtttttgtatcaagtagtttgttttcatagacttcaattcataaactttaaaaaacttttaataaaatattttccttccttttcaaaaaaaaaaaaaaaaaa

SEQ ID NO: 1577 - DNA, 1050 bp, Homo sapiens
ggcacgagtttacaggcagggatataagcataaattttcatgtcaattctaaagtcaatgggatgagttcctaactagagtcagaaaactctgttaaataataacacttctttgcatttggaggatgcttattttccaaatcatttcacagcaattgccttatttgcttcttgcaataaccacaggaagtcaggagagcagatatttttattcctgttggacaaatgaaaaaaaatgaagcatggaagagttaattgaatcacctaagattccacacacgtaagkggmcagagttctagattagaaactctcttctgattctcctatgctaggtgtaaaagagtagtcaagagtggttataggtacagcttaagacagacctgtactgaaatccacttgagtccggctacaacttgtccaggtggatcttgagtatttttagtagagacgggggggttcctcacgttggccgggctggtcttgaactcctagcctcaggtgatcctccctcctcagtctcccaaagtattgagattacaggcatgaggcaccacatgtggccaatagctgtactttccaaaaatgtccaagtcaagaaagacaaagtaaggctggagaactgttccagattagactaaaaacacatgatcctgaattgaaaaaatatgatcctgaattgaaaattatcttgagaactgaaatgggttaaatgaatactatttagacaattgccaaaatttgattatggactatattcgtttcctacggctgctatggtgaattaccacaaatttggtggcttaaaataacacacatttattttcttatcgctctgaaggtcaggaggatgaagccagtttcactgggctgaaatcaagatgttaacagggttgaactccctgtggactggtaaagcacacattatctccagtttactcttttttttttgatacggagtttcgctcttgttgcctaggctggagtgagctgagatcgctccaccgcactccagtctgggtgactctgcctcaaaaaaaaaaaaaaaaaaaa

SEQ ID NO: 1578 - DNA, 746 bp, Homo sapiens
gggaatgctgaccaaaacttgatttcatcagcttcatgaaaaggactagtgtcattaacctgttgaacagaattggtttattaaaaaaatcatttccagtagtgtgaaacctttacgagtctttaacatctaaatgttatgactccttgtaccttaagttttccagtctttcttatttatatcatctccaagtacctctggctcctttcctcttgctcaccggaaccttagttttcctcaacagaatgctttgttaaagtagcccacaggtgcaggatccatagcaccgtcgtgcagactagcagcccaaaggtgtgtttggtttggcttatacggtgttttgctttttaaactacttgccataatttaaaagtggcaacactagacttaaaaaaaaaaaagtctgattgcccatattagattttttttttaattcttcacaaaatctgctcttcctgaaagatcaaagtgtctagaaagcccaaacatgtattcttaacatagtaggcaccagctgaaacatgttcagggcttctagaacactaaaaaatttggcttaaaccagtgttcagtctggtgccaaacttcgaatggaatacaaattcacataatctgaactttgttcacaggttatcctaatagagtaattcttcactttgctctattgaactgtcttaaggatttgtttaaacagctaagttacttgattaaaataatgataaaattgtaaaaaaaaaaaaaaaaaa

SEQ ID NO: 1579 - DNA, 2608 bp, Homo sapiens
cccccgggctgcaggattttatgagtactgttcattgagagatgacaatgaagattagatgaaattggaaataaaccaacattgtttacattccaggagacttgtagctcagccacacacgcagtaatgacctgtgcccgttcgcctctggcactgcccacccctctttttttttttcttctaattctgtactcacaaaagagaatctcattttcttctttcttccattcccttaaattctgagtactgtacatatatttctgggttcccacgatgatgtgaaaaactaccagactgttttttgtcttctcacaaagacaagaaaaatcagggcattttgtgagtgccttaagatcaaactaacaagatctgaccctctcccctcacagtgagccactgccccacttcagagggtaagagccaaaagcctcattgtgaaaggcactggacttggaccagggacaccatcagggccttggttttctcacgcataaaatggagagtggattaatcgccaaagattcttctgatctgacattttgaaattgtgagagaaactagatgactgtaaacttggtcacaggcctggttctggcagttctttgcggacttttttctagcattatgccaaataaacatgcagtctcagtgtgctctcgcatgtatgaatatctagtcctttctgtggttctcagccaagacataaaaactaggactcagagcacatacaaaaccagttatgtttcggaaagagggaaaagagtccccgagcccggatcttgtgctgcttttctcactgacgtgttgccttttttctttacaaaatctgctttgatacttaggacctctctggactaatttctcttcctagacagctcagcacagctattgatatgttagaggcagtatccttaatattcattctaaatgagttaacgacttaacttgaaattgggcctaaggagtgagaactacaaaaatacaaaatgcttgtccaggactcagccatgcacaccttgagcagcgccggcaggaggcacggaaggaactgtgctccgttctcctcactgtcatggtgccaccagtgtctgatgaagggcagagtgacccagactgcaggcagtaactgacttcacacagtccctggcatttagtcatctgtgattgttttatcactctggactgtgcagagccacctgccaccgagatctgcattccgactgcctatgaacgggtgtgggggccgggggctggcttgctgaagtcttcaacttgcactcggagctcctttgatacctcagagctggctgtcaggtggcagctcacacccagactcactggccacacctcagcagggggggagtcgagtgtcagtctctttctgtgaaggctttttttttcctttggcctgggaatttttcccatttttatgaaggggttttaaattgtttcattttgtgtgctgtgcttcaaagccttaactgtcaaatcttgcattatcttgtttgtacagaaatatactggcctagcagaggcaaaaaaaaaagaaaatgaattttattttacttgtcacacctgtcttaataaactggagttttgctgctaaagaactcttctctctgggggcagagcttctatttatggcacatagacatcagctaggcttttgggaatcgtttgtgttctttgtggaaatgtcctttagaagcacccatgaagtagtgtgttcagactgtgcacacagaaaacaggctctgccttcacatgtgagacggtggacttttcctctggacaaaatgacagcatcctggcgactccacagtggagctgagcgccactccctgtagccgatctgggactgaaacgcttacacctctgcctcagaaggagtcccccatgccctgcctgaaatgacttcactggacacagcggggctgcagctaacggggtacaggtaggagctaactaacttcacccctgagtccacttgcggggtaagagataaacagtaacccttccaggagcccactgacgttggagtgctaaaaatgccccttcagggggaaaactgcattttctcttccaaaaaggaaaggttcttccaggcgagaaacctgtggtctagaaccacagcaagaagaggaggcatgctggcctgcaccggaagactcactttgtctgccctgcgccagcctcacctcaccctgcagttcccgtttccgccatggatgcctcatcaccaaccctgaccttccccctcccaaccctttattcatcctcactcccactcatacccgcctccctggacagttccctgctgcagagttctttctgctttcagccctaccttggtggtgatttacctgaaaatcttcacaactgatcattatctccttctctttgagacctgactgaaaaaattaggtgtgcacacctgtaatcccagctacctgggaggctgaggtatgaggattgcttgagcctgggagtttgaggctgcagtgagctatgattgcaccactgcactccaacctgggtgacagagtgagaccctgtctcaaaaaaaaataaaataacataaggaccttaaaaaaaaaaaaaaaaaaaa

SEQ ID NO: 1580 - DNA, 1067 bp, Homo sapiens
ggcacgagaaataaataaataaaataataataatgataatatgatagcagctattattttatcgagggctctgccaagtgctttatatgcgctaggctctataatcttcacaacaacctttaagaaagactctgttaccatcttcaatttacagatgcagaaacgaagcacaaagatgtcatcaaagtgtctgaaggtcacagggccagtaaggccatgggaaatgtgcatgttaatctgggctctttccattctgctcattgcttctcaccttcccttcctttctaggtaccagggggaacagagtaggtagagactggtctcaggctgcctgaaggctgacacagacccagccctgaccctctcacaacgtcacactgcatttgcccccagctcctctcagtctagaaacctgcaaaccccaggatcctagtgtctaagcacaggccccagtgtctgttaggtcaccccattccaggcttggatctagccccaccccctccctcacatctcccacctcctcagtcaaaagcaaagtcaagacaggcagccaagccagtcccagcagaactccttgagaaaggtgacatagcagcagcaacccagcctgagaaagtgcctgaagccacagcagccaacctgttcaaacagatcacctcctcctccaccaaaaagaatttacctggaagggtggtttcaaaacaaaagtccaggaataggtgaaaggtctactcagggaaactaaggatgggaaggaaaaaaccactcctgaaggaatgaggtgstcaccctataatcccagcattttggaaggctgaggctggtggatcacgagtccaggagttcgagaccagcctggtcaacatagtgaaaccccatctctacaaaacatacaaacattagctgaatgtggtggcatgcacctgtagtcccagctacttgagaggctgaggtgggaggattgcgtttaggagatcgaggctgcagtgagccgtgattgtgccaccaccacactccagactgggtgtccagagtgaaacctagtctcaaaaaaaaaaaaaaaaaaa

SEQ ID NO: 1581 - DNA, 2466 bp, Homo sapiens
  misc_feature (1348)..(1348): n equals a,t,g, or c
  misc_feature (1449)..(1449): n equals a,t,g, or c
  misc_feature (1457)..(1457): n equals a,t,g, or c
ggtgagcctctgcacccagccacagtggtgactattgaacaaaactgagtaatagtcacatctcctgctcccttgaatgcagaagcaattgtacttcagggcatggtgttatctacttgcaaactttttattttttgatcttacagcaactacttttgatagtacctcactaaaaacatcagcaaggagccgccaatatacattgaccactctggttctaactgctttccccatagctagtctgcctttcaaattgttgctggtgtcagttttacctagtgattggtcaaaacataacaagggtctctagtttttcatcctgcaatatctgtttccacactgccggttgcctggcaacacaataccagagccacatattttagatttttgttatgatggcacttttccattcctacgtatcagtcagctagagctgcataacaaatagcaaagactgggtggcttaaacaaccaaaatttgttttttaacagttctgwkggccaaaagttcmaggtcaaagtgttggcaagtttggtttctcctgaggcctctctccttggcttgcagatggctcccttcttgctgtgtccttacactaggcacttgtgcccctaatgtctccctgtgtgttccagtgttctcttataaggacaccagtcttataagattagggcccctctctatgatttcatttaaccttaattatctcctgaaaggccctatcttccaatatagttacattggggctttggccttcaacctataaattttgggggtctacaacttagtccataatattctggtactgaatttaaaactattagggtgtcggctaagccactgtaacagagaaacccccaaatactgtagttccaataagataatttattttctttcttgtagccatcaggaggtagcccatgaaattgtccagggacttatatttattctaccattatttttactctattattattttatattattattatacttattctaccatttattctgccattccctagagtgtcctcttcatagtggtcaacctgtgggatggagaagagaaaagtaaagggcaagcacatacatttgaataaaatgagatagaagttgcacacatcaagtttgkatattcttttggtaagaaattaactgcagaggaacctcttgctgagcagccatgccttctaaaacctgggacagagattttattattaaaatgaggaaagggagaatgaacgggggggaggattatcagttccttcctacattcctcttctatacatcttacattytgtattgagtatgagaagagacctgaaatttagatgattctttacattnttatttatctaaaattgaagtttacctaatttagtttaatttaattattttactgatttaaattaatcagattttcttaaaattccrgtaaaagaaaaaancgtaaggnaagctttgttgctttgcaaaatagggagatatttcagaaggtaagggaagaggtctatcctacagtatggagtacagaagtgggacttagagatagccaagagagtttgaaatattcaaagaatatatccaatataatctgtagccttttttaaaaaaaaaattagaatttccatctctctgaatgtattccagttgtaaaaaaaaaatgtattgagtttcccatcatatggaagtttttaaaattgtaggaaataaaatattcagaaggctacacaaggtattaaaaaaggggacagggatataatagcttactagcttattagaatgaatttggttccttatgagggataatctagagaaaagaggcatagaataagatctttggaaccaaacagtctgagtttgaatcctggctctcccttttggcatctgtgtgatcttgggcaagctacctaatttctattacagctttgttatctcaactgtaaaatgaggctgatattgatatatcattggagaggactaaatgagaccatgcaaaatgtgtacttggcacagtgcctgatccacaaatactgatgatgatgatgatgatgatggtggtggtggtggtggtgatgatggtgataataacagtgatgatgatggtagtatagcattagtgcagcaaaaaggaaaaatggactcaaaactaatttttcctaaaaatttgtgcttttatttatcagatgcttctaacttagtccccaccagtctaagactagaacaatattgggattttccttttcagaagttctatcaytggcaagttgtttttatttccagaactccaactcagaagaaatcacctctgaattcattgtctatttaataaagtcaagattcttcaaattctccattttattcagtattaaataactttcaaaatatggctatcttgaaagtctccacttcctcatacttagcaatttccagcattatttaaaaaaaaaaaaaaaaaactcgag

SEQ ID NO: 1582 - DNA, 2549 bp, Homo sapiens
ggcacgaggagctgctccccccagcccactcctacctcactccatctgcgctcaccctgttctcatcctgccccactgtttgacttgactcccagcacaggcgccctggcacagcagggatcttgcagcgattccggttgcacatccacaggggcttctaaagaatgcactcaggacttctggcctcattcccaccccatggaccttacctcacccttttctccagcaccattgggccaaaatgagaccttatcaaagaaagaacaggacgcttgcctttttcctcaggttcttaattatgtttttagttttttgcgagtctctctgaaatcctgaagatgtggaagagtttgactaaagtacataaatactcagagctctttttttttttaaacatccaggatctcaagggtgttcagaaccttttcaaaaaaataatttagccatagatgagaagcagccactaggcccttccttgtaaagtggcccctgtgtggggatgcttcaagccaggtggaaggacggctggactgtgataggagtgagaaaagaacagatctttttctttgagggatgtgagcccccttagttgtcagacccagagaggcattgaaatgtgacagttgttacgtttcactccccaccctgacctaagtaatcgcctgctctgtggactctaggccagtagcctgtaaactctgtatattaattttgcctcagtttctttaggtcaatacgaacaacagagcggtggctgactacacataatgtttgggatcttacctgaagagcttctgcaaggaggcttccagatgtttaaagtttggcttgagttggggtgtcctcagaccccactgacatggagtagtcctcattctgagaacttggtatctgttatgagacatggtttggctgcgtgaggtggtgattggcttctcaccatgacaagccaccttaggctgccaggagaagctcttcctgggggaggggctgcccctaggtggagtggaaccagatgttggggtctcctgatcacattttctgctttacagactgatgaagagaagcagcagggcttacctgtggtgatgccagtgtttgacagaaatacctgcagcatccccaaatcccaaatctctttcattgattacttcatcacagacatgtttgatgcttgggatgcctttgtagacctgcctgatttaatgcagcatcttgacaacaactttaaatactggaaaggactggacgaaatgaagctgcggaacctccgaccacctcctgaatagtgggagacaccacccagagccctgaagctttgttccttcggtcatttggaattcctgagggcagccagagctccttggtcctttcagtactaggcagaacagcccccgatctgcatagcctgtgaaagcccacggggacatcagtaaccttctgcagccaccatccaatgccattactgcaaagtgagacttggccactgacctgggcctgctgcaggagctcttcagaaaggcacatgaggaccacggtttgctcagtttctggtaaaacacaagtctggagtgcccctgcaaagggtattgatggacttcctgccagtgacagagcatgtctattgcaacaattctctcagttacgttcagcacttaagaacggctaatggcaataggatctttagcaactttttcacatcatagaaggtgcaatcgctcacttgggaacactactgagagtgacttctcttttaaaattgagtagcagatgaaaaattaaaatttgaacttgattattaatatcaattaaaatgttttatttattttattaaaagctcaatattttctatgaattcaaaaatacttcagagccaaagccaacttcaaataccgtgaccaaatttacatgattcatattcattatgcattacttggtatacagacttattttcataatgcaaattaataaaatgacacttttactgcactatagaaatattcatgtatgttaaacttttctgattgaggctaactggaaaaagctggggtcgtattctaagtgctaaagaaggctgcttctactgtatagaacccagggctctgaaacagctctagccgcctaatgcacttcacaggtaactccccaaggtaaaactagactctcttgttggttcgcaaagaaaagttaggacttaacacttttttctaaaattttataattcaatttccaaaagtctactctattttatactgtttctacaaaatattccttataaaaacaaagaacaaaaattgaatatttaatgaattgacattttataaccaacctgtttttatctacggtgggaatctttgatgccagaaatttataaagaggttctgtatcttcacaccttgaataagcataataccataaaaaatgacacttgacatgtcaatgtatttgtcatttcattttaaactcgtatttgtggtttttttcccagataaaaatgaaattaaaccatttctttttaagaaaaaaaaaaaaaaaaaaaaaaaaaaaaa

SEQ ID NO: 1583 - DNA, 1068 bp, Homo sapiens
aattccctctcagcagaacacactaccagtgaccatccccactgtagggttagctgagaggccctattaggtacagaaatggctactattttaattttgtccatgcatctccatttacttcaagcttctagtaaaggtctctgtttctgcactctcccctccacatttctatacgacttttaaaatgtagtttttttcaaatcattttcccccatgatattttctctagtatctctacgscacttaactaaattttcctttgttcataatttgttagaacaaatatttactgagcatctactatgagccagatgaatgttagacttactagaaacacaaccataaataagacagacaggtagctgctcttggaatccacattacaatagaaagacaaaatgcatgattagatacacagacagataaagcagtcaaatgaacaaaataagttttaatagtacacacaggaaaaaaggagctgagacagagaatwacaaatagggcttgaactgtgaactggggacagaggaagctcttctgataaagcgaccttgcaatgcaacatgtataaaggagctgactacaaaactgggtttagaatcaggaagacggggcagagttctcagcacaggccaagaactaaaggcagaaagagtgtagccttggggacgtggaagcctagagcatttggaagacgcaaacaagggagaggggagcagctgacaatggaagggaaggggaccatcatgcagcacactggacctgggtcagcaaacttctgtaaaggggaaagtagtgaatgccttaggcttcatgggccgtaaggtctctgccacaggatccaaatctacagctgtagtacagaggcagccactgactacatcgtcagatgaacatgcctgtgttccaataaaacggtatttatggatactaaaattgaatttcatataatgtaaatatcatgaaatagtaaacatttgaattttttttttctcttaaccattcttacctcatgggccattaaaaaaggaattcgatatcaagcttatcgataccgtcgacctcgag

SEQ ID NO: 1584 - DNA, 1546 bp, Homo sapiens
cgtaaaataaactgatatttctgcagctctacgctgtattcagcgctaagagcaggtagtcaaactgtaaagcaaaccaggtgtcatgactctgccttcctggttttcctgctacctctctgactgccccttaagaggtcctctctctcctcctgtcctctcatttttagtttccctcaaaggcttagtcatgggcctcagaccttctaaatatgctcctggcttcaattatcacctctatgcagctgaatccaagtctatacagctagtcctaaattgcacctgatttccaactgtctattaaggcttcctctcttaagtgggaaggtcatatcctatggctcccaaccccatatattcaaattaaatgcacaatctttctgctcctcatgctccacaaaccacttccctttctaagtgctcaatttctatcagctattaaatttatatcaaatatccctattatttctttatcaccttggcctgaaacctcagtattccctttaccactacgcctcttgtagttttcttaataatgtccaatgtcctccaaaatgtcacttggattcacctttcctcctccttttcctcacttcattcctgtgattgttttctcgctgtatttattttctcctccatttgattcattttcactcaccatcagacccatttttctaaaatcgttttcatcaaatcaatctctctgcacaactcaagaaggctcaattgaatcactactgattgcagcctcaaggctaaactgttgtgacagactctcaaagccatccataatgtgccccctctcctctccccagttatctaaatttatctccccttcattccaaatcagtggttctcaattttgctgccgagggacatttggcagtatctggagacatttttaattgtcatgacttggagtaggggggagtacaaccacatctagtgggtgaaggccagggattctgctaaacatcctacagtgccaggacagcccccaacaacaaagaattagccagcccaaaatagcaagagtgccaaggccgagaatctgctccaaatcaaggctctctgtccccagaccatgctatatctatacctctgctcagaatatttccctagcaacttagaatgtcgtctctcttccccttaactatcaatgttttatttatcttcaaatcccattctaagtctatagcccatggctttaaataccatccagtggtgacgcctccaaaatgtttatcttatcttctgagttccttacccagctgcctactagacatctcctgagtgtactatttaacatatctgaacctgaattcctgactcccccaaaactccttttcctcaaataggtatacagccccagcaatcacccagttgctcaggaaaacaggtgggagttattctggatgctctcctcaacgttctctgctccagtgtcttgccacaaatcaatccattagcaagttctgtcaagagtctacctccagacacatcttaaatccaggaattcgatatcaagcttatcgataccgtcgac

SEQ ID NO: 1585 - DNA, 1392 bp, Homo sapiens
ggcacgagggacggtggcgttaagggaacgctgaggtcccgcgctccccgaccgaggtatatctccatgaataacctaaatgatcccccaaattggaatatccggcctaattccagggcggatggtggtgatggaagcaggtggaattatgccctgttggttccaatgctgggattggctgcttttcgttggatttggtctagggagtcccagaaagaagtagaaaaagagagagaagcctaccgtcggagaactgctgcttttcaacaggatctggaagccaagtaccacgccatgatctcagaaaatcggcgtgctgtcgctcagttgtccttggaactcgaaaaggaacaaaacagaactgctagttaccgagaagcccttatctctcagggacgcaakttggtagaagaaaagaagcttctggaacaggaacgggcccaggtgatgcaagaaaaaagacaggtgcagcctttgagaagtgcgtatttgagctgcctgcaaagggaagaaaactggcaaaggagagccaggcttttgctgaaagaatttgaagctgttctcacagaaagacagaatatctactgcagtctgtttcttcctcgcagcaagcggctggagatagagaagagcttactggtgcgagcgtccgtcgaccccgtcgccgctgacctagagatggcagccggtctcaccgacatatttcagcatgatacatactgtggtgatgtctggaacaccaacaaacgccagaatggcagactcatgtggctctatctcaaatactgggaactcgttgtcgaactgaagaagtttaagagagtagaggaagccatactagaaaagtaagacaagagtgaaatcaaactgcttttagtgactcgaggccaggcagtcatgcgccttctgggtctccggcgtcttccgttcccgtgctgcccgtgtcatggccacaccgtcacccttcagcagcgacctccactcccgccaccgtctgagcagaagtgcaccgaagcctcagagacagagggtctcctcccgatgctctgccgctgttggggatatggtttcttgaagcatttttaggctgccagtattgtattaagcagaacagtataacctcgtattttagctccagggtaaaaatggttttttaaaaagtcaaatacaatactggtccttascacaagtaattttctgtctgtttcatcactccctaaatactttctcctcaaattatttttctctgtcaccagattacattaagaatttgtcagataatgtgtagaactgcataacaggtaatagaaagtagtaatattatattatcaagggtttatattttaaagatctctctcactccataaaggggaaataccaagtgtttcttgt

SEQ ID NO: 1586 - DNA, 1250 bp, Homo sapiens
cagtggcgagatctcagctcactgcaagctccgcctcccgggttcacgccattctcctgcctcagcctcccgagtagctgggagccagcgcgcccagcctaaaaaacttttcaagtcaatattactacgatttaacattagagtgtggacatgtgatttaatcgctatagctaaaatacgtcaaatatacgttgtcatgtgcttgaacatgatgctaaccctgacaggatgaaggaaagtaatattctttcagtgtagttcaggagagcatttgttttcttttctaccaattaacccatcattgcttttaaacaaccatctgaaggagcagagaggcagggtagaagacagaagggggatctatgtggtaactaaagaatgtttctgttttgttaattattgtgtgtgtgtggttttattgtttgcttaagagaatcaaaaactgaaaaaaatgagaatacaggaaatggctcttgtttatttttttgctgtgtttacagcttgttaatgctctactgtctttgtttcaagagagatttgttcactgcccagctcgttttgtgtcctgagccctatgcccagcccaccttataaatcatgcctgtttagatgtttgattttgttctgtttgctattgttatcttaaaggtgtataactctgacatgccagacatcaaattaagctcaaattaagctctcgtttaaatgtttaaacacctaatttatattctaattgatcccagccactgatgcatgtactttagctacttctgctaaataagcatattaattttccacatcaggccatcagatcttgagaaccaacagttatctagaattccgtgtctactaatgtttcacctgcatgcagccttcattaattttgtagcaaaatataaagtgatcattatgtagtttctggattaaaaaaatttgtgtgtgaagttgctttgtaaagtgcatgtggaattaatgggacagtgtgccctttgtgttagatgttagagcaaaagaaagggcttatagtgttagtattggagcactttgaagatagatattttcagaaaagatgtaggatttaaaagttaaattttaaattttagaaaaagatatgatggcaattggaaatagtcacaatgaagttcttcatccagtaggtgtttaacagtgttattttgccactggtaatgtgtaaactgtgagtgatttacaataaatgattatgaattcaaaaaaaaaaaaaaaaaaaa

SEQ ID NO: 1587 - DNA, 2107 bp, Homo sapiens
ggcacgaggagttccaactttgactccatctatatctgccccagtaccttcgcctgtgcacagcttgccactggcgctgcctgccgcctggtggaggctgtgctctcaggagaggttctgaatggtgctgctgtggtgcgtcccccaggacaccacgcagagcaggatgcagcttgcggtttttgctttttcaactctgtggctgtggctgctcgccatgcccagactatcagtgggcatgccctacggatcctgattgtggattgggatgtccaccacggtaatggaactcagcacatgtttgaggatgaccccagtttaacccaaactggtgctggtctcaactggctttgatgctgcacggggggatccgcttgggggctgccaggtgtcacctgaaggttatgcccacctcacccacctgctgatgggccttgccagtggccgcattatccttatcctagagggtggctataacctgacatccatctcagaatccatggctgcctgcactcgctccctccttggagaacccaccaccctgctgacctgccacggccccactatcaggggccctggcctcaatcactgagaccatccaagtccatcgcagatactggcgcagcttacgggtcatgaaggtagaagacagagaaggaccctccagttctaagttggtcaccaagaaggcaccccaaccagccaaacctaggttagctgagcggatgaccacacgagaaaagaagttctggaagcaggcatggggaaagtcacctcggcatcatttggggaagagtccactccaggccagactaactcagagacagctgtggtggccctcactcaggaccagccctcagaagcagccacagggggagccactctgggccaaaccacctcagaggaggctgtcgggggagccactccggaccagaccacctcagaggagactgtgggaggagccattctggaccagaccacctcagaggatgctgttgggggagccacgctgggccagactacctcagaggaggctgtaggaggagctacactggcccagaccacctcggaggcagccatggagggagccacactggaccagactacgtcagaggaggctccagggggcaccgagctgatccaaactcctctagcctcgagcacagaccaccagacccccccaacctcacctgtgcagggaactacaccccagatatctcccagtacactgattgggagtctcaggaccttggagctaggcagcgaatctcagggggcctcagaatctcaggcccccaggagaggagaacctactaggagaggcagctggaggtcaggacatggctgattcgatgctgatgcagggatctaggggcctcactgatcaggccatattttatgctgtgacaccactgccctggtgtccccatttggtggcagtatgccccatacctgcagcaggcctagacgtgacccaaccttgtggggactgtggaacaatccaagagaattgggtgtgtctctcttgctatcaggtctactgtggtcgttacatcaatggccacatgctccaacaccatggaaattctggacacccgctggtcctcagctacatcgacctgtcagcctggtgttactactgtcaggcctatgtccaccaccaggctctcctagatgtgaagaacatcgcccaccagaacaagtttggggaggatatgccccacccacactaagccccagaatacggtccctcttcaccttctgaggcccacgatagaccagctgtagctcattccagcctgtaccttggatgaggggtagcctcccactgcatcccatcctgaatatcctttgcaactccccaagagtgcttatttaagtgttaatacttttaagagaactgcgacgattaattgtggatctccccctgcccattgcctgcttgaggggcaccactactccagcccagaaggaaaggggggcagctcagtggccccaagagggagctgatatcatgaggataacattggcgggaggggagttaactggcaggcatggcaaggttgcatatgtaataaagtacaagctgttaaaaaaaaaaaaaaaa

SEQ ID NO: 1588 - DNA, 1174 bp, Homo sapiens
ggtctggcaaccagtgacgatacagaggtgtcttatgatttcgtttgcgttttcctggttaaacatgaggtggttattgcttgtgtttaatcagatacgctttactgtcataagcctaatttgcatttattatctcttcgctattattttgtacaggatcttttggattcatgttcttgcgtgattgatttctcaggaactttctgagtttggttttggtgtgccagctccacagaatgagctagggagagctttctctgtttctatacctgaatgcttggtgtaatattttaaattaggtatatgattgattttgagtataaaaccagccttgtatgtcagggataaatcccatgatgtatactctttttgttgtgttgttgaatttggtttgctaatattttattgaggagttttgcatcaattttcattagagaagtgggcctttagttttttgtttgtttctgttttgtttgtttttgtatttgttttttggaactgaatgaagtgcactgtgttctctcaaaggagatttgcgttgctttctaggggtttgggtgcacaaatccacagcttccggccttttaagccacttgtcaaggtcactctgactgcagggccagcagcctgggaccagtacagaccatcacggcacaggcttcctgggctagtcggagaaggtgaagctcgcatagtggccagggacttggcctttctgccctcacctccctgaggccacacaaatcctcagcctgtgtggctggaggtgccgccatccacagctcacctcagtttcaatatcttgtcctcattttcttttccctttttacaaaatgaagcacatatttcttctggcttttgtggcgtttctctgtgggagaggccatctgaatacctaaccagtgtgttacccagataatgaaagttagcattcactttttaaatagcagtaccctcaaaaaaaattgaaaaagtcctatgtagtaatgatgctaatgaagaattgaaagtgtttattaggtaaataatatggtcttgcacattgtttatgtggtaaagactgatttttgtagtcttgtaaaagacattttctgttcatttacttttttcattataagatatgtataaaataaaacttgccattttaaccattaaaaaaaaaaaaaaaaaaaaa

SEQ ID NO: 1589 - DNA, 2029 bp, Homo sapiens
gaattcctcccatggagacagaatggctttcttcaaagtcagttaccattttctgattgctctgctcacttacaattggacacagccaactctaagtgcctctgtcaatagctaaaacttcctgtcacctgagacaacagacatggtcatccagacagcaacataaagttcctccacagctcttgatgctgagaaacagagagccatgctgacttccttcttcttttcctatattgctctctttcttgccttagggttttaaattatcttagaaatcaccacttactgcttacatagatcagtacctttcaaacatccagccctccaaaggaaaggcttttgatagctaaagattaatgactgtatattccagattttcaccctaataggtgctcaataaaaattacttaaacttcatcaagggtttatcttgtgttattctttaatggcaagtgcattgcatgtactggtgaaaatgtttaaaatattttttcaaaaggaatcagtattcaattttacattaggttggatggcagtcacattacaatatgacaatattaattctaactcttctatgctagacaaagacaaggtttcattttcttacttaatgcactgacattttggtcaatgcccattttaagtgatgacaagaatgcttcttaaatggtatactgcttgcttactattggctcaaatataaactcaatcttctttaggatgaccacttaactacaatatcatcaaaacactgcaagtaaataaatgtacgttcctcatcacaactcctgaaggaaatttcttactgatcatccttaacgtaaggattcaaagatacaaagaaaacttaagaaattgaaagttctatcctaaaactatcacctgtaagggctggttaaatatatatatatgttaattatagagcactgccacataccacaataaacttaagtagaatacaattatcttaggacagtgcctacttggggaatcttttagtttaatctaacaaacacttattgagcacacattaaataccaggtacactgttactcattggaaatatgaaagatacggtctttcccccactgagaaactcagaccaatataaatggctgttgtcttgggaacgtaacaccagatgacatgctttgaatatgaatgtaaggaaaacaaatctacttttttcttataaaaaaaagtcccattttaaatttcctataactgctatataacaacaaaaaaagaaaaagccatcataggtatggcactctcctatgtwcctcagaaaaatcacgtccaccctacgctttgccttcagaatcaggactgaagcatcaccattcagtcagagcttaaactaattgcaattaaagttgttttaaggagaaaaaaaaaagcctaagttaaatgaccaaacccaaatttagaaagataatgacagcaaacatcacatgaagctaattctcatttttcattaccatacaattaaagttacaatttattcctccctaagagtcaaaaaaagagttccctgcatgtactgctctagcatattctacatgtagaatcttttttctacaaattatatatttctcttcttacaatattatatatttcaagaacttaaaaagaagatgtcagcttcatattaaagaccagtcttgaataccagacaaaattatccttctcttttcccctcatttttctctttctaaccataggggcattccatagttcctttgcctctagcacacaactaagaaattctgaaagaatattgaactcaactaaaccaatttaataaacacataaaagatatttaataaatatgtaaaggtagtacactttttatctgctatttaaaattttgttttggtttggggagaggggtcaaagaggaaggaagataaactgaaagtgttatagagaggagggaaatttgaagacaccatattagaaacatgatcctatcagaatgacacagcggaattcgatatcaagcttatcgataccrtcgacctcgaag

SEQ ID NO: 1590 - DNA, 1035 bp, Homo sapiens
aattcggcacgagctatattcttcttgatttctagccttttattggctctcagattgccagagttgggactcaatagtaagtaaccattttkttgaggtggtagtgattctaccagggtgagtwatcatgacagcagaatcactgcgtttttytctctactctgtggcatagactctatgccatagagtgacgtgtgaaaggcttgaggctccctacctacgagacaccctggtccattctagcagtatggcacgtgctgactgggttttgagtctcttgctgtataatcacattactgcacttccctgcattttctcatccaaaaatggggattacctgctttgtggatcggtttgcagatgaaataacacacgcagggtatctagcacggtcccccacatggcacattcagtgttagccacacttccatactaactgccctgcggggatatttaatgagctcttaaatggcagaaatgttgtgtcttttcctgttcccttagtattcctatttttgttggtaatttttcttatgaaccatgcagttgtctagttcaggccattttagtatgcagttttatctttgcttccaacatgatttaatgttcccaaattggatttcacataatcctagtgtcctttgagacttgaattggttctaggccaaaaaagggtgagggggaaggaagaaattcagagtcaaatttggcaaataatatatccctgtcgttttgttttttctttttaagacttgggccgggtgtggtggctcacgcgtttaatcccagcactttgggaggctgaggcgggcagatcacctgaggtcaggagctcgagaccagcctggccaacatggtgaaaaatacaaaaattatccaggcatggtggcccacgcctgtggtcccagctactcgggaggctgagacaggagaatctcttgaacccgggtgagccgagatcgcgccactgcactccactctggtcgacagagctagattccatctcaaaaaaaaaaaaaaaaaaaaaaactcgag

SEQ ID NO: 1591 - DNA, 458 bp, Homo sapiens
ggcacgagcacctgtagatccagctactcaagaagctgagttgggattgcttgagatcgagaggtcgaggctgcagagagctatgatggtgtactgcgctccagcctgggtgacagtgagatcatctcttgctctcaaaaaaagaaaatttactactaatatttttgtggttctaaattttccaaaaactagaattatagtctacattctgcttgtaatttgcatcttttaaatttagaaatataagatgaatttcacttttattatattttctttgcatccacttcattatttaaaatttatcattgcttaaaacaattacatcagtagtaatgtttattataaaaatttgattcacctctttatgtggcaagtttctgaaatcacatatggggcaagagtatcgtgtccctctttggaaaatgccatctgccatagcttccttgagtgcagggatt

SEQ ID NO: 1592 - DNA, 1610 bp, Homo sapiens
tgcaggaattcggcacgaggcaagatctctgtctgttaatctgcctcatgaaaatgacgaaccaggagaatctatgggacagtaggaaaagctgccagtcactcagatgataataacatttaccttatacatttataatggaaatcctgccactgtttacaccagaaacagtttctttttttttttttaattttattattattatacttaaagttttagggtacatgtgcacaacgtgcaggtttgttacatacgtatacatgtgccatgttggtgtgctgcacccattaagtcatcatttatcattaggtatatctcctaatgctatccctcccccctccccccgccccacaacagtccccgatgtgtgatgttcccccgcttcctgtgtccatgtgttctcattgttcaattcccacctatgagtgagaacatgcggtgttttgttttttgtccttgtgatagtttgctgagaatgatggtttccagtttcatccatgtccctataaaggacatgaactcatcattttttatggctgcatagtattccatggtgtatatgtgccacattttcttaatccagtctacaccagaaacagtttctattgagaaaatggattttaatagaaaattctcatttaaaatttgggcagatatctgtattgttgagttaaccaaatgagaagagaaaaatccttacaacgtagcttgtcatttgcctgacttgatgcagactgctttgcttagtaatcatgcagcactatcaagactgtgtacataatgtcaggatccatctacataagatgtagtatggactgatgccaagtgagcctggggtggaaatcagaactggatgcaaatcctgatgttatccgagaacaggcacctgttacataggctgtgttactgtggcaaaggtaatggtaaaacacagactggccagaagcattgtgtacaatgagaccttgcaactttgtgtatattagtatgtggggggatgtgaattattaaagacatttaaaactgactgaatcagcaacctctaatctataaaaaaaaattccagacgtccagccgggcacgttctcgtgcctataatcttagtgctttgggaagctgaggcaggaggatcacttgaggccaggagtttgagaccagcttgggcaacatagtgagacccctgtctctacaataaaagtaaacaacttagctgggcataatggcatgtgcctgtagtcccagctactcaagaggtggagatgggaggatcacttgagcccaggagtttgaggctgcagtcagccgtgactgcaccaccatactccagcctgggtgacagagcgagatcttgtcttaaaacaaaacaaaacaaaacccagacttcctataattcctaaaaataaatgtgggtttgagaggcctaccttgaaatgtacaagatcctggccagacttcacctatctaacaatatgctagtaactatttgttgacatgtcttaaagaaatgttcatcagggcctcagaaagcaaggcagagaacaggtccctgaaatttactagcttgcaccaaaccatcagataaagataggttaatatttgacagaaaaaac

SEQ ID NO: 1593 - DNA, 1085 bp, Homo sapiens
  misc_feature (506)..(506): n equals a,t,g, or c
gatgggtgccccaaatgcttggtccaccatcatcgtgcctggcatgaaggatgctgtgatccacgcacttcagacctcccaggacaccgtgcaatgtcggaaggccagctttgagctctatggcgctgacttcgtgttcggggaggacttccagccctggctgattgagatcaacgccagccccacgatggcaccctccacagcagtcactgcccggctctgtgctggcgtgcaagctgacaccctgcgcgtggtcattgaccggaggctggaccgcaactgtgacacaggagcctttgagctcatctataagcagcctgctgtggaggtgcctcaatatgtgggcatccggctcctggtagagggcttcaccatcaagaagcccatggcgatgtgtcatcggcggatgggggtccgcccagcagtccctctgctgacccagcgaggctctggggaagccgaggatcaggaagtttaaggaagttgcccaaggttgcacagctcanaagggcacagctgggatgcagacccagcccgtcaccacttccccagcctccacaccaaggcccagctgccttctccccatgtactccgacaccaagggccaggtcctcagacgacagcacagcaagctggtgggcactaaggccctgtcgaccacaggcaaggccttgaggactctacccacggctaaggtcttcatttccctcccaccgaaccttgatttcaaggtggcacccagcatcctgaagccaagaaaggctcctgctctcctgtgcctccgaggcccccagctggaagtgccttgttgcctctgccctttgaagtcggaacaattcctagcacctgtcggaaggtcaaggccaaaggcaaattcaaggccagactgtgacaaacccagggctgaggcctgccccatgaagaggctgagccccctgaaacccctgccccttgttggtacattccagaggcgcaggggcctgggggatatgaagctagggaagcccctgcttcgattccccactgcccttgtcctggatccaacaccaaataaaaagaaacaagtgaaaaaaaaaaaaaaaaaa

SEQ ID NO: 1594 - DNA, 910 bp, Homo sapiens
ggcacgagagcatgtgtgtcaaggaccttgctgggtcaacaattcatttgcctttgtctggagtctgccagcagcagtagctaatgtctaaaagacaacaggggccaggagagaaaagggaggaaagaactaagtctctcctagtctatggcatgctatcatggggtcaagtaggggcagggaggcttcatggggcctacctttgggatgacattaccccagtgggcattgtttgggtggttttcttttaaactatttacactgatatgacagactcaaactcatatttgctattctccgagcacatggaaaggtaactcactctgtacattcagatatcaaactatgcactgtgagggctacgagaagcgcaaacagtaaacgcttggcaggagggaacacttcctctctctgaggaagaggctggaagctggtcttccccctccaagaatacacgggtgcactgagtctttatgcaaaggcaacactgagccatggccaagggcatctctgcggggaccctgggaaaggagcctgcttccaggtgttccccaaagagatggaaaacaagacagtcatttggaacagtgatgcataataaaatgtatgtggccaccttacaatactgctaagttgctaaaatatataaagttaatatttgagttctatttttataaaatagttctagatttatggcaatataaacgtgtatagccttttgattttaatttctagttttgtgctttgaagaaatatatgtaagattaaagaactgtatattgtaagcattatattcaaattatttaaaaattgttctaagtctatattcaataaaaagtaatgccaagaaaaaaaaaaaaaaaaaaaaaaaaaaaaaaaaaaaaaaaaaaaaaaaaaaaaaaaaaaaaaa

SEQ ID NO: 1595 - DNA, 1654 bp, Homo sapiens
  misc_feature (450)..(450): n equals a,t,g, or c
cccccgggctgcaggaattcggcacgagcctctttgaagtttctagatgcaccacttcctgctcacagcctggaattcggttaacaagtcagtgtcaacctacctttcccttcatgatttatagacttttgggagtaccttctggtagcttttgtcttcccataggaaagaggcccaatcccagtttgtcctcacaaagcggccagctccgtgatatctcttttgcgggcagagttaagattgtacacagatccccacaagtaccacgatttttgcctcaggaaggataaagcacatgtttgtttctgctttcgttttcttttttctttttttcacgaagccttatggagaagtatgtttctgctttctttcctgaggaagcctagcttctgggccacgggactgatcctgtctacatcctctttccctccattctccatcgtgtctctncccccgtctcaccccaccccgtgcccctctctgcctcagcttcccctcttcccctgcagtgagtttcctgcgcagcggcactaagctcatcttccgccggaggcctaggcagaaggaagctggcctgagccaatcacacgatgacctctccaacgcaacggccacgcccagtgtccgaaagaaggccggcagcttttctcgccgccttatcaagcgcttttccttcaaatccaaacccaaggccaatggtaaccccagcccccagctctgaggacccagctctgaaagggcacgagttctctcagcccattccccacctccccttccataccccttcctggatctccagtgcctgggccaggaaagccctctgggttccgggaagccccgtccaccctgggccatggggccggttggaaggatacttggaacgggaagcacatgagaggtgggcacccggtgccgaggacatggacgagggactggtggctgggagggagaggagggccctgtccggcatgtgtgggtattccccagaagcatttgcctcctgctgagcctggtccctgagcggagtcccagggtgctcagctcttcagctgacccttcttcccttatttattctcttttctatttatatgtgtggcttaggaccctccgtgaacagatgatagagggcatctctcccaggtgacccttcttttctgtcccaggagggtgggtaattccctttgggatggggctcccacacctccctcaggtccccactcagaccagcaccagtgtctgcctctgagaatgttggcagctcacagagagcagggccggcccgggatggggggcaggtactccccaccttcctgcctcccctcctgctcctcatccctccctccccctttattaccgttttttgtacttgatgccttctctgtgagcagtggctctgtgggaaggagggagccgggagcctggtgggaagccttccccagagagatggctttaggggctttatttaaagactgtgatgatggagccacgcaaggctgcacctctgtgtgttgggagacgatgatgatgtccattgctgtgtgatggcttggaatttaatttattaaagtcaaattggagtttaaaaaaaaaaaaaaaaaaaaaaaaaaaaactcgagggggggcccggtacccaattcgccctatagtgagtcgt

SEQ ID NO: 1596 - DNA, 1193 bp, Homo sapiens
aacaggtctttcctgttttctggacctgctagaaagcttcagtcagtttggtccctgggagagaaaacgctcttcccatgacggctctgtggaggccaggaatggggtaggtgggttgactgggagtactccttcctgccgccctggtcaagggactagtgtgagtcgggagtgcatttttggaatgggggcaggggtgtttttcatgaccatttatttgagtggttttgatggttatgcatactctttaaatttgaatccaaattttttgcaaaattacttcccaatcagatcttgacccttagcctgggacaccacaaactgaggtgaattcyckgctttgctcgtcacaaatgccaaactgactgccctttcacggtgtccatcttgctgtcttttgcttctgtttgatttggtctgcatatcttttaatgtgtctgtttttgttttgtttgttttatttttatttttcagttaacgcacgcacagacttacatgtcaagagtggactttagactttcatgtgttaagttgcttgagttacaccttgtgacccttctcccataacatggtgtgaggacggactgggagccggtacagactccagtgtttacagccttgctttcctcccaccgaccctggccccaggctgccccgggcctggcgggccacccctctctatgcaaacacgtaaaagccatgaatgctggaatccaaaactgacgaggtttatttttttcagagccagtggctggtcttccatttacagtgtcactattccctgacggagctgttatgtgccgctctagcgaaggccccagccgggatgctaggcctaattgttcagcgtggagatggcaactcacgtggtgccctaggtgcagctgcgtggtctggtatacatgctgcaaaattcacccagttcccctcattttaatttttctaacctacagcttaattttaataactttaaaacacttctaaatatttattttggcaccagcgtcaagacaaataatatcctctcccattattttcataagtaacacagattccctgatttttaaaaactaaaaatacagctaaacctttcttatgtataaagtatgcctatcatatacagggagaggtgggtaataaacttcctgtaatgacaaaaaaaaaaaaaaaaaaaaaaaaaaaaaaaaaaaaaa

SEQ ID NO: 1597 - DNA, 983 bp, Homo sapiens
ggcagagaaggaccccaagttaaatctcccaagttaaggctgagagctccagctctcttccgaaaagctggagctgccaacccttcccttgggacctgccgattatgcagttttcttctgatactagctttggtttctgaggtattctgccctctccctcccctcttctcccaaaacatctgcctctcctcagtccccgtctgggtggtgggtgcacaataccaagtgcctgaaaagcctgagagagagggtctggggtagggtggggaccactggacaccccaagtgcaaactgctgctttctgacccttgcttgcttatgtactcccttttcaactgtgttgaattttaatgacgtttttagtggtgtagaaatgcaagtattttggcttaacagcatgaagtctgggttgcacattgtatcagaggtgctgtaatctttccagtatctctgatatacggctttctggttgaatgtcaccctgggccctcttgactggataaacaaccatgagggctcttctctgtggagctgccgagagcttggtggtagaaagcgatgtttctaaacaactgcagcggctctttcctgtctgaactgcatcgtgtgtctgactgccttgctgtccatacatacagactccttcccaggcccggctctgtgcagaacttccatgttttaccacatttttctctcctgaactccctttgtcagccccagggtgttgaggctgggtcctctctagcaatctctaccttcagaagagacttttctaaatattttgcttttccagttcttgttgcttttgtcattgtgaagagtcacccaggatgctggcgcttggtaccctaagatcagaagtggtgtgtgtgtgagctgtgagacatgcacaccctttcagagtgatactgtgtggtggaaggactgttagaactcaaagaatagttaataaatccagtgtattaaaaaaaaaaaaaaaaaa

SEQ ID NO: 1598 - DNA, 847 bp, Homo sapiens
ggccgagcgccaatgaccaatttctgactaaccagccaccttttctctctcttagctccacgtcagcactgagaccagactcgagcacccctgtcctgtaagcgagacaaaatggcgtgtgttattttggggttttgtgttttttggtgggtttctttccttggctctccagatttacttttggggcctgttctaagtgcaaacccagcaagtttcacttgtcctgcccattagatacaactacatcttgcgggggttgtttctttcttgttccacaatgaaattgcacatccatctccaccccagctgatagcctgttaataagcactggtctaacacagccaaccctccttccacagcgccatattaatggaggaggggaggaaggtgaaatctactgcatgggattcaggaaacagttgtggttggtcaggacggaagttggggtaagtttggttggtcagagggagttgtgctggagattgtgaaaaatgggttcttgaatgatctactataaggcagggaaggttcatttgtaagtagtaatgtgaactgaattgcattaagagtgtgtggcctttgttgtgatatactatgtattttcttatatgcatgagccaaactgttgcatcataatttagcactgatgtctgcttttattttgatcatctttgtccacccttattagttcttggctgttaaccgtagatagatcttgtaaatcccacaacctttggttgctgcattccccttggttcgattccacgcaaggagccacaagtgagaactccactgtccttagaagaaagggcatttttacttttgaaccaaaaaaaaaaaaaaaaaa

SEQ ID NO: 1599 - DNA, 282 bp, Homo sapiens
ggcacgagacagaatgctgttgccaaaacctgcacagccctgaggccagcctcggccttggtaacgggggaaagtagctgacagtgagacggggctcctggcccacgtgtggggcacgggcatcctggatggttggggaggcgccgacaggcacttcacgtattacaattggggatgtgggtgagggagggaatctggttttgttacttggcagtggttttttctcacccttcctttttaacaataaaatcccatttgggtcttgaaaaaaaaaaaaaaaaa

SEQ ID NO: 1600 - DNA, 2707 bp, Homo sapiens
  misc_feature (938)..(938): n equals a,t,g, or c
gaattcggcacgagcggcacgagctccaattcaaacaaggagaacatggcaaccttgtttacaatttggtgtactctgtgtgaccgcgcctatccctcggactgtcccgaacatggaccagtgacttttgttcctgacactccaatagagagcagagcaaggctttctctcccaaagcagcttgttctccgtcagtcaattgtgggagcagaagttggtgtatggactggagaaaccattcctgtgcggacttgctttggacctctaattggccagcagagtcactccatggaagtagcagaatggacagacaaggcagttaaccatatctggaagatataccacaatggtgtcctagaattctgcatcattacaactgatgaaaatgaatgtaattggatgatgtttgtgcgcaaagccaggaaccgggaagagcagaatttggtggcttatcctcatgatggaaaaatctttttctgcacctcacaagatatccctcctgaaaatgaactgcttttttattatagccgagattatgctcaacagattggtgttcctgaacacccagatgtgcatctctgtaactgtggcaaggagtgcaattcttacacagagttcaaagcccatctgaccagccacatccataaccatcttcctacccagggacatagcggcagccatgggccaagtcacagcaaagaaaggaagtggaagtgctcaatgtgcccccaagcttttatctctccttccaaacttcatgtccactttatgggtcacatgggtatgaagccccacaagtgtgatttctgtagcaaggcttttagtgatcccagcaacctgcggacccacctcaagatacatacaggtcagaagaactacaggtgtaccttgtgtgacaagtctttcacccagaaggctcacctggagtcccacatggntatccacactggggagaagaatcttaagtgtgattactgtgacaagttgtttatgcggaggcaggacctcaagcagcacgtgctcatccacactcaagaacgccagatcaagtgtcccaagtgtgataagctgttcttgagaacaaatcacttaaagaagcatctcaattctcatgaaggaaaacgggattatgtctgtgaaaaatgtacaaaggcttatctaaccaaataccatctcacccgccacctgaaaacctgcaaagggcccacctccagttcgtcagcaccagaggaggaagaagaggatgactcagaagaggaagatctagcagactctgtggggacagaagactgtaggattaacagtgctgtgtattcagcggatgagtctctttctgcacataaataaaaggaaaagaaacaagcaattttggatgaaaatgcaaatggaaaaatacacataaccagttatctactataatggtttttatataaaatggttcctgatttattttcagccagtaatcaaaacagactgggaatgaataaagcacttacagaagagtatcctaatgaaaacactttaaaacagattgggaaaactgagcatgtgtcctrttttaagtggtggactgggagggaagtgtcaacttctgaggtctttatttacatgataatctgggagatgcatttatgcctgaatcaaagctgccttctgctcaaacaaatcagatttatttcacattcttccattattccattttcctgctggtcctgtgacttggtaacattctaaacggtccttgccccatagccatcctgattgctgatagtgttttatgcagactcttgtgacttatactcaccacagaatggattgggacacagcagcataagtgtgctacttggcagctagtaagtttaaagcaggacctgccttaactgctcctggccacttggaagtttagggtagatcttgttttccaaagtttcggcaggtgcctggagggcaaataaaaaagcagcagtcagtcagtagtcagtgatggagagaacaagaggagagatgcctggcctctgcccaagaaattagctttgatggaagcctgagcaagtcacctggttattgtaacgtggagatctttgtaggtttagacatggctccctgtctccagtaaacatccagccattcagacaaagggggcctggagatacagagagcccaaataatgcctgctggattgtctcctgatgagtacatgtggactcacctgaggaagggaaggaagggaataatcttttatgtttcatttaccttatgaaaagtgttaaaacattgccaactcaaaataacattatttaatgcatgtgcaaagttaggtcttcccagttgtctcagtgctgaggaacctcatcagagaagcatggaagatgccaaaggatttttggaaggtaaagaaggctgaatagtgaccacatgggcctgttttcagggtcccagcttagttaagtcacccatgcacctggtcattgtgtctcccgtgcacatccagcgtttctcagaagcagacccacccttaagttgacaggattgatggaacatgctctcctgctcaaggcacaacctctgggctggagtagaggactctggtgggaaggttttgctgctaatgtatttatggaatgaatgtatttcattcaaatctgtattcctctaggaaggattaaaattaaacttttttaaaatamaaaaaaaaaaaaaaaaaaat

SEQ ID NO: 1601 - DNA, 429 bp, Homo sapiens
ggcacgagcacgggatcatccatggggtcacccatgacgtggagctgcaggagtctgtcatcactgtggtggccgcccgtgtcctccgccagacaccgccgctgttccaggcggggcgatccggggaccaggggctgacctccattcgtaccccactgcgctgtggcgtccacccgggcccaggcaccttcctcttcatgggctggagccgctttggggaggcccggctgggctgtgccccacgattccaggagttccgccgtgcctacgaggctgcccgtgctgcccacctccacccctgcgaggtggcgctgcactgaggggctgggtgctggggaggggctggtaggagggagggtgggcccactgctttggaggtgatgggactatcaataagaactctgttcacgcaaaaaaaaaaaaaaaaaa

SEQ ID NO: 1602 - DNA, 1721 bp, Homo sapiens
ggaccgagcagctggtagccctgatcgattgcttcctggatggttatgtttctcagcttaagtctgtggataaatccagtaatcgggaaagatatgacaatctggagatggaatacctacagaaaagatcagatctcttatctcctcttctttcactaggccagtacctgtgggctgcttctctagcagagaaatactgtgactttgatatattggtacaaatgtgtgagcagactgacaaccagagccgactccagcgctacatgacccagtttgctgatcagaatttttcagactttctcttccgttggtatctggagaaaggaaagcgaggcaaattattatctcagcccatttctcagcatggacagttggcaaattttttgcaagctcatgaacatctcagctggttacatgaaattaatagccaagaattagaaaaggctcatgcaacacttctgggtttgcaaatatggaaactcgttactttgcaaagaagaaaacccttcttggcttgagtaaattggctgcattagcttcagacttttcagaggatatgctacaagaaaaaattgaagaaatggctgagcaggagcgctttctactgcatcaggagaccctacctgaacagctgctggcggagaaacagctaaatctcagtgcgatgccagtattgactgcaccacaactcattggtctatatatctgtgaagaaaatagaagagctaatgaatatgatttcaagaaagctttggacttgttggaatatattgatgaggaagaagatataaatataaatgatctaaaactggaaatcctttgcaaagctcttcagagagataactggtccagttctgatggcaaagatgatccaattgaagtatctaaagacagtatatttgtgaagatcttacagaaacttttaaaagatggcattcagctcagtgagtacttaccggaggtgaaagacctgctacaagcggatcagcttggaagcttaaagtccaatccttacttcgagtttgttttgaaagcaaattatgaatattatgttcagggacaaatataactttttctaaaaatggccattgtttatgaaatctgtataagtgtgtccttatacaaattttaggccataaacaagtgtaagtttgtacaatttcataacatgtatagctgagtttttatactttatatgtaggaagctaatataaaatagttatgtaactgtgattttggttttcagttatgtgacttgttttttccacctgaaatgtgtcagttgttgttcctgtactcggtgccctttctttttactctcacgtggtcccaggttctggagttcttgtcctggttctagctgctcacatgtacaaatcacttctaggcctcagtttctgcgactatgaaaattactagattgcactagcttgtctctaaaattgctgtgactccagatactttgcactgaagagaatctagggtgtttgatatctgtttcagttagggctaatgggaaatgtctagtaagataaatgtcaacttttgctgacttattatgagatgaaaaaccaaaggagagtgggcctaactcatgtgagcttgataactgatgaactcattgggagcattttaaacttttctacataaataataaatgagcactaatgaaagtaaaaaaaaaaaaaaaaaaaaaaaaaaaaaaaaaaaaaaaaaaaaaa

SEQ ID NO: 1603 - DNA, 1287 bp, Homo sapiens
cgtgccgaattcggcacgagctaaagatttttagactgactgtgggttcactggaataaaaaggaagaaacaaagagcattgcaggcatcgggactgtcacatttgacaagatcaaagctgcaggaaaatggacagtgaggttcagagagatggaaggatcttggatttgattgatgatgcttggcgagaagacaagctgccttatgaggatgtcgcaataccactgaatgagcttcctgaacctgaacaagacaatggtggcaccacagaatctgtcaaagaacaagaaatgaagtggacagacttagccttacagtacctccatgagaatgttccccccattggaaactgacgcttggctcctttcttgtggatggattttctcaaagtacacagataaagcatggtttgtttcagtctccaaattcaaacctttgagtaataaatcagcactcaaaaatgtacacccatttagtttgtggtagcaaagtgcaatgcgaaattgaatgagaaactgagatttctcagtaatggtgaatatttcgctctttaaacctaaaactcttcattgagtagcttatatttgaacatgattggtttaacatttgcctctacctctgattttgctttgctgtcaaagtttaacaccttccaactacttatgtgtgtcctgtaacacaggtgattgaccgtatgagaggggaaaggcaaagaaaaaggaagccagacactaggggaattattaacttctcatacttccccacattgagaagcattcggagtgtatttagccctgtagatgttgtgatatgcaaatatcccattccctggttactggcattcctaagattcttcatggtattttcaaactttggataaatttacagattagaaagatatctgacagttaatctctgttctccttacaaattccttttgtgctgctggaaaggatctttggctaggtggatgactagttttattcaaagccttttctcaaagccctttcagttacaaccaccccactatggaatcagtatttagttatacatttgtataagaacctgtattttgaaaaacacattcatgtatatttattcctggcattatttgcctgttaaacagtgtctttcatgttctctccccagattgtaaactctgtaagaagctgcttgtatctgtatcccttgttgaaactctgaaaacactgaataactaaaatctcttctcatccttttaaaaaaaaaaaaaaaaaaaaaaaaaaaaaaaaaaaaaaaaaaaaactc

SEQ ID NO: 1604 - DNA, 1290 bp, Homo sapiens
  misc_feature (1279)..(1279): n equals a,t,g, or c
  misc_feature (1284)..(1284): n equals a,t,g, or c
  misc_feature (1286)..(1286): n equals a,t,g, or c
ccaccgcggtggcggccgctctagaactagtggatcccccgggctgtttgaattcggcacgaggcctggtgcattccgaggctacatccaggctcatggaaggagtgtagtattcatttagccatgtctgccatgggtccagaaatgggaaagggaattgctgtccttgccctgtggtatgctgccacctctttgggaagcaggccttgcccctgtcccaccactcattctcagctttgaatgggaggcctttctatagtggaggcctttccttgaagcctatgaactgcaggcccccttttgccattgatctcaaagcacttgtcctcaggatagggaagagcagggggatgcaggaatagcagggatagcttgctcccagccccctccccaatttggttccgttgacataggaattttacgattcccaaaccatgcaggggctgagccttccttatgatgactttgttctccctcccactgggggaatcctccctatgccttaaaactgccgagccccactccatgtaataggattcctgggcttcctcaatgggggttcatgttcttggactgcgggccctcagtccttaactggaaagtgaccgtccactgccccatggagcccatctggacacagcacagccccaaaaccgttagcagctggctctgtttccaagcctggggaggggttcctcagtgcaggagttggggacaggctggggatccaagctgcttgagggggtcaaccttggaccaaagttgccttaagcctgtggtaaaagggcttcagggaaggtaagtgggccacctgctggaagctgccagctgcccggctggcaatggtgtgagtgtcttggccctgtccctgccctggggtccagcaggtcatccctcccttcttctctctcctttggcgtttgttcctgtagtcactgggctaatctccccctagcttcaagctgtacatagggcctcccagtgcaaatcctcctgcccataccgtgcacccttagaagcctgcgtgtgcatagagcgccccctacttcccagttaactcccagttcttctccctgagcttggtatttgtcatgtgccaactctgactctgaggtgggcagtgagggaagcagccccgggcctgcttgcttcctgtccccgaaatgttcgtttcttctgaagtaaatatacatatataaataaatgtataaatactgctttgtatctgaaaaaaaaaaaaaaaaaaaaaaactcgagggggggcccggtaacccaattngcccnanaagg

SEQ ID NO: 1605 - DNA, 1037 bp, Homo sapiens
aattcggcacgagaacaaactaaggcagaaatactaaaaatatctggttcaataacataggggcatggagtagacatgcagaaaatgcttgttcacttgccttgaaatggctccaggtggcctgaaggaatcaatgaaacttctcaagtatctacattacaaccactggtccccactacacatttatttctaaataaaggaggagaaactctagcaaagtaatatttaacattttcattgcttccaggataaatcttattgaatatggaggatctgatagtggtaggtctatcaggaatatcagggaaaatgcttttgatgttgttggcaaagtcaattcctatcatttgtacttgacaccagctacctagcaggctcattgtgaacttcaggtttcgcccacgttatttatataaagtatctcagtgtaatatagggagttgctggttatttgaaaatagtaacaaagataacccaaacgagaaactccatttccataattagctttcctgaaagtcaggcatgtctttgaggacaggttttggcagtattatttttgtgcacaggaggaaaattgttagtaggtttatagatgttatttttataatagaatgttaaacccctgaaaaacatcaaaaattgtctcctagaactaattctatgttttaaaaacttgttttaaaaaggattctaaatagcaatagggtctttcctcctttctccactccaatggtttaatgggatagaggaatcaatgtttatatttttaaacctgtaaatattttattttgggtattttgtatatttgttgatataattccattttgtgcatatgtaccattgtgcatgttgctgtttttgatagtcactcttttaatgaatgtaagaagcttgggctaatagcacttttcttgttccattcaaacatctgaaaatgaaattacaacactgccattttactgttgtgtttaattcagtcaataaattttgttgctcctttccatttaaaaaaaaaaaaaaaaaaaaaaaaaaaaaaa

SEQ ID NO: 1606 - DNA, 946 bp, Homo sapiens
ggagcttttaagtttggcctctcacactctcccacacctgctaaatccttataaatgtttcttctcttccctcaaacttccctcactgtcttatttgtttcttgccctgtggaaggcagtagggtacacattcttcttagtgtaaatatgccttggaatttgcacaagggcaggacaatgtgttcttttttccaacagctgttttgatgatgcttggcaacatgttggtatttttggcccgagtagcacatattgagaccacatcctcaaggaatactttttgatctctcccaagtctcttttctagactgaatggtttggattttccattgatgaaaaacattccccttttcttgcccacatgagagtttatctgcccgtttttctgatcatctctctcctcttgtttacagcacatgcaaaagtctcttgggctcttcctatagtttataacttttgttttagttttatattacctggaatagcttaggatcatctcagagggactctggcatagtccctcttggagatcagggatgccaggaggggcattaaggatggagagatcaggtgaatagtgaaggagtgatactggacaaattgtaaagctctaaagctccaccaggtggaggagggcacaggtgctgaaagacaagagaggtaagggaaagcctagaatcaagtcagaggcacagcaaacaaaagtaccccaagcaagccagttagaccaagagagaggctcattgtcctgtcttttctttcttatgggtgcgtggccctgaagcaggagattctgmtcttgaatgggaaagggttttcaagagactctttgaccagttctccatccatgagaatacatctcaattaccatggagacttccatcttaaaaatagccattgagtggaatcttagtgcaaaaaaaaaaaaaaaaaaaaaaaactcgag

SEQ ID NO: 1607 - DNA, 1636 bp, Homo sapiens
aattcggcacgaggtcactgggagaggcctatgccagagaaactgaggatgaggaggcggaggctgacagaacatccagaagaggctggaggctgcaagcggtggctgtgggcctcccggaccgtgaggatgcacagactggctctgtggctgctgggattatggggggtgatgtggtcccacacatcagcgctgctggcgctggtgaagctttggaaggggcgcttgggcaaggctgggactcgaaagaaaaggaagaggcagcagcaggagagcatgcaggtgggcaagaatttggtctggagggctcagcagaggaagaggtgactggcagaggcagccaagtagaggcttttgagtccagggagggaggaccttggggagggcgggtagaggccgaggaatctgcaggcgcagaggacagctgtgggctggatcccgcgggctcccagacagcgagggcagaggggatgggagccatggtggaggctggggggcttctagaaaagtggacgctgttggaagaagaggctgttggatggcaggagagagaacagagggaagacagtgaggggcggtgtggggactaccaccctgagggagaggcaccaaggctccttgatgcagagggtctcatggtgaccgggggccggagggcagaggccaaggagactgagccagaaagcctggaacatgtcaggggccaggaggagcagccaacacaccaggcccctgcagaagctgcgccggagtcagtcggggaagccgagacggctgaggccatgggcagtgccagaggaggtgctgccaacagctggagcgaggccccgctccccgggtccctcctagacgtctctgtcccaaggagtcgcgtgcacctctcgagaagctcctcacagcgtcgctcccggccctcttttcgtcggactccagcctgggagcagcaggaggagcccccagcccccaaccctcctgaggaggagctgtcagctcctgagcagagacccctccagctggaggaacccctggagccaagccctctgaggcatgatgggaccccggtgccagccaggagaaggcccctgggacacgggtttggcctcgcgcaccctggcatgatgcaggagctgcaagcccgtctgggccggcctaagccccagtgactgagacccggtgctctgggagccaggccctgagtgggtgccagaaggcttgctccaatgccactgagccctgctccctctgccactgtggacacatcctctccaccctctgggcctcagtgtcttgatgtatcattcatggagcaggcaaaaccagacgtctgggaagaccgtgaacttaaggagtctgattctccgacacaggctggtggaccacgtaccccactgagaccacctctcagggtgcctgccctggttcctccccagcctgagtcagctgtctggactgcaaggaggctgggcacggggctcacgcctgtcaccccagagctttgggaggccaaggtgggaggatcgcttgagaccaggagttcgagaccagcctgggcagcatagcaagatccccatcttttaaaaacaaaataaaacaataaagactgcaaaaaaaaaaaaaaaaaactcgagggggggcc

SEQ ID NO: 1608 - DNA, 409 bp, Homo sapiens
  misc_feature (388)..(388): n equals a,t,g, or c
  misc_feature (401)..(401): n equals a,t,g, or c
gacaattaagcagcatatcaaggttcatgtaagttacagttattaggtttaatatttagttttaatatttttcacccaacatcttgttgcatcttccagaataaatctggggtccataaaccaaaccaggagagggaaaatggaaagagtgggcagaaatctgacagctcttaggtttcttctatttgtgttaatactgagacttttaaaaatcatttttatatgtagtgtttattatgaatagttgtaatttgttctgataaattagttgtattaaacactgttatttggctaatattactaggtataataaaatgatatttagtgggaagacattcatcaaagtagaagtagttaatttgggccaggtgcatggctcacgcctgtnaatcccagccacnttgggagg

SEQ ID NO: 1609 - DNA, 1652 bp, Homo sapiens
aagcttggcacgaaggccacattagtggagggagcaaatctctgcttggaccttcgtcagtttggaattgtgacaattggagaggaaaagaaaatttgtactgtctctgagaatttcttgaggatgtgcgaatctactgagctgaacatgaccttccacttgtttattgtggcacttgctggagctggggcaaggaattctgacagaaacacaacaagggttaatggtagccagccctgctcagaccctcaatgacacgctggatgacatcatggcagtcagtggaagagcatctgcaatgtcaaacactcctacccacagtattgctgcatccatttcccaacctcagactccaactccaagtcctatcatctctccttcagccatgcttcctatctaccctgccattgatattgatgcacagactgagagtaatcatgacacggcgctaacacttgcctgtgctggtggccacgaggaactggtacaaacactgctagagagaggagctagtatagagcaccgagacaagaaaggttttactccactcatcttggctgccacagctggtcatgttggtgttgtggaaatattgctggacaatggtgcagacattgaagcccagtctgaaagaaccaaggacacaccactctccttggcttgttctgggggaagacaggaggtggtggagctattgttagctcgaggggcaaataaagagcacaggaatgtttctgattacacacctctaagtctggctgcttctggtggctatgtgaacatcatcaaaatattactaaatgcaggagctgagattaactctagaactggtagcaaattgggcatctctcctctgatgttagcagctatgaatgggcatacagctgctgttaagctcctgttagacatgggctctgacataaatgctcagatagaaaccaatcggaacactgcccttactttagcctgcttccaaggaagaactgaagtggttagtcttctgcttgatagaaaagcaaatgttgaacacagagctaagactggtctcacaccactaatggaagctgcctctggtggatatgcggaggtgggccgagttcttttggataaaggtgctgatgttaatgcccctccagttccctcctcaagagatacagctttaaccatagcagcagataaagggcattacaaattctgtgagcttcttattggcaggggagctcatattgatgtacgtaacaagaaggggaacactccattgtggctagcagcaaatggtggacacctcgatgtggttcagttactggtgcaagcaggtgcagatgtggatgcagcagataaccgcaagataactcctcttatggcagcatttagaaagggtcatgtgaaggtggtgcgctacttagtcaaagaagtcaatcagtttccatcagattctgaatgtatgagatacatagcaaccatcactgataaggagatgctgaagaagtgtcatctttgtatggagtcaatagtacaagccaaagatagacaggctgctgaagcaaacaaaaacgccagcattttgttagaggagttagacttggaaaagttaagggaagaaagtcggaggctggctttggctgcgaaaagagaaaaaaaaaaaaaaaaaa

SEQ ID NO: 1610 - DNA, 1528 bp, Homo sapiens
tttttgaagattgctttgtattttatttacaacagaatgtaagaaaaagtaagttattaacaataataaataactaggaagaaaaacacagaacagccacaaaatgacacagaaggatggcatatgtaaggatcaacttttgtttgctttgcttatagtctgtaatgctgtgtattccaacacctggtccttcagcagtggcagtggtatgtggattaatttaaccaatcaagatcccagcttgaatgtaaacactacaaattacacttgagctacatgtgagtggtacaggtacaacaccaactcagagaccctctcctgggtgatatatagaaactgaagggagacttgcaatttgacagacatgctttcaatttaaagcaaaaaacatcaagaggcttatcctaaagtccttgttaatttaacaacaaaattacaattattaatggcatctgaaaatttcccaacatattcacattctcttattacactaactcctaaaaagcttaaacacttatatttcaaatgcaaacagattgttttgaaggtagaacacaaaagaacccaatgttttgcctcagcatgccaacagtgtgctattgtgtacacttcagtttcagcaagaatgaatagttaaaatagtttattcataatcagattgcagtcactggacagactttttaaatctcaagaactatggctcagatgacagattgtctcctagcctactgagtcagatgatcagaaaggtactaaaactatttggacaattcctctctattggattatctgattacacattatatgtagagtcagctatacactggcccttcttaagagtaaaattcctatcgacgtaagccagccaatgacctattactttgttgtcgctgagccatgaagagatgccaaagaaagtagaatttaaaaatacacataaatacattagccctgaaacttttgcagagaatgatttatcgagatgtatcagaatctattctcttagttcactgtttattacagtgtcttgaaagaaaaccacagttacttttgcaggtattgtggtaagtgtctgcataatatacccacaactgtgctacttagagatttattttcaggaccaacaacatggctaataaatacttccaaataaattaaaattttcctcacacacagatgcaaaaccgtaacagaagccttgataaatcagttcaccaacaaacccatattgtttgagttacaacggtggcaactaaaaatgtcacggcctccttcattgtgttccttttcctttgctttgtcttgcaacaacccaaagtgagaaaatgaaatgatcttcagaggtgatttctaacaaagcttatgtgttaaatacaccaagatcttctcatcccaggaaagcacagctaaagcaagaatgccgtgctatggccaagaaaatgcacaggggcacttcacatttgaaatcttcccagagttatgaaatgtacagtcattttgatggtctccactaacttcagacctcgtc

SEQ ID NO: 1611 - DNA, 1790 bp, Homo sapiens
taacaagcttggcacgaggttagggaagcagggtctggcttttaatatgaactgcaaaaagcagcttctcactgatatttttttgttgttgtttctggggggtttttttttttttttttaatgcctttgagtgcatattttcttcctcgtctgaaaccgaactcccaaagtggctttctttagccctggctggaaaaccacctctcaatagccttaagcaataaatagatgagtagagaatgtggcttcaactgggcttattaaagtaagtgtgtctagttttcacttgaacaagtgatagctgcagatggcgaaagaaacccatttaatttttgtagcttacaggtggtagaaacaaaaatgcaattttaaaaccttaaataccaaataccaaccattgccttttttttttttgagatggagttttgctcttgtcacccaggctggagtgcaatggcgcgatctcacctcactgcaacctctgcctcccgggtccaagtgattctcctgcctcagcctcccaagtagctgggattacaggcatgcgccaccacacccagctaattttgtatttttggtaaagacagggtatctccatgttggtcaggctggtcttggattcccgacctcaggtgatccgcccacctcggcctcccaaagtgctgggattacaggcgtgagccaccatgcctgcccagcaataccaaccattgtcttttaaattcgtgttggcttctcagacagggagatcactggaataaaataaccgatggtcttattttgtcacacgtaaatcaaaagaaatgtcctctttgaagttgtaagactccaccaatgacagacacccttttcggtggactctgagtggtgtgtagtggttttatagccatggaaactaggagtatctcactttccactgagaacccctgcccccaatccctctaagttggggtgtggcagttgggcagggtcaagtgacccagccctggctgtaggacagccatatacagtgaagagttctagaaccagctaaaaatggaagtttgggtgtttaccaacaaggtacctctttatggatgcagccccagtaagctggctttaactctcagctccttccctgtctcctcctaatccaagcccttttataaaataaagccccttctgtcccactgctcacatacttatgtgctgctagtctctactcgaagttcgtgcaggactaatgcttttaaaatgaggtctaaaaaataattactagtcgagactattatctttaaacgactgcctttttcactctttatgtaaccttctattgtgtggtctaacaaggcactattttaaaattttttaatttttcccatagcacttaaaagagattttgtaaagaccttgctgtaaagattttgtaataaaatggtctaagggctctttttccaacattaccatttttaaaaaatgttttaaaagctagaagacaacttatgtatattctgtatatgtatagcagcacatttcatttatggaaaaatgttctcagaatatttatttactaatatatttatcttaagccatgtcttatgttgagagtgtgacattgttggaataatcattgaaaatgactaacacaagaccctgtaaatacatgataattgcacacagattttacatatttgcagaccaaaaatgatttaaaacaagttgtagtcttctatggttttgtaacaaattgtacacatgactgtaaaaaaaaaatacaattttatcaagtaaaaaaaaaaaaaaaaaaaaaa

SEQ ID NO: 1612 - DNA, 2324 bp, Homo sapiens
  misc_feature (41)..(41): n equals a,t,g, or c
tcccctggcagcccaagggtgttgggtccgcgaagctggantggccctctggtggagcctgcatccttgcctcgtctgcctctgctttacatttggtgtactttcgggcgtggtggcagtaaaatgacaccgtgattgagcttgtcagcagagctgaaagagaaagtagaaggatgtgcattgtttcttgtaagatatcttgcatgtatctgtgtattcaaattcaaacagagatggtttgtccatttgtccactgagaaattataaactagggacaagggggaggaaaagtactgaaatacagtttatgaagcaagtgtgtctcgggctgtgcttgtcccaggagccccagcagcatctgaactgaggcttcttcagtcctgcaggaacaggatcatctgtctcagcggtgggcagatgttttcatagacagccagggagtaaacactgttggctctgtgggctgtatggtctctgccataaatagtacagagatgtggctgtgtctagtacaacttttagacacagaaatctgaatgacatatattgttctgtgtcaagaaacttagattttttttttaactatttaaaaacgtgaaacctattcttagctcacaggccatggagaagctggtggggaccagacccagctccttagctggctgggctggggagggggtagtgacagtggcagctgctactcactgctcagtgtggaaaacacaggacttggcaatcacagcccgcagaaccatcatgtgtggcagaagcctgagggatgcggtttcttgcccacgtgctctgttcattttctgttgtttttctgcacttaaagaattcacatggaagcatgttttataaaatgaattaccagagaaacagagatgggccgagattttcagaaatggtcccatgtgaccaagttctgctgtttgggtgacagtgctttgaagatctcctttgaggatgtgcagtctttttttttttttttttgagatggagtttgttgcccaggctggagtgagtggcacagtctcggctcactgcaacctccacctcctgggttcaagcagttctcgtgccgcagcctcccaagtagctgggactacaggcatgcaccaccacgccaggctaatttttgtatttttagtagagatggggtttcaccatgtctcaaactcctgacctcaggcgatccacccacctcagcgtcccaaagtgctgggattataggcgtgagccaccgcacctggcctatgagtggtcttttaattaggaacaaatctaatggaaaggagagttgactgaagttggcccacaggattgtgagctgggcagtgccttcatgaaggcttgccaccttgggacgccccagtttactggggtgtcttgcggagtgcagaaggctttctggcagctgcctgggtttggccagaccctgcctcccctcccgccggccaacccctagtccccttcctgtctccacttgcattcaggggtggctgctgttctgagaacattagaactgggaagagagatggagtcacatggatttttggtgggcattattctaaactttcgtatccaagttagtcccccttattccactgtggcattgccgttctaagcagttacctgatgcctgctgctgaagagctgctcacaggaggcggcggcggccctggcactgccccttgcattaggtcttgtgtttgatgtgttcttgtgaatttactttgtcagaacaaaatatttacgcgttgggttcaggaatttcttttagctccccatctggctgtgaaattcaggaaacctcccgttgcctagtaatcaccccatgtaggtgtacattgtgacaaagtgcatctgaccactaaggggcccccttggtgaccccagcacattcacagcagtgttaaaatggcctgcattttggagatgctggctggcctttcagtgcctcccaggaagacacatggcctttccctcttcagatgcctgaagggagtgctttgaggcaggtgatgtgctgggagtgtgggcggcctccctctggccccggggccctctgtggaccttggctccctccgtggacctgggcttcgtggtgagcactgcagcctccctgggcattccctccagcgccagcaccactgcaacatatagacctgagtgctattgtattttggcttggtgtgtatgctcttcattgtgtaaaattgctgttcttttgacaatttaagtgattgttttgtttactgtaagtttgaaaataaaaatgaagaaaaaaattccaatgacaaaaaaaaaaaaaaaaaaaaaaa

SEQ ID NO: 1613 - DNA, 2913 bp, Homo sapiens
  misc_feature (2288)..(2288): n equals a,t,g, or c
  misc_feature (2753)..(2753): n equals a,t,g, or c
acaaaagctggagctccaccgcggtggcggccgctctagaactagtggatcccccgggctgcaggaattcggcacgagatacgattgacgtatgtaatactgttgacataaaaactgaggatctgtctgacagcctgccacccgtttgtgacacagtagccactgacttatgttccacaggcattgatatctgcagtttcagtgaagatataaaacctggagactctctgttactgagtgttgaggaagtactccgcagcttagaaactgtttcaaatacagaggtctgttgccctaatttgcagccgaacttggaagccactgtatccaatggaccttttctgcagctttcttcccagtctcttagccataatgtttttatgtccaccagtcctgcacttcatgggttatcatgtacagcagcaactccgaagatagcaaaattgaatagaaaacgatccagatcagagagtgacagtgagaaagttcagccacttccaatttctaccattatccgaggcccaacactgggggcatctgctcctgtgacagtgaaacgggagagcaaaatttctcttcaacctatagcaactgttcccaatggaggcacaacacctaaaatcagcaaaactgtacttttatctactaaaagcatgaaaaagagtcatgaacatggatccaagaaatctcactctaaaaccaagccaggtattcttaaaaaagacaaagcagtaaaggaaaagattcctagtcatcattttatgccaggaagtcctaccaagactgtgtacaaaaaaccccaggaaaagaaagggtgtaaatgtgggcgtgctactcaaaatccaagtgttcttacatgccgaggccaacgctgcccttgctactctaaccgcaaagcctgcttagattgtatatgtcgtgrctggsaaaacycctatatggccaatggggagaagaagctggaggcatttgccgtgccagaaaaggccttggagcagaccaggctcactttgggcattaacgtgactagcattgctgtgcgtaacgctagtaccagcaccagtgtaataaatgtcacagggtccccagtaacgacgtttttagctgccagtacacatgatgataaaagtttggatgaagctatagacatgagattcgactgttaaatcagtgggtcttttaaacctactcctggtagggaaatagctacagttttacggcagctatggttctgttggtttaacttgccggagctcctgcatatagatcacttgtatcaagtgttttcattgctaagttatatgtgttagtgtcggggaaatagtttgcagataatggaggagtaaccctacaactatatgtccttagttcttacagaacctcatagtttgagaacaaagctgatgcaactgatttatacaaaatgaactttggcaagaaaaataacattaacctcattgtttatggccatgctttgtgcataatcaaagtttatgattaaatgtaaggaagtggtatctagtcagtccataaagattgtgctaatttttttgtggaaaagtagccattagttcaggaaactcagtgctgccttcagatgtcattgatgtttctcctgttggaaagctgatgtgtccagctcaacctttgtgctgacatcataccatttctgatcatgaaatattggctactggtgtatgtagcagttcttaaatcagcagtattatgaaaaaaaattccccctcattagaatgtttaagaaatctttttaaaaagtaaaattctgtcagactacaaatgtttagctgttactcatttctagggaagaaattctaaatccctccttcactttgagcagtgttctaattgggataaatgaaggagagtagttttattctgaaggtaattaaatttagactatgtagtatgtgacagaatttttttaaaattatwaaaagrttttatttagtaattgggatttacttaaaataattttggaataatgctcccagacttgcccagatttgtgtattgtacttattgccactggccgccactttgacttattttctctaatagtttatttgccacagtctttattttgaatatgctcctagtttttttttagggtgctgttcattatgaaggcttctttatagaggcctaataagaatgcctttttataaagcctgtgcatttaggtaggttgaagctaggaggattttctttagaatgctcttttgcatgtaaagcacaaagtatgtttcagtttaaatgcacttcttccnggttaattttwatggggaagacaagtgagtcacaaacattctgttgaagggaaatctagtcagttgcttgaaagagcacagcccaaataaaacaaggactgactaggtgtaatgaaataacctgtgatttaaaagaagagctgcagctttgacagtgcttatttaaagaaaaatactgctggaaaatttccaatttctactacgttcaccatctctagtaagatctgacatatgctgaagttatgttttgatttggcacacagcatgttcaatgatggttactcgcctagtacaagacatggagaagaaacctttggacacagagcagatgacacctccttctgttttgtagtgtatcctggtgtcattttctgtgaatgtggtcaggtagagttgtttttgttgttgttgttgggcttttttttctttttttttttttggtctcttttggtggggtgggggtgngctaaagccataggaagaaaaatgtgatgtgtccagtatgtactattttgtttttgttttgcaagaagagttgaactatttttgataacaagagtaaatggtggaaaatgcttaaaaaaaaaaaaaaaaactcgagggggggcccgtacccaatcgccct

SEQ ID NO: 1614 - DNA, 424 bp, Homo sapiens
  misc_feature (409)..(409): n equals a,t,g, or c
  misc_feature (416)..(417): n equals a,t,g, or c
  misc_feature (421)..(421): n equals a,t,g, or c
ccggttggtctcgaactcctgacctcaagtgatccacctgcctcggcctcccaaaatgctgggattacaggcatgagccactgcgtctggtccttggctgtttcttagscccactcctggcagtgtctcttctcttcagctatgactggggagtagatgaccgtgcttgtttctgacacacagcacagtgtcctctctgtacacaagctggtggttcaagggccaatggttccagagagatagtggttcccttccttccctcctcaccaataggcagcctcaggccttttctgtgtataactgtgtatatagacataaaaacctacaaatgtgaaataaatctatgctatctttcatagtgttaccacaaaaaaaaaaaaaaaaaaaaaaaaaaaaaaaaaaaaaaaanggggggnncccntta

SEQ ID NO: 1615 - DNA, 1844 bp, Homo sapiens
  misc_feature (1699)..(1699): n equals a,t,g, or c
aggaagtgccgatcggctgctggggcgaaaagggggcgccgggccgctctagccgccctggtccagcgcctccctctctcagcatggacgaggagagcctggagtcggccttgcagacctaccgtgcgcatgcagcaggtggagctggccttgggcgccggcctggattcgtctgagcaggctgacctgcgccagctgcagggggacctgaaggagctcatcgagctcaccgaggccagcctggtgtctgtcaggaagagcaggttgttggccgcgctgkacgaagagcgcccgggccgccargaagatgctgagtaccaggctttccgggaggccatcactgaggcggtggaggcaccagcagcggcccgtgggtccggatcagagaccgttcctaaagcagargcggggccagaatctgcggcargtgggcaggaggaggaagagggagaggacgaggaagagctgagtgggacaaaggtgagcgcgccctactacagctcctggggcactctggagtatcacaacgccatggtggtgggaacggaagaggcggaggatggctcggcgggtgtccgtgtgctttacctgtaccccactcacaagtctctgaagccgtgcccgttcttcctggagggaaagtgccgctttaaggagaactgcaggttctcccatgggcaggtggtctctctggatgagctgcgccccttssaggacccagacctgagctccctgcaggccggctctgcgtgtctggccaagcaccaggatggcctctggmacgcagcacgcatcaccgatgtggacaacggctactacacagtcaagtttgactcgctgctgctgagggaggccgtggtggagggggacggcatcctgcccccactgcgcacagaggccacagagtccgactcagacagcgacggtacgggtgactccagctatgccagagtggtggggtcagatgctgtggactctgggacctgcagctctgcctttgctggctgggaggtgcacacgcgaggtataggctccagactcctcaccaagatgggctatgagtttggcaagggtttgggccgacacgcggaaggccgggtggagcccatccatgctgtggtgttgcctcgagggaagtcgctggaccagtgtgtggagaccctgcagaagcagaccagggttggcaaggctggcaccaacaagccccccaggtgccggggaagaggggccaggcctgggggccgcccagctcctcggaatgtgtttgacttcctcaatgaaaagctgcaaggtcaggctcctggggccctagaagccggggcggccccagcgggaaggaggagcaaggacatgtaccatgccagcaagagtgccaagcgggccctgagcctgcggctcttccagactgaggagaagatcgagcgaacccagcgggacatcaggagcatccaggaggctctcgcccgcaacgctggccggcatagcgtggcgtcagcccagctgcaggagaagctggcaggagcccagcgccagctggggcagctccgggctcaggaagccggcctgcagcaggagcagaggaaggcagacacccacaagaagatgactgagttctagagaccccacaagcactatggacgaagcgtgggaccccagcacgggctgccctcaggaagaccagtgttgcccgaggaggggncgcctgctggcctggggcgtgcggacactgctgagtggagacagagctgcggggtcccatctggacacttacttgcccacctgccagtgtcttgggcatttccttggcaaggacattaaagtgatttcatcacagaaaaaaaaaa

SEQ ID NO: 1616 - DNA, 2124 bp, Homo sapiens
  misc_feature (8)..(8): n equals a,t,g, or c
  misc_feature (76)..(76): n equals a,t,g, or c
ggcggttnaaagggcaatcagctgttgcccgtctcactggtraaaagaaaaaccaccctggcgcccaatacgcaanccgcctctcgccgcgcgttgccgattcattaatgcagctggcacgacaggtttcccgactggaaagcgggcagtgagcgcaacgcaattaatgtgagttagctcactcattaggcaccccaggctttacactttatgcttccggctcgtatgttgtgtggaattgtgagcggataacaatttcacacaggaaacagctatgaccatgattacgccaagctctaatacgactcactatagggaaagctggtacgcctgcaggtaccggtccggaattcccgggtcgacccacgcgtccgagttaatagacacttgaattgttttcggtttttggcaattaggaataaagccactgttaacattcacatataagtctttgtgtgggtgtgtattttcttacttcttctgtgaatactcataaatgggactgctcagttatatgataaatatatgtttaactttgtaagaaactgctgaattattttmcaaagtggttgtaccatcccgcattcccatcagcaatgtttggaaattccagttgctccacatacttgttatgggtcagtctttttaatttcggccattctagtgagtgtataatgatttcttgctatggttttaaatttgcgttttcctaaagactaatgatgttgagtattttataatagttattggaccaaagggagttcttcatctttgtaacattgatataataagattatttaattgctagttgatactcaggttttgtcacttgtcccaataatgtccataacaagcttttccttcctctagatmcaaactatgaccacacattgggtttagttgtcatgtttctttggtttcttttaatctcagttttctttgtctttcttagacctcaacttaaaaaaaaataataaaaaagcataggcctattattttgtaacatgtctgtcaatttgggtttatctgatatttccttatgataagattcaggttggtatttttggcaagaatgttacagaaattatcttataaccttttcaagggcattgtatcaaggacccccgtatgtgactattagtgatgactttgtatgttgcccaagaaatttatgcctattctaatgttgctaataattttcctgttttcttctagaattttcatagtttcggcttttaagtttatgaactatttagaaatattttgtgtgtgtgatgtgaaatagggattgaggttcattcattttttttttcaactttttgccttattagcttttcctatttctttgayttctgcttattattattctactttctttgaaatttaatttgctcttctttttctacctttttaagttgaaaacttaggtcaatgttttatgacctttcttttttttaatataagtatttaaagctatgtatttcctgctaagtactagtatactgcatcccatgaattttgatatgtaatttttattatcacttagttcaaaatatttcctaattccctttgtaatttttttgacccttgggttattgagaactgtatttaggaatacttggggcttttatagatattttactgctagtggttttttgtttaagtgtgtgtctktgtgtatgtgtgtgtgtatgtgtgtatcagcaactataaagatctcagtattttgaaatgtattgaaacttattttatggttagtctattctcacactgctataaagaactgcctgarcgtgggtaaatttacaaagaaaagaggtttaattgactcaaggkktaattgactcaaggttctgcatggctggggaggccttaggaaacttacaatgatggcagaaggggaagcaggcatgtcttacacagcagcaggcaagagagtatgtgagagcacaggaaaaactaccgtttataaaaccttcagatctggtgagaattcactcactatcacgagaaggcttagaagaaaaccccacaaaccccattactaaacccacactcaacagaaacaaagcatacaaaaaaaaaaaaaaaaaaaaaaaaaaaaaaaaaaaaaaaaaaaaaaaa

SEQ ID NO: 1617 - DNA, 2312 bp, Homo sapiens
  misc_feature (239)..(239): n equals a,t,g, or c
ggcggactgacaggcccgggcaagggtcgcttcctcgtccgcatctgtttccagggagacgagggcgcctgccgaacccgggacttcgtggtaggagcgcttatcctgcgctcatcggcatggacccgagcgacatctacgcggtcatccagatcccgggcagccgcgaattcgacgtgagcttccgctcagcgagaagctggccctgttcctacgcgtctacgaggagaagcgggasnaggaggactgctgggagaactttgtggtgctggggcggacaagtccagcttgaagacgctcttcatcctcttccggaacgagacggtggacgtggaggacattgtgacttggctcaagcgccrctgcgacgtgctggccgtgccggtgaaagtgaccgacaggtttgggatctggaccggggagtacaaatgcgagatcgagctgcgccagggggagggcggggtcaggcacttgccaggggccttcttcctgggggccgagaggggctacagctggtacaaggggcagcccaagacatgctttaaatgtggttcccggacccacatgagcggcactgcacgcaggacaggtgcttcaggtgcggggaggaggggcacctgagcccttactgccggaagggcatcgtgtgcaacctctgtggcaagcgaggacacgcctttgcccagtgtcccaaagcagtgcacaattccgtggcagctcagctaaccggcgtggccgggcactaaacacccgcctgcctgccagggtgaacacacagccagcttatccctcttaagtgccaaaacttttttttaaaccattttttatcgtttttgaaggagatctttttaaaacctacaagagacatctctctatgccttcttaaaccgagtttactccatttcagcctgttctgaattggtgactctgtcaccaataacgactgcggagaactgtagcgtgcagatgtgttgcccctcccttttaaaattttattttcgtttttctattgggtatttgttttgtttcttgtactttttctctctctccttgcccccctcccgccctccccgccccataccttttcttcccctggattttcaccctttgggctgccttgctcatctttatgccccagcactaggtacggggcccaacacgtggtaggcactccatcagtgtttgctgaattgaaaacattgttgactgtggcttctatcagagtgtctaccttttgcagctcttcccctccctcatttaatttgctgcttttaatctacgtggtctgagaatttgtgaaaccagtgttgttagaagtgtatataatctgaatcaataagctctgaatggtggccaagggctctcttatggcacaaagatgcatggacttcatgacagctcttttggtggctcagaagccattttttatagaatcatggaatctagaatattcctgctggaaagaacctgagagttggtttggaccaattccctggttttccagcagatgaaacaggcccaaagaggttaaatgactgggtgaaaatcacatagctgtctggtgccagagccagcctatagtagagtcccctgaccccaagcccggtgctcattccactacctctcacacttcacaacaatttcctcaacacttgagggcccagaaagtctgatctctccagaatgatcagcccagaggaatgctgagaaatcacctggaggagggagcagaaagagaaggtttttaaggaggggcttctgaatacttgggagatacggaacggaccaaggaccacactccagggtgcattcgttgctccctggggcaccacttctggattacagtgtgccaggtcctttggaggccctaccccttccccattcattgccaccagtgagaaatgggggtgcccctgtgtaaagaaacctaccaaaggtttacatttgcaccttagcctcaatagctacgaaccctagagaagcagctagctggagctcatgtgcaactcctgattctcaggagaaagatggattttaacccaaaattatgagtgagctgttaactctaaaatgtacttgggagataggccaagcgagaggtcatgggccaactaagtgttatccagtagaaaagacagtacactgcttttcttttagtgtttgcttttcctttgctatatgttttgctatttccttgtggcttagaatgtaaaattgattgttaaaagttttgttctgaataaatatttatcttttgtattgctaaaaaaaaaaaaaaaaaaaaaaaaaaaaaaaaaaaaaggggggggggc

SEQ ID NO: 1618 - DNA, 1058 bp, Homo sapiens
gactttttttcatctgcttattttcagcctatgtgtgtctttataagtgaaatgtgtttcttgtagacaacagataattgggtcttgtttttttatccattcagagccactctgtgtcttttgatttgagagtttagtgcgtttccattgttattaagaagtaaggatatgttctgccattgtattgtttgtcttttgcttgttttgtggtcttctcttcctttcttcattccttcatttcttttattgaaggtgattttgtcttgtggtatgatttaatttcttcctttttattttttaggtatatgtyatatggtttttgatttgaggttatgatgagtcttgcaaatattatcttacaacctattattttaagctgataaccacttaacattgcataggcaaaaacacacagaggcaaaaagaaaaccaataaaagctctacactttagcctcttgctttttaactttttgttgtctctgtttatatctcattataatttctatgtcttgaaaagttgtcattattagttttggttggttcatcttttagtctttctccttaagatcagagtattttatatatcacatttacagtgttataatatgctgcatttttttgtgtacttactattaccagtgagttttggaccttcagttgatttcttattactcatcaacttccttttctttctgattgaaaaactcccaggctggacacggtggcccatgcctgtaatcccagcactytgggaggctgaggtgggctgatcccttgaggtcaggagttcgagaccatcctggaaaatgtggcaaagctccatctgtwctaaaaatataaaaaattagttgggtgttgtggcgagcacctgtaatcccagctacctgtgaggctgaggcaggagatcgcttgaacccgggagacgaaggttgcagtgagccgagatcgcaccgctgtactccagtcctgggtgacagagcgagacgccatctcaaaaaaaaaaaaaaaaaaaaaaaaaaaaaaaaaaaaaaaaaaaaaaaaaaaaaaaagggcggcc

SEQ ID NO: 1619 - DNA, 2732 bp, Homo sapiens
  misc_feature (334)..(334): n equals a,t,g, or c
  misc_feature (1885)..(1885): n equals a,t,g, or c
aggccaggcagcccgctatccttggatggcctttccacgcaatagcatcatgcacttgaaccacacagcaaaccccacctcaaatagtaatttcttggacttgaatctcccgccacagcacaacacaggtctgggagggatccctgtagcaggtattccagcgtcttcaggaaacagtttagactctcttcaagatgacaatcctccacactggctaaaatcccttcaggccctcacagagatggacggccccagcgctgctccatcacagacccaccacagcgcccccttcagcrcacagatcccgctgcacagagccagttggaatccctancctcctccttcaaacccttccagcttccactccccacccccaggctttcaracggccttcagaccccccagcaaaacccccacagatttactacagagttcaacactggaccgccattaggcawagaggagcaaccattakaaaatgcaggatttgtcccactctkttttctccctctcagcccaccacccacagctcccttctcatctcttatgttctgaagaatccagtacctgatcaattttttttctccctaaccccagatgcaatgcgatcacagggtcattaccatctctttattaattgtaaaaatttttgttgatccagcatttgagtgacactgttgaatgtttctaaaaatgcctttttaaggagagaaaaaaaaatcaaagggcagtctcaatacttagaaaattattgtttgtctgttgcgcataataatgacataatctgcttagcagaaaatgacgattaatctataggaaagctcaagtaaatgcattatcaactgcagaagtttgaaaaccaggttcatttacgtgagattgctaaatgcatgggggaaagcagtggtcctagcatccatcttgtattcagcttatcattattgcagggaaaatgcttttaatttaaattaatttttaattcttttggcaagttgatggcaaggacttgattgtgtcattaagcaaaagaatgtattggaagttgatggaaagacaaattcatctgtagtagtaactggccgattgctaaagagttcataaggaggtgagaagtaatttttttaaaggagaaaaattttttggctttagatttaaagtaaattgaaatgttttaaagaaaaaagtattcacagatttaatacctattaataatataagagctgaaatgtaagtcatttcttcagtccttctcctctgtcggaatcttttttgttttaccataaattcacctgacgagggcactctgagatagcactgctctggggccatctgatcaccatcgggagcaaatctctgacctccttgcctgcagcttttacttaaccctgtagtttctggacgtttgtgcagtattgaaaagacaggagaaaagaaaacagaaacctggttataacctgacgctaaaactaaaaacaaggaaatgtacctctttcttcagaattaaaactaaaatcttaaataaaacagaaaacttgatgatgacacttgggttgtccttgtttttgtttttctgttttgttggatgtgagtttgaaaggttttgtgacaagtagccatcagatgtttccatttgattttacatcttcaacagtggggagggaggatggtttagaagaagaaagtggrggagaaacaaccattttattgacagycaatggcatccttgacgttcagcccatcttgtcctcaagaatccctcttccagtgcctttcagtagaagattcctctttctgctattgtattatgcatgccaagccttcyyaactgagaagccytatgygccagtaatggagaggttattgacatgttgagatgttggttctntttagggagacctggcaggagcagcagtcactatgtcacacaagtgacatctctttgtgagtgccatgatgggaaagagatcgggaaacactgatgtagatgatccacagacacatcttttatgactgaccattttaggaagtacctgatgatggggcaacgatcgcaccactgaccaaaagagggtagaggatgaaagttacctgttccccaacagagcaccaggatctgtgtggtttgtatgtcttgccttgggctgcattcagaagcccaaagctggaactggcatattttcagccatgtccattaagggatgtgatgtaggatcaactaaatagatctagatcgtacgttctgtgctttcaggtgggtttttttcgtccttacctttatgctgtactttaatttgttaaaatttcaacacaatttttagaaacttaaacatgatattctcaaataaatgtcaccagaaatagatggtgatcaagtggatagtaaattgttttgtaaaactwacaaaatttccctggataagaggagaggactagaaatgacaggctctctttgcccttgaacttcacttcagtctcctgaaccttcacattgtactgcaaagtgatggaccaatgcacaaataatattcagatggcagtgaattgtaatcaaggctttttgcggggatgcggggaagtcctgakatggggcatatcaataaaaatgttgctttttttgtaaaaggagggaactcctaccttataaggctgtgctgtaattgtgtgtgtgtttaatcagtcatacagaagagtttataaaaagcatgactttataaaaagtatgaagaataaaa

SEQ ID NO: 1620 - DNA, 372 bp, Homo sapiens
ccacgcgtccggtgaacacagagaaatgaatttattccccatatgggtatgtttgccccctggcaatgcatttccatactctttaacttggggactgaaatgttataaattgacagttctactcagaagacctttcaagcatcttgtgtttatgagaatacaggggcatctgcggaatgaattcgaacacatggatgaattaaatttgaaaacacacagaccgagaggcagacagttcctaggctgtggtcgttgcatggattttacaaaactgttaacctacacctttggctttgctgtgttcattgtcctggggaagaattgtgggtttaagaattactctttgattaaactacttaaaaaaaaaaaaaa

SEQ ID NO: 1621 - DNA, 2043 bp, Homo sapiens
  misc_feature (308)..(308): n equals a,t,g, or c
  misc_feature (1672)..(1672): n equals a,t,g, or c
gtgcatctacagggtatgtgtttaaatgaggggtagttgacccacataactccccaccctcctgcctcatggttagaatgtatgttcattggggattctgcatacattttcatcacatatctacttttctggcttttaagtaatatcctctcctttgtttttgccaacagtgttcatgaatagtgaatgtaggaaagcattatcattgctatgttttattttcacactgtatctcagtatcagcccatactttcaatgtactaacaactgtcactgaggcaaaaagttttaattaagctcacacatgnattattttccagcaaacagagcctaattgatgaaattgctaactgtacttccaggtgcagtcagtagccagtagtgcatgttagtatgcaatatggcatgggctgttacatggtgtgatactagattatatatttactatgaacgtatgtattgttctttaatgacatctawttgktcattccaaaaatatttattgagcacggactctgtgccagttattagttagagtaataatagctgctgtggcaaatgaatttcctcacctaagaaaaataaaagttaattattttttctccacataaaggtctagaatgttctgccgcatgccttccatgtcatgattcagggacccaggctccttccatcttgtggctgccccatccactaagttctcagactctttcatttccaactggtggttgttgaaagagaaggtgatgaaggtgtaccccacttacatcttacccactttcacctaraagtggcacatatcacttttattgacgtttcattagcaagaattgtcctgcaacacacttggaggaaggcagctgggaaatgctgtccctggctgtgcacagggacatatgtattttatgtattttatgagactctttgcaggatagctggctatctctgccacagctggccatgtctgccatggctagacatcatttcaggctctagggaaatagcagtgaagagaaacagacaaaaatatctgacctcatggagcataaattcttgaattaaaattcttaaattcttcatgggatgagacagacaataaccaggctaaatcagtatgttgcaaagcagtgagagctgctaaaactaagcagaaaaaggggtacaaagcatgagagagaaggatttgagatgagatagtgtggtcatagaaarmcacactttcwatcagcatgagagaaaagctaaagcaggaaaaggggtagaaagcatgagagaaaggtttgagatgagttagtgtgctcatagaaagcgtcttgaaagaaatgatattttaagtaaagaatcagagagcataaggtgtccaactaggtgaatatctaaagcaaaaacattccagatggagagaatagcaggtaaaaggactctgaagctggtgaagataataagggtgagaataatagaaggtgagatcggagaggcaatcgtcaggccagactgtgtcgggccatttaggtcatagtaaaaatctgggcttttttttttgtttttttttttgtttttgtaactaactttattgaactatgattttcataaaatatacccattcggtaggttttaaaaatgtagactgaagacattcatataatcaccactacaataaaaatatagaacntttttatcatcccctaaagtatccctatttatagttcatacctggccccagcaatcactgatatgccatcacagattagtttgttttttctaggatttcatacaaatggaaaggaacagtatgtactcttctgtgtctgtattctgtcactcaacataatgcttttgagattcattcatattgttgtcagtatcactactttatttctatttactgccattatatgaattctattatgtggatataccataatttatttaatctttcacctactgagaggcatttgagttgttgataatttggggctgctatgaataaatctgctatgaacataaaaaaaaaaaaaaaaaaaaaaaaaaaaaagggcggcc

SEQ ID NO: 1622 - DNA, 1557 bp, Homo sapiens
  misc_feature (1557)..(1557): n equals a,t,g, or c
atcccatgagcgctgcttactgttgaataccaaggtctagggctctgcttcctgtagacacgcacacgttgtctccatccaatggccttttctgaagttacagaaaacaccaacatgggagggagtttatgaagcaaaggcaaaggcaacacgtcggctagcttcaggrtagcaccgtgagaaatgggctgtattgatactgtgaatgtttgttttccaagctgttttatacaggtttgttttttcatggtgtagggtatttatgacaaagtaaatgttgtgaaggttaaagataaattaagattatccaccaaatgctaaaaatactgatgtgtaaatcacctttatcgcctcacctcttctacaagcttttgtggcttgagggcttttgtttttggcttttgtctggatgaaagttttgcccagttgtgttttaaaaacaattcctcatgaacactaagattaattgtgtctgtatctctggaactgggtgctcatgttggttttaatgagcttgcaacccttccccgtttgctttgtttaaggaggtgcctctgttctttgtggaggagtgaaatggagctttaagtgtgtgtgtgtgttatgtgtgtttgcacacacgcgtgtgttattgtagcaataacaaaaagtagccatctccttgttccagctgaaaacctgctgtgagagttttgacagagcactttattttcgtcaagtttcaagtctgagttcaaaaccagccctgatcccttatgaccaactgctactcgaccagtcgccactcagtggccacctggtgcccgtttagatttttgcttgggttttactggccacctctatagacgagagttgcaaagttgctttgagcagagagggaaagattaatttacactgctggccaccgaagcaggtgtttcctgggtagtaatctcacggctcttgatctggaaacttcagagtacaaattggtggatggtggaaggcaggacacgtatctctgtctgacggaaaacagacctcggggctggcgtaaaccctgctgccaggccctctccccactgccccaaaccggcctagacacgaagaccaaagcagcctgcacagggcaaggcccccgcggaatcctgcagagcaaactcaggttamcttgggtccatgaccgtttgcattcgaaacacaatacactgcctcgttctctcagttagcagctgggcagcagcgcaccattcatcatttaggcttgtggtttgttgtttactctaccaatgttatgtygaaactgcattgtaaaaagagaagaaaatggcaggttttccaggtccacggaaaggtttggcctgacgctggagtgcggtgatgaacttacgtgacaatgattgtattcctcagtagcactttaaacgccgaagacagccctgcagcaagcctgcacacgggcttgggtgggttcctttggagaagatgtggctggaacacaaacaatctttgaaagaaataaatgtgcacacagaacamwaaaaaaaaaaaaaaaaaaaaaaaaaaaaaaaaaaaatn

SEQ ID NO: 1623 - DNA, 1699 bp, Homo sapiens
  misc_feature (2)..(2): n equals a,t,g, or c
  misc_feature (26)..(26): n equals a,t,g, or c
  misc_feature (28)..(28): n equals a,t,g, or c
  misc_feature (56)..(56): n equals a,t,g, or c
  misc_feature (62)..(62): n equals a,t,g, or c
  misc_feature (1239)..(1239): n equals a,t,g, or c
gnaccggataccattttcacacaggnancagctatgaccatgattacgccaagctntaatanggactcactataggaaagctggtacgcctgcaggtaccggtccggaattcccgggtcggacccacgcgtccggcgaggctgggttacgtgaggaagctgggggtttcgcgggcagctttagagccccagtcagggaaaccgaggccgggcttcctggctgcctcgcgagcctcttcatggctctcgccgccgccctgaggtgcctagaatgggttccggcctccggggaggttcccagtaaccgcaggagccaccattgatttggcgtctgctgggtgcaaagcccagcgcgctaaccctttactcgcgacctttcgcttcaccttcacagcagccctgcgaggagagttgtggactggggcaacctttgccagtgatgagaagtgatgctcgtggcagtgctgaatctctctgaatatgattcgaattgcagccttaaatgccagctccaccattgaggatgatcatgaaggaagctttaaaagtcacaaaacccagacaaaggaggctcaggaagcagaggcttttgcattgtaccacaaggcccttgatctgcagaaacatgaccggtttgaggagtctgccaaagcctaccatgagctcttggaggcgagcctgctgcgggaggcagtttcatccggtgatgagaaagaggggttgaaacaccctgggctgatactgaaatattccacttataagaacttggcccagctggcagcccagcgggaggatctggagacagccatggagttctacttagaggcagtgatgctggactccacagatgtcaacctctggtataagattggacatgtggccctgaggctcatccggatccccctggctcgccatgcttttgaggaagggctgcggtgcaatcctgaccactggccctgtttggataacctaatcactgtcctgtacaccctcagtgattacacaacatgtctgtacttcatctgcaaagctttggagaaggattgccggtacagcaaagggctggtcctcaaggagaagatttttgaggagcagccttgtctccggaaggactctctcagaatgttcctcaaatgtgacatgtcgattcacgatgtttcggtgagtgcagctgagacacaggcgattgtagatgaggccttggggctgcgaaaaaagaggcaagcrctgattgtrmggnagaaggagccggacctgaaacttgtgcagcccattcctttcttcacctggaagtgcctcggagagagcttgctggccatgtacaatcatctcaccacctgtgagcccccacgtcccagccttggcaaaaggattgatttgtcggactaccaggaccccagccagcctcttgagtcctccatggtggtgacgccagttaacgtgatccagccaagcactgtcagcaccaacccagctgtggctgtcgccgagcctgtggtctcctacacctctgtggctacaaccagcttcccactgcacagtcctggtctgttggagacaggcgctcctgtgggtgatatttctgggggagataaatccaagaaaggggtaaaacggaagaagatttcagaagagagtggagaaacagcaaagcggcggtctgcccgtgtccgaaacaccaagtgcaaaaaaaaaaaaaa

SEQ ID NO: 1624 - DNA, 1796 bp, Homo sapiens
ggggacccaagatggactgcctgtattgcttccaggataaagtccaatttctagctctggtttttataaccttgcttcagctcaccttttccgtcatcatcccctccatctcctctcccacgctgggaaatggatggctgcactatactgtgtgatgttattgctatgttcatgccatcccctctgcctggaatgcccttctgcatgaatgcctgtgaaatgttgttgctcctttgtatggcctggcttccgtggttggcaggaatctcttctttcgtggtattcctgtcatctttgtgcatcacagtcagctttgtattcctagcttgtaagctacttgaggataagggcatgtctgaatctatttaatctctttgcacctgtttgggcaattgatgttttaaatatttaaataactaaactctctctacagtacatactcacttttgatttatgaattggcaaaattcaacttttttccttgaatattcttaaactgagatgaattccaaaggagagtgttctgtgtgtggccttcattgagtggttttctgttaccagaaagctcttggtggccttcctcttccctggtgtcaaggttgactgttataggaaatgggaggggagagggccgtttctgccacgcattgtcctaggttcttaacattatttaatccttataatgcaatgtatcctcattttacagatgaaacctgagaccaaagaacatgtaacacataaagtacattgcagagttaggatgtgaacccaactctgattctaaacctaatgctctcactctttcattcagaggttcagtcagttctttgtaggctgtagatccagagaagctgccgtagccaacaatgaagttgttagtttttaaaacatctatgtggtaagttggtctggcacttaaaaatgtattgtttcccaggcacggtggttcacacctgtaatcccagcattttgggaggccgaggcaggcggatcattaggtcaaaagattgagaccatcctgaccaacatggtgaaaccccgtctctactaaaagtacaaaaattagctgggtgtggtggcgcatgcctctagtcccagctacctgggaggctgaggcaggagaattgcttgaacccaggaggcagaggttgcagtgagccaagatcatgctactgcactacagcctggcaacaaagcgagactctgtctaaaatatatatatatatatatattgtttactactcaccacagatctgcaggagttcactgatctctaggatctgccttaactccaacttacatgttttggtcactattacaaactgtcatcccagaatgatgctgcagaggctagggctaggacacagaccagtgtttccatgtgggaattccctcccagtatttcttaggaaatgtatgttttttgaatccataatccctagaaaaatcagttgaggaaatgagaagtattgtaattattctgtgaatagtaacacttaccattatggagacatcactagtttgaaagaatccaacttcatcaaatattaacgtaccgagttgaaggctacaagaactgagacaggagcatagcagagagaaacggtcaccatctcattagccctatttttggttgttgtgatgccattacatctgtatatctggccatatcagctgctaatggtgagttcttgcaaacaaaatgatttgataaacaacctaccatactttatacaaatcttatggtgttccgagaaataaactttggaagcaaaataaaaaaaaaaaaaaaaaaa

SEQ ID NO: 1625 - DNA, 1535 bp, Homo sapiens
ggcacgagctggggtaagtttcccttgttcctcaagtaagacaggatatactttgcaataatctaaaaaatctagatgtgacctggacaaagagagagagacaaagtataaaatgctttcttagggataactcatactcttggtgacaagaaatgttaatggtgtcctgaaaccttttggtcagtgattgctccattatgtgggaaaaacataggaaaataaacataggaaaaacaaaggaaaataaaagactcatagtacttcaataaaagttgtcaccaaatcccaagaaaatgattgcattggaaggaatattctttttgttttaattgatagtattttaggaagtagctaacacttgttcttatttcctagcttaaaaagtgaatatatgcacacacatatataactagaaagtgatatattaacattttctattaacaagttttttatctcataaaagatattctttggctttcgaagagaagccaaaataaatatcacataggcatttcagatatcccttcctttaaatgtttatagtgatacataaaatagaaattgcaaatatttgatattttaatattatttttgctttacaatagcatttttagtgctccatttttaatttattttatctctccaggttaataatctatcataatgtccaaattacacagtattgtattggtcagctttaagtgcccagatcaatgacactgaacctggcaaatgcaatgcacatgcacaacgcctagcttctaacatcatggctgttgaaactgtctcctctccaaagcattttcccagccccatctctgccatttgggtctcatctgataaggtttaaccatgagttgttatactccatgcatggcctctggcatttgtgtgtattgtgattctaaacgtcaaatggtaaaggataacattagattatttcgcttttattttgacagagttcaaatagcaaaataaattagatatactgtcacagcttaagaaatttaaaatgaaatatgttgtagtcaggtggaagtttctgccggggaaatattaacacctaatttcccagaatacttatttcatgcattgcaaatatctatctcctgtcatgacactgagatgaaaaggatcggttaaaagtttgctaactgaactatttcccacagtgtaaataactaagtgttggtatagactagtatggaaacatactaattacactgggtgtaagctatgtgagttgccttatcttttcacataacatttatatgtattgcatttcccatatcgtttccttttgttttgctgataacaactaatgaggaaaagaaaggaagcattaaaaaaaaagaaaaaaaaagtcttccaacaaaactgctagagagagaaagccaactattataaaatataagcacaattctattgaaatatcagctccagattcaagtaattttgggcatgtgtattatgtgccaggagatttcacttacatatgttatggaacgcagtgatttaaaaaacaaaacaaaaaa

SEQ ID NO: 1626 - DNA, 1328 bp, Homo sapiens
gctgcaggaattcggcacgaggtgacccaggcacatggtgcaaacctaggacctccacctcccagctctgtagccaggggcagctcactccaccctggtccctggagtgtgcttacaggcttccgtgttggggggctgcgaggcctgggcagcaaaccgccttgtactgcctctggcctgtggatagtagatgctcaataaacctctccttcctgtcagaaactcagtctccctatgtggatgacagcattttcctaaaggatctaaagttccatccaccttaaactctgcctgaagggaagactatgaaactagaaaagaaaatggtgtggatttgtgtgctactgcagacactgctgcgacatatattaaggagcatggaacggaaccgcgtggatgataaagtctgcgtggtgtttacaaaggaatattcataagcactttctgagaagccccgtgcagctgctaacagtgactgcctaggggaaaatggacttgaaggagtagaggccaacttttcattttatacctttctatactttttaggactaccacctatgtacgtgcattttatttttgttaaatgttcgcaggggatatctggcaggacaaggaactggctggaaaggggcgcgaggagatcttctgggtgacggagatccaggtggtggttactcagatgtattttatccttcaatgagaagtttatttcgaaaacgtcctgtgtctcttccaaagatagctccagctgggcaaagtggcagctctgtgggctccaacggaagaggccaaaaggcccatcctcctcctgtcccctgggttcaattcacagccctgcctgtctctagctgtgtgatcctggacgtgcctctctgcttcctcagctcctgcttcaagacaggcctaaccaaattttgagaagtccccagcagagctcccgaccctaatcagagaagaagaatgaatgttctgagtgggtaccacatggcaggtgctattctaaatactgaacagctgtgaacccatttaatccccgtaagaaactggtgagcttggtttcatttgactcaagaggcccagagacgaaagcaactggtccagggtcacacagccagcaggaagtggatcagggttggaacctgggcagtctggccctgaagcgctgcagaaagtattattttgggagcaaataggtaataggtggtgagagccacctaaaaatacccctcctctctggcccagtaaccacttctagaaatctgccctaaacaagtaactcaaataaagcgaaagctgagataaaaaaaaaaaaaaaaaaaaaactcgag

SEQ ID NO: 1627 - DNA, 1232 bp, Homo sapiens
  misc_feature (22)..(22): n equals a,t,g, or c
  misc_feature (1227)..(1227): n equals a,t,g, or c
ggaaggttaagaaatggaattnggggagcagctggcattcctcgagctaacgcttcacgcactaatttcagtagtcacacaaaccaatcaggtggtagtgaactcaggcaaagggaggggcaacggtttggagcagcacatgtttgggaaaatggggctagaagtaatgttacagtgaggaatacaaaccaaagattagagccaataagattacgatctacttccaatagtcgaagccgttcaccaattcagagacagagtggcactgtttatcataattcccaaagggaaagtagaccagtacagcaaaccactagaagatctgttaggaggagaggtagaactcgagtctttttagagcaagatagagaacgagaacgcagaggtactgcatataccccattctctaattcaaggcttgtgtcaagaataacagtagaagaaggagaagaatccagcagatcctcaactgctgtacgacgacatccaacaatcacactggaccttcaagtgagaaggatccgtcctggagaaaatagagatcgggatagtattgcaaatagaactcgatccagagtagggctagcagaaaatacagtcactattgaaagcaatagtgggggctttcgccgaaccatttctcgtttagagcggtcaggtattcgaacctatgttagtaccataacagttcctcttcgtaggatttctgagaatgagcttgttgagccatcatcagtggctcttcggtcaattttaaggcagatcatgactgggtttggagaactgagttctctaatggaggccgattctgagtcagaacttcaaagaaatggccagcatttaccagacatgcactcagaactgagtaacttaggtacagataacaacaggagccagcacagggaaggttcctctcaagacaggcaggcccaaggagacagcactgaaatgcatggtgaaaacgagaccacccagcctcatactcgaaacagtgacagtaggggtggcaggcagttgcgaaatccaaacaatttagttgaaactggaacactacccattcttcgccttgctcacttttttttactaaatgaaagtgatgatgatgatcgaatacgtggtttaaccaaagagcagattgacaatctttccaccaggcactatgagcataacagtattgatagtgaactaggtaaaatctgtagtgtttctsgkgccgaattctggaancccgg

SEQ ID NO: 1628 - DNA, 557 bp, Homo sapiens
gaattcggcacgaggaggactggagagacatggcagatgctacctgcacacttttggtaatattctgtgtgatgggatatgaaatggtccatagaaaaaaaccggaaaaatacgccaaggttaggttcattctaagagtctaaaaatttcaaaaaccaaaacaacattataaatggtgtttctcaaggacctttcactacctttttagattgtgcttgtgattttcaggcaagctaaatgtctgatgaagactgctcttcttttgttctgtgtctgacctactaattcctgcccatgcttcaaactcagttcagaaatcactgaaggaaccatccactgccggcctgcctgcaaccacagctgacagctgagttagttaggttttcctgtccctattatttaccagtttgtactgaaatgctttcatgggctgtgcttccagattatgagttctgtggaatcaggaagtatgtctctgtattcttgtattctttggcttttttgtgtagtaaagggactcaagtaatgttaaaaaaaaaaaaaaaaaaaaactcgag

SEQ ID NO: 1629 - DNA, 1320 bp, Homo sapiens
  misc_feature (1)..(1): n equals a,t,g, or c
  misc_feature (3)..(3): n equals a,t,g, or c
  misc_feature (52)..(52): n equals a,t,g, or c
ncnaaattaaccctcactaaagggaacaaaagctggagctccaccgcggtgncgtccgctctagaactagtggatcccccgggctgcaggaattcggcacgaggcaccttcttcaagatggagctttttgaaggcatgcgagagagcaccaagatttcatctctgttggcagaattggaggcaattcaaagaaattcagcatcccaaaagagtgtcattgtctctcagtggaccaacatgctgaaagttgtagcattgcacctgaagaagcatggactgacttatgccaccatcgatggctctgtcaatcccaagcagagaatggacttggtagaggcatttaaccactccagaggccctcaggtaatgctaatctctctcttggccggagtgttggtctaaacctgactggaggaaatcacctctttcttttggacatgcactggaatccatcacttgaagatcaagcttgtgaccgaatttaccgagtagggcagcagaaagatgttgtcatacacagrtttgtttgtgagggaacagtagaagaaaagatcttacagctccaagaaaaaaagraagatttggccaaacaagttctatcagggtctggagaatctgtcaccaagctcaccttggctgacctcagagtcctttttggcatctaacctcctgtggataagggctcagaatagcaccattgctgtgatgttgcacctgtaaccatctttttatgggtggagcagagagtcaatccctgcagccaccctgcagcgcatctctgcagttctctcagtgcaggcagttcttcctctcaggctgaagatcaaggagatgctttgtacatgaacagatgctgagtatctgttatcattgtattgtttagtgtcagtgtatcatttagtatttgtatcactgtaccatttagtgttgtatatcactcagtcatttaatattggttatcaccatacagtttaatatttgtatcatttggttcattgtatcgtttagtatttctattataacatttctatttgtagtatttgtataatatttgtgtcatttttaatagtatttgtatttttacaaatttgcagtatttgtagcatttagtatcattgtttcatttagtatttggtacaatctaataaatactaatccagtccaatactaatccaatccaatactaataatactattggtacaatccaatactaataatactattggtacaatccaatactaataatactaacagtagtattgatacaatctaataaataatgtgtttgacagtgaaaaaaaaaaaaaaaaaaaactcga

SEQ ID NO: 1630 - DNA, 1271 bp, Homo sapiens
ggcacgagatcttgacagtattatctgtacctcctcatgaggcagataacctagatcccagtgacgactcgttgggacaatcattttatgattacacagaaaagcaagcagtgcccatatcggtccccagatacaaacatgtggagcagaatggtgagaagtttgtggtatataatgtttacatggcagggaggcagctgtgttctaagcggtaccgggagtttgctatcctacaccagaacctgaagagagagtttgccaactttacatttcctcgactcccagggaagtggccattttcattatcagaacaacaattagatgcccgacgtcggggattggaagaatatctagaaaaagtgtgttcaatacgagtaattggtgagagtgacatcatgcaggaattcctatcagaatccgatgagaactacaatggtgtgtccgacgtagagctgagagtagcattaccagatggaacaacggttacagtcagggttaaaaagaacagtactacagaccaagtatatcagtacgtaaattggcacctaatgagtttcctcacaaactctacattcagaattatacatcagctgtgccaggcacctgcttgaccattcgaaagtggctttttacaacagaagaagaaattctcttaaatgacaatgaccttgctgttacctacttctttcatcaggcagtcgatgatgtgaagaaaggttacatcaaagcagaagaaaagtcctatcaattacagaagctatacgaacaaagaaaaatggtcatgtacctcaacatgctaaggacttgtgagggctacaatgaaatcatctttccccactgtgcctgtgactccaggaggaaggggcacgttatcacagccatcagcatcacgcactttaaactgcatgcctgcactgaagaaggacagctggagaaccaggtaattgcatttgaatgggatgagatgcagcgatgggacacagatgaagaagggatggccttctgtttcgaatatgcacgaggagagaagaagccccgatgggttaaaatcttcacgccatatttcaattacatgcatgagtgcttcgagagggtgttctgcgagctcaagtggagaaaagagaacattttccagatggcgaggtcacagcagagagatgtggccacctagcctttccttatccccttcccttcccttcacccccatcctcttactcctttcatgtcccatttcagacagagtaaccattaacaaaaaaaaaaaaaaaaaa

SEQ ID NO: 1631 - DNA, 2455 bp, Homo sapiens
  misc_feature (1769)..(1769): n equals a,t,g, or c
  misc_feature (2433)..(2434): n equals a,t,g, or c
gggctcggcgcactccactgaccgtcccgacgatgctacgcgcgcccggctgcctcctccggacctccgtagcgcctgccgcggccctggctgcggcgctgctctcgtcgcttgcgcgctgctctcttctagagccgagggacccggtggcctcgtcgctcagcccctatttcggcaccaagactcgctacgaggatgtcaaccccgtgctattgtcgggccccgaggctccgtggcgggaccctgagctgctggaggggacctgcaccccggtgcagctggtcgccctcattcgccacggcacccgctaccccacggtcaaacagatccgcaagctgaggcagctgcacgggttgctgcaggcccgcgggtccagggatggcggggctagtagtaccggcagccgcgacctgggtgcagcgctggccgactggcctttgtggtacgcggactggatggacgggcagctagtagaraagggacggcaggatatgcgacagctggcgctgcgtctggcctcgctcttcccggcccttttcagccgtgagaactacggccgctgcggctcatcaccagttccaagcaccgctgcatggatagcagcgccgccttcctgcaggggctgtggcagcactaccaccctggcttgccgccgscggacgtcgcagatatggagtttggacctccaacagttaatgataaactaatgagattttttgatcactgtgagaagtttttaactgaagtagaaaaaaatgctacagctctttatcacgtggaagccttcaaaactggaccagaaatgcagaacattttaaaaaaagttgcagctactttgcaagtgccagtaaatgatttaaatgcagatttaattcaagtagcctttttcacctgttcatttgacctggcaattaaaggtgttaaatctccttggtgtgatgtttttgacatagatgatgcaaaggtattagaatatttaaatgatctgaaacaatattggaaaagaggatatgggtatactattaacagtcgatccagctgcaccttgtttcaggatatctttcagcacttggacaaagcagttgaacagaaacaaaggtctcagccaatttcttctccagtcatcctccagtttggtcatgcagagactcttcttccactgctttctctcatgggctacttcaaagacaaggaacccctaacagcgtacaattacaaaaaacaaatgcatcggaagttccgaagtggtctcattgtaccttatgcctcgaacctgatatttgtgctttaccactgtgaaaatgctaagactcctaaagaacaattccgagtgcagatgttattaaatgaaaaggtgttacctttggcttactcacaagaaactgtttcattttatgaagatctgaagaaccactacaaggacatccttcagagttgtcaaaccagtgaagaatgtgaattagcaagggctaacagtacatctgatgaactatgagtaactgaagaacatttttaattctttaggaatctgcaatgagtgattacatgcttgtaataggtaggcaattccttgattacaggaagcttttatattacttgagtatttctgtcttttcacagaaaaacattgggtttctctctgggtttggacatgaaatgtaagaaaagatttttcactggagcagctctcttaaggagaaacaaatctatttagagaaacagctggccctgcaaatgtttacagaaatgaaattctycctacttatatnagaaatctcacactgagatagaattgtgatttcataataacacttgaaaagtgctggagtaacaaaatatctcagttggaccatccttaacttgattgaactgtctaggaactttacagattgttctgcagttctctcttcttttcctcaggtaggacagctctagcattttcttaatcaggaatattgtggtaagctgggagtatcactctggaagaaagtaacatctccagatgagaatttgaaacaagaaacagagtgttgtaaaaggacaccttcactgaagcaagtcggaaagtacaatgaaaataaatatttttggtatttatttatgaaatatttgaacattttttcaataattcctttttacttctaggaagtctcaaaagaccatcttaaattattatatgtttggacaattagcaacaagtcagatagttagaatcgaagtttttcaaatccattgcttagctaactttttcattctgtcacttggcttcgatttttatattttcctattatatgaaatgtatcttttggttgtttgatttttctttctttctttgtaaatagttctgagttctgtcaaatgccgtgaaagtatttgctataataaagaaaattcttgtgactttaaaaaaaaaaaaaaaaaaaaaaaagaatnnctgcggtccgcaagggaattc

SEQ ID NO: 1632 - DNA, 587 bp, Homo sapiens
ggcacgaggaggagcccatcatggcgacgccccctaagcggcgggcggtggaggccacgggggagaaagtgctgcgctacgagaccttcatcagtgacgtgctgcagcgggacttgcgaaaggtgctggaccatcgagacaaggtatatgagcagctggccaaataccttcaactgagaaatgtcattgagcgactccaggaagctaagcactcggagttatatatgcaggtggatttgggctgtaacttcttcgttgacacagtggtcccagatacttcacgcatctatgtggccctgggatatggttttttcctggagttgacactggcagaagctctcaagttcattgatcgtaagagctctctcctcacagagctcagcaacagcctcaccaaggactccatgaatatcaaagcccatatccacatgttgctagaggggcttagagaactacaaggcctgcagaatttcccagagaagcctcaccattgacttcttccccccatcctcagacattaaagagcctgaatgccaaaaaaaaaaaaaaaaaaaaaaaaaaaaaaaaaaaaaaaaaaaaaaaaaaaa

SEQ ID NO: 1633 - DNA, 1069 bp, Homo sapiens
cgcgcggctgctccgctctccccgctccaagcgccgatctgggcacccgccaccagcatggacgctcgccgcgtgccgcagaaagatctcagagtaaagaagaacttaaagaaattcagatatgtgaagttgatttccatggaaacctcgtcatcctctgatgacagttgtgacagctttgcttctgataattttgcaaacacgaaacctaaattcaggtcagatatcagtgaagaactggcaaatgttttttatgaggactctgataatgaatctttctgcggcttttcagaaagtgaggtgcaagatgtawtagaccattgtggatttttacagaaaccaaggccagatgtcactaacgaactggccggtatttttcatgccgactctgacgatgaatcattttgcggtttctcagagagtgagatacaagatggaatgaggctgcagtcagttcgggaaggctgtaggacccgcagccagtgcaggcactctggacctctcagggtggcgatgaagtttccagcgcggagtaccaggggagcaaccaacaaaaaagcagagtcccgccagccctcagagaattctgtgactgattccaactccgattcagaagatgaaagtggaatgaattttttggagaaaagggctttaaatataaagcaaaacaaagcaatgcttgcaaaactcatgtctgaattagaaagcttccctggctcgttccgtggaagacatcccctcccaggctccgactcacaatcaaggagaccgcgaaggcgtacattcccgggtgttgcttccaggagaaaccctgaacggagagctcgtcctcttaccaggtcaaggtcccggatcctcgggtcccttgatgctctacccatggaggaggaggaggaagaggataagtacatgttggtgagaaagaggaagaccgtggatggctacatgaatgaagatgacctgcccagaagccgtcgctccagatcatccgtgacccttccgcatataattcgcccagtggaagaaattacagaggaggagttggagaacgtctgcagcaattctcgag

SEQ ID NO: 1634 - DNA, 2777 bp, Homo sapiens
ggcacgaggtcagcagccggctgctgagaggccggtagcggcggcggtcccgaggggcggcggccgcgctgctccctgagaacgggtcccgcagctgggcaggcgggcggcctgagggcgcggaccatgaagctgtacagcctcagcgtcctctacaaaggcgaggccaaggtggtgctgctcaaagccgcatacgatgtgtcttccttcagctttttccagagatccagcgttcaggaattcatgaccttcacgagtcaactgattgtggagcgctcatcgaaaggcactagagcttctgtcaaagaacaagactatctgtgccacgtctacgtccggaatgatagtcttgcaggtgtggtcattgctgacaatgaatacccatcccgggtggcctttaccttgctggagaaggtactagatgaattctccaagcaagtcgacaggatagactggccagtaggatcccctgctacaatccattacccagccctggatggtcacctcagtagataccagaacccacgagaagctgatcccatgactaaagtgcaggccgaactagatgagaccaaaatcattctgcacaacaccatggagtctctgttagagcgaggtgagaagctagatgacttggtgtccaaatccgaggtgctgggaacacagtctaaagccttctataaaactgcccggaaacaaaactcatgctgtgccatcatgtgatgcagcctgccagaggcccaatgctggaatggcaccatcattcacatcagaactgcagcccctggaaaagaagagacagccatagacgaggagccagagtgggggcagactggccatttttattttgaagttcctgcgagaaatggatggtggaagggtggcgaatgttcaaattcatatgtgtggtagtgattcttggaaagaatttgaggtccccaaaggtgtatttttgggcaaatgaaaccataaactccgactggcttctgtagatgccaaagggctctttttcagctaaccctgggaaggctctgtgggagggaggtcggagccagctgtttctcgatctttggtatatctttggatcttatttgtacattaatgatattaacactccagtggggggtggggagtccctgatgctagggctggggtgggtggagtttgaagactcttgggaaagcctctcctggggccactgttgggggtgggagtgagcccaccacagaggccacaggcaggcccccacttcaggcccaaggcctggggcggggggaacagtcactgggtctcagattctgagactgttgtttagcttacctttctgctaggattggcttcccgcagagggcagggcccatcctaagcagcttccaagtcccacaaaggtggcttgtgggaggatttggaaggagctgcattgtgggcggggagtgtgtgggttgggttcgtaccagcaagtagactaggaactgagcccaggaaagggggatgttttcctggtgtttggatggtcagctgggagtgtccatcatcaggggaagatcaaacacaggtgcactcagctgcccagggcctctgggacacttgccttgacttgcaacttgccttgaacatcacgatcaaagcagcaggtgctgtggtctctcaaaattgatttttatttgactctgtggctctaagactgccttgaaccgcctgaggcctatgcatctgaacaagtgggtctctcccttgagcaccaggagtgggtgccagccggccccgaggattcccagcaccccacctatggtcttgccagcataggcttgctagttccttcttggtcagaggtagctgcagaggggggaggccaagggtttggtctaagctgtgccctgccacctggcaggaggcccactcactgcccaagtcatggcaacaggctggagcagcccaggagatgggcctaaaatgttctggatcccttgggtcctagtgttatgttccagtctgcccacctgtgctcaggatgcagccctgggatccagcacccatggaagcttctgctgggatggtgtcacctatgggttttgaaccagtgtggtatggtccttgggagctctgctctgagcttgccacactgctgagagcacccactgtcctgaccagagtctcagtggtcctgacccccaatgtgggcaggggctgggcaggagggtggggtctgctgtgggttcagaggactccacctcctggctggtttacctgctgctgcccattttctctgggtactgctggccagaggactttagcctacccctgaagagcctgtccatgtcattttcctactgccatagataccctaagcccagggccccttgaggcccagactcagcctgcccactggtgccggagacggagtggagtgggcctggatccgagggatgctacctctccctttcccacttgaggaccctggggagagatgggggcggggaaaatggaggtatgaatttggggtaagaggaagtgagatctccgcttgcaggtcagcccctgccttgcagggcgggctggcttgactcaggccctgtgagatagaggcccagcccagccccacccacagatcccctgctcctgttgtgttctgttgtaaatcatttggcgagactgtattttagtaactgctgcctaacttccctgtgttctatttgagaggcgcctgtctggataaagttgtcttgaaatttaaaaaaaaaaaaaaaaaaaaaaaaaaaaaaaacatccagcgtccg

SEQ ID NO: 1635 - DNA, 603 bp, Homo sapiens
cccacgcgtccggctggactgttttgatctcttttaattgttctgacagatagttggggatgagagccgaataaggtttgcctgaaataactgacactatataatttctgctttggcaaatactaagttctaacttgtcattcctggtagaacaagctttatttttcgagcctagcaatgatctagaagcagatgttatctcagtgccttttgcaatttgttgtgtgggtttttttttttttaaagccacacaataattttggaaaacaatgtatgggtagaacatgtgtctgttaattgcacacaaaaccacttttaatgggtacagagttaaatttgaaggaataagttcataatactgaagctagaaccaagcagaatctgtttttttctgaggagtatcggtagcataaatgtgattataaacatagtacacttgatatatggaggcagtgacagctatttttacaaaatttaaatctgcaaatggattcaacatgtttatgggttattaaaattgtctgatttcttaggttctttatagtacacgtgttgaaaataaatgattaagaattgtttcaagaaaaaaaaaaaaaaaaaaaa

SEQ ID NO: 1636 - DNA, 403 bp, Homo sapiens
ccacgcgtccgaccaattctgatgtagatctcacattatagcataacattacagtagaaggaatgaaaactaagaaagtaaatagtgaacatacagaacttactgcatttccactttaaaacctatttattttccctttttctaattttaaacttttgtggtcattcagaacctaatgtgccttgtgttgacatttccatagacttcacactttacaaaatttactgtttaaaaatacttgtcaaatgatttactgaacctttatacaaaagtaccctttctaaattgaccatttaaaaatgtatttttgtgataccgtcattatgttctgcatttgcctcattttggcagatctacagtatgccattaaagtttagtgttgtttttgaaaaaaaaaaaaaaa

SEQ ID NO: 1637 - DNA, 2968 bp, Homo sapiens
  misc_feature (454)..(454): n equals a,t,g, or c
  misc_feature (1437)..(1437): n equals a,t,g, or c
  misc_feature (2961)..(2961): n equals a,t,g, or c
  misc_feature (2964)..(2964): n equals a,t,g, or c
aattcggcacgagatcctctggctgctctgctcccaccgcccggcccccggcaggccccccacccacaatgcacacaactggaggctcggccaggcgcccgccarctggtacaatgacacctaccccctgtctcccccacaaaggacaccggctgggattcggtatcgaatcgcagttatcgcagacctggacacagagtcaagggcccaagaggaaaacacctggttcagttacctgaaaaagggctacctgaccctgtcagacagtggggacaaggtggccgtggaatgggacaaagaccatggggtcctggagtcccacctggcggagaaggggagaggcatggagctatccgacctgattgttttcaatgggaaactctactccgtggatgaccggacgggggtcgtctaccagatcgaaggcagcaaagccgtgccctgggtgattctntccgacggcgacggcaccgtggagaaaggcttcaaggccgaatggctggcagtgaaggacgagcgtctgtacgtgggcggcctgggcaaggagtggacgaccactacgggtgatgtggtgaacgagaacccggagtgggtgaaggtggtgggctacaagggcagcgtggaccacgagaactgggtgtccaactacaacgccctgcgggctgctgccggcatccagccgccaggctacctcatccatgagtctgcctgctggagtgacacgctgcagcgctggttcttcctgccgcgccgcgccagccaggagcgctacagcgagaaggacgacgagcgcaagggcgccaacctgctgctgagcgcctcccctgacttcggcgacatcgctgtgagccacgtcggggcggtggtccccactcacggcttctcgtccttcaagttcatccccaacaccgacgaccagatcattgtggccctcaaatccgaggaggacagcggcagagtcgcctcctacatcatggccttcacgctggacgggcgcttcctgttgccggagaccaagatcggaagcgtgaaatacgaaggcatcgagttcatttaactcaaaacggaaacactgagcaaggccatcaggactcagcttttataaaaacaagaggagtgcacttttgttttgttttgttctttttggaactgtgcctgggttggaggtctggacagggagcccagtcccgggccccatagtggtgcgggcactggacccccgggccccacggaggccgcggtctgaactgctttccatgctgccatctggtggtgatttcggtcacttcaggcattgactcaaggcctgcctaactggctgggtcgtttcttccatccgacctcgtttcttttctttcctatgttcttttgttcagtgaatatccctagagctcctaccatatgtcaggccctatgcctcaccctgagaacgcagtnagcatgaggtggacctgtttgctgggaaccccaggtcacccccttttcttcctactctgtgcctggagcatcatgtccacccctgcagatccttggaaaagaaaatgtttatgttgcagggtattgcatggtcacgagtgagggcaggcccctggggacacatctgcccacagctgcacaggccagggcgcaggcacatctgttggttctcaggcctcagataaaaccatctccgcatcatatggccagtgaccgctttctcccttcaagaaaattctgtggctgtgcagtactttgaagttttaattattaacctgctttaattaaagcagtttcctttcttataaagtggaatcaccaaatcttatcacacagagcacagtcctgtagttacccagcccgctccagcagtgcgggagattgtaaggaagcggtggcggctggtgaagcaagtctcacatgtcggcgttcttggccaatggatacaaagataaagaaaatgttgcctttttctaggaactgtcagaaatcctcatgcctttcaagacttctgtgaatgacttgaattttttattccctgcctagggtctgtgaacgaggcctgtctcttccctggggtttctttccatggcctttatttctcctcttccagtgggagttttgcaggctcttctctgtggaaacttcacgagcgttggctgggcctcggcttcgctggagtgtactccagggtgaaggcagagtgggatttgagacccaggttaggcacgacccaggctgagaagggacgtttccatcattcacagtgccctccccacagcactacctcaccccgacccccaccctcactcctaccccaccccgcgatcgtcaggggtgccacggtgggccggagggtgccggctctggctgtccctgtgccggtccctcacaaacctctccccctttgaaactcaagcacagctgcgaggagggcagcgaggagggacccctctctcatggttgtctctttcccccgctatgtcataggtagtggaggaagcgaaggaagtgaacgctgaatgtgacgcatttctgaagagctcagctgtcaccgggcatagcctggaagccccaagtctgttctgactttgcctggctgtctccttgacccgcctcctagatcattgtccttgatgtccaggctgggtcatttaaaatagagatgcaatcaggaaggttgggggacttgggactgtggctgaattgagaccttgctgatgtattcatgtcagcacctgagtcacagcccaggtgcccggaagcagcctcttcgcataggcagtgatttgcgattactttaaagctcaccttttttcttcccctctctgttcgctgctgtcagcataatgattgtgttccttccctatgggatccatctgttttgtaaacaataaagcgtctgagggagtgtaaaaaaaaaaaaaaaaaaaaaaaaaaaaaaaaaaaaaaaaaaaaaaaaaaaaaaacaaaaaaaaaaaaaanagnagag

SEQ ID NO: 1638 - DNA, 3021 bp, Homo sapiens
cttgtgaatcagccagtgtgatggctgcgacactggctaatggtggtttctgcccaattactggtgaaagagtactgagccctgaagcagttcgaaatacattgagtttgatgcattcctgtggcatgtatgacttctcagggcagtttgctttccatgttggtcttcctgcaaaatctggagttgctgggggcattcttttagttgtccccaatgttatgggtatgatgtgctggtytcctcctctggataagatgggcaacagtgttaagggaattcacttttgtcacgatcttgtttctctgtgtaatttccataactatgataatttgagacactttgcaaaaaaacttgatcctcgaagagaaggtggtgatcaaaggcattcctttggaccattggactatgaaagtctccaacaagaacttgctttaaaagagacagtatggaaaaaagtgtcacctgagtcaaatgaggacatctctacaactgtagtatatagaatggaaagtctgggagagaaaagctaaagaaatgggttctagtttcagaatgtttcttcatttaatctttcaaacatctttagcttttttttgcaagttataaatatttatttgaggtattttttgttctcaatcttgggtgctggagccataaagcttttttttccttttaatctttgtataaaggcagtagattaagaagtgcatttgttggtctttaaaaagtatttacaagtacataaatttgctttatttttaaaaatacaaaaaggaaaaatttaaattttttttgatgtaattaaaatgttaactatgtggtcagataatcccattttacaatagtaacagaaaattgtaattcttagttctaaaattcacaaattaaactcataagttttgttgcattttgttttttcttttccatttttaaaactaatgtgatgtctttagtggcaatagaaggtacttctatgctaaatacaaaactaaaaaggcaaaataatgaaccccaaattattttatttaaaatagcagtggattataaaattagcttgtgtttacatttatgccatttttggtgatagattggctttacattttaaaaaatttatttaaaaatttatcaaatgctttaaaatatgactcctactttttttattttgcaactcctctgttctgtcagagttgttatatacaggagtgtcttatgttactaaaacattccagccaaagaatttcagatgtgagataatgatgtttcatcaataaaaagctataatggttagttactcagaaggagaaacagtgagtgtcttcaagtgaattgttcacctaaacaattttattttcatattatccacataactttttctatgttatatttaaatatgaatggcaaattttggtttttagcttttacattttattatcttaattttataaatgctaatatttcttttgtgataagttatagcatctcataaagtttgttctatttgaagttttttagagtacttgagaaatgaatttagtctgcaggtagtaagtatgctactaaaatacgttagatctaaatccttttatttggtataaaaatgcaatattgagaatcaaaacttgtttttaagagaactatagattctacacaacctgatttcaagtaattattcatagtatttatagttgtcttggcaaagtgattgtaaaattctgtaggacctattcacacttcttccttcttccatatacttctctggttttccccatagttcccctataatttcaagtttgttgaaacctgttaattttagtgggggattagaagaaaaacttggtggtttcttagcatgatggtgtatgtatgtggtaatggaaagtctgtaaaagtaaatatagtgtagcaaaaaagatttcactgagtattttagatactagtgcaaataaagatagaaaatcttgatcataatgtcttaagtttgggaactgtgatattaagaaaagaaattcccttctagaggtgctggccaaaaagccttttgggctaacttaagtattaaatttatatatttaaataattatattttaagttgtagaggattttcccaaggattttatgcttacttgaatgttctttgaatgttcagatgcatatcctaactggatgcttctcaaggccttactgcatatttgtgttgcatatttatgttagttgcaccagggccatttgtagtttgggcaaccgaatgccttaattggaaaaaaggcattgtggtttcccctatgatctaaattgttacattttaccatttcattccgaagttggttttactttattaaatgaagatttagttttcatatcgtatacatagctgtatagatttcaaaattaggttgttaatttgtgtcacttactatttttgtgttggtaatgctttaaatgcatacttaaaaatgaagtactgttatctaagctactgtgtttagaaaatgttaagaatgagcagaaatttttatagaaaagtataaacggaagaagagataagatactgcgaataggccctcaaacttaaaaaagaaaaaactttgccagttttaaggacatattttgattctttcagtattcttaacacctttttaaacaaagttcttgatagtacccactattattgggtttgttttatgccattattgattcttgatattcaagcatttacaatgtagcatatttgattttcttttttctttctttttttggcatcattaacatttcatttgaaatgcatattgttcttgaagtactttgtttttagcataaatgttgtgcattttatcttagtgtttggatgaaaacatttgtgttgtttagctttcatttgctttgtatatttaataatgtacctttattttccagtatgcctacattttgtattgcacaataaatttattttaagctgaaaaaaaaaaaaaaaaaaaaaaaaaaaaaaaaaaaaaaaaaaaaaaaaaaaaaaagggcggccgc

SEQ ID NO: 1639 - DNA, 3953 bp, Homo sapiens
gcggacgcgtttggcaacagcgagggcaaagagctggtggcctcaggtgaaaataaaataaaacagggtctgttacctagcttggaagatttgctgttctatacaattgctgaaggacaagagaaaatacctgttcataaatttattacagcactcaaatctacaggattgcgaacgtctgatcccaggttgaaagagtgtatggatatgttaagattaactcttcaaacaacatcagatggtgtcatgctagacaaagatctttttaaaaaatgtgttcagagcaacattgttttgttgacacaagcatttagaagaaagtttgtgattcctgactttatgtcttttacctcacacattgatgagttatatgaaagtgctaaaaagcagtctggaggaaaggttgcagattatattcctcaactggccaaattcagtcccgatttgtggggtgtgtctgtttgtacagtagatggacagaggcattctactggagataccaaagttcccttctgtcttcagtcctgtgtaaaacctttgaaatatgccattgctgttaatgatcttggaactgaatatgtgcatcgatatgttggaaaagagccgagtggactaagattcaacaaactatttttgaatgaagatgataaaccacataatcctatggtaaatgctggagcaattgttgtgacttcactaataaagcaaggagtaaataatgctgaaaaatttgactatgtcatgcagtttttgaataagatggctggtaatgaatatgttggattcagtaatgcaacgtttcagtctgaaagagaaagtggagatcgaaattttgcaataggatattacttaaaagaaaagaagtgttttccagaaggcacagacatggttggtatattagacttctacttccagctgtgctccattgaagtgacttgtgaatcagccagtgtgatggctgcgacactggctaatggtggtttctgcccaattactggtgaaagagtactgagccctgaagcagttcgaaatacattgagtttgatgcattcctgtggcatgtatgacttctcagggcagtttgctttccatgttggtcttcctgcaaaatctggagttgctgggggcattcttttagttgtccccaatgttatgggtatgatgtgctggtctcctcctctggataagatgggcaacagtgttaagggaattcacttttgtcacgatcttgtttctctgtgtaatttccataactatgataatttgagacactttgcaaaaaaacttgatcctcgaagagaaggtggtgatcaaaggcattcctttggaccattggactatgaaagtctccaacaagaacttgctttaaaagagacagtatggaaaaaagtgtcacctgagtcaaatgaggacatctctacaactgtagtatatagaatggaaagtctgggagagaaaagctaaagaaatgggttctagtttcagaatgtttcttcatttaatctttcaaacatctttagcttttttttgcaagttataaatatttatttgaggtattttttgttctcaatcttgggtgctggagccataaagcttttttttccttttaatctttgtataaaggcagtagattaagaagtgcatttgttggtctttaaaaagtatttacaagtacataaatttgctttatttttaaaaatacaaaaaaaaaatttaaattttttttgatgtaattaaaatgttaactatgtggtcagataatcccattttacaatagtaacagaaaattgtaattcttagttctaaaattcacaaattaaactcataagttttgttgcattttgttttttcttttccatttttaaaactaatgtgatgtctttagtggcaatagaaggtacttctatgctaaatacaaaactaaaaaggcaaaataatgaaccccaaattattttatttaaaatagcagtggattataaaattagcttgtgtttacatttatgccatttttggtgatagattggctttacattttaaaaaatttatttaaaaatttatcaaatgctttaaaatatgactcctactttttttattttgcaactcctctgttctgtcagagttgttatatacaggagtgtcttatgttactaaaacattccagccaaagaatttcagatgtgagataatgatgtttcatcaataaaaagctataatggttagttactcagaaggagaaacagtgagtgtcttcaagtgaattgttcacctaaacaattttattttcatattatccacataactttttctatgttatatttaaatatgaatggcaaattttggtttttagcttttacattttattatcttaattttataaatgctaatatttcttttgtgataagttatagcatctcataaagtttgttctatttgaagttttttagagtacttgagaaatgaatttagtctgcaggtagtaagtatgctactaaaatacgttagatctaaatccttttatttggtataaaaatgcaatattgagaatcaaaacttgtttttaagagaactatagattctacacaacctgatttcaagtaattattcatagtatttatagttgtcttggcaaagtgattgtaaaattctgtaggacctattcacacttcttccttcttccatatacttctctggttttccccatagttcccctataatttcaagtttgttgaaacctgttaattttagtgggggattagaagaaaaacttggtggtttcttagcatgatggtgtatgtatgtggtaatggaaagtctgtaaaagtaaatatagtgtagcaaaaaagatttcactgagtattttagatactagtgcaaataaagatagaaaatcttgatcataatgtcttaagtttgggaactgtgatattaagaaaagaaattcccttctagaggtgctggccaaaaagccttttgggctaacttaagtattaaatttatatatttaaataattatattttaagttgtagaggattttcccaaggattttatgcttacttgaatgttctttgaatgttcagatgcatatcctaactggatgcttctcaaggccttactgcatatttgtgttgcatatttatgttagttgcaccagggccatttgtagtttgggcaaccgaatgccttaattggaaaaaaggcattgtggtttcccctatgatctaaattgttacattttaccatttcattccgaagttggttttactttattaaatgaagatttagttttcatatcgtatacatagctgtatagatttcaaaattaggttgttaatttgtgtcacttactatttttgtgttggtaatgctttaaatgcatacttaaaaatgaagtactgttatctaagctactgtgtttagaaaatgttaagaatgagcagaaatttttatagaaaagtataaacggaagaagagataagatactgcgaataggccctcaaacttaaaaaagaaaaaactttgccagttttaaggacatattttgattctttcagtattcttaacacctttttaaacaaagttcttgatagtacccactattattgggtttgttttatgccattattgattcttgatattcaagcatttacaatgtagcatatttgattttcttttttctttctttttttggcatcattaacatttcatttgaaatgcatattgttcttgaagtactttgtttttagcataaatgttgtgcattttatcttagtgtttggatgaaaacatttgtgttgtttagctttcatttgctttgtatatttaataatgtacctttattttccagtatgcctacattttgtattgcacaataaatttattttaagctgaaaaaaaaaaaaaaaaaaaaaaaaaaaaaaaaaaaaaaaaaaaaaaaaaaaaaaagggcggccgc

SEQ ID NO: 1640 - DNA, 3953 bp, Homo sapiens; identical to SEQ ID NO: 1639

SEQ ID NO: 1641 - DNA, 658 bp, Homo sapiens
gcagtttatcctttcccaggttgcactcctggagcaggtgaatgccttggtgcccatgctggacagtgctcacatcaaagccgttcctgagcatgctgcccgcctgcagcgcttggcccagatccacattcagcagcaggaccagtgtgtggaaatcactgaggagtccaaggctctcctggaggaatacaacaagactacaatgcttctctccaagcaattcgtgcagtgggatgagctactttgccagctagaggccgccacgcaagtgaagccagcagaggagtgatagctgctccccatcccaaagtgggcctgggcagtcaggctccagggccctatgccaacctgcctttgttacaaggcagaggaagctttgtatttattggcttcaaggcccacctctctgtactctgggctctaaagttggaggtcaggttacctgaggtttgcaatttgcaacacccaccctccccccaatcagtgttcttatttcagtgacaataaaccatagagatgaaaaaaaaaaaaaaaaaaaaaaaaaaaaaaaaaaaaaaaaaaaaaaaaaaaaaaaaaaaaaaaaaaaaaaaaaaaaaaaaaaaaaaaaaaaaaaaaaaaaaaaaaaaaaaaaaaaaaaaaaaaaaaaaaaaaaaaaaaa

SEQ ID NO: 1642 - DNA, 633 bp, Homo sapiens
cccacgcgtccggccacttggaatatatatcgatacattatggtgccgagtggtaacatgggagtgtttgatccaacagaaatacacaatcgagggcagctgaagtcacacatgaaagaagccatgatcaagcttggtttccacttgctctgcttcttcatgtatctttatagtggtagcaactgcccttgctaatcaccgtaacctcggctgagaaagaagaggaagcgaaatccaagatgcagctcagttcatcaaagcctagcaggtcccctcagctgccttttcatgcctgccacagactacagtaggacaaaacctgacctggtctttgaagttaagagctaagaaagcttcctatagtagtatctcccatggcacttaccacattctatctggtattacaattatttgtatgcaattaatcactcttagattgtatgttcctggagggcagaatatgcccattcatatttgtatcttcttccttctgctcttggcacctaacacagtgccttgcacacaaacaataaatgattgttgagtgaataaaaaaaaaaaaaaaaaaaaaaaaaaaaaaaaaaaaaaaaaaaaaaaaaaaaaaaaaaaaaaaaaaaaaaaaaaaaaaaaaaa

SEQ ID NO: 1643 - DNA, 275 bp, Homo sapiens
ccacgcgtccgagcttcactccttgctggccagggagttggggactcagagggaccacttggggccagccagactggcctcaatggcggactcagtcacattgactgacggggaccagggcttgtgtgggtcgagagcgccctcatggtgctggtgctgttgtgtgtaggtcccctggggacacaagcaggcgccaatggtatctgggcggagctcacagagttcttggaataaaagcaacctcagaacacttaaaaaaaaaaaaaaaaaaaaaa

SEQ ID NO: 1644 - DNA, 1439 bp, Homo sapiens
ccacgcgtccgggctctctcatttccagcagacacccttcctcttacccagtggagaggactcagggaatcttggcagaaccctgctggcaccatcagcggcgtatgctcctcctcgtttctgtcttttcacccgttctcttctctcggtcttccactgtggagatggatgtggaacctttttgcttagtcctgtcttctgcctttcctgagattaccccaccgatctcctgtttgtgtctcaatatgttcttttctctgctcagatctccccattcttaaaagaactgtcccctcctcctcgcctccttcttcaattctgcccctcctgtgtctgagaccgttcacaggaacgctctgccaaggatgcctgactggcccccagcaagccactcctggggcccttgtgtgctggctcccttccagccctgccttcctgcttctgctctcagactccgtggtctctcttgggcttcagggcctgggacctcctggcagcagtgggctaccccaccccccaaccccacacacacgggaaaccaccctggtgaccagatatatatatatatatatatatacacatatatatatgcatgtgtatgtatttacacacacctgggaaatatatatatctggtgtatatatatttacacacacctgggaaactgccctgatgaccagagcacactgtctttctcctctgccctctgagcacctcaagctgctgtgcctggcgctcttcttctgttctcccctcacagaattcacgttcctccacagtctcagagaacatctttgaggaaatggtctccccatatgggactctcacttctgtcagtcctgaacatcagtgggtgaggacagggctgggcttggccctcagaagaggagaggagcacctgcctccggggagggtccctatcccaagaggtctgtccctaaggctgggatggggcttcttggtctccacaggttcactctccaccagccagctcttcttcctgactccctgtgtctgtgctgggcacctcctcctgctgcccaccaggcttggagtttgggaatcatctccaatacttttctctccctgtcctgcagctacctgtttgtttggtcttaacgggtcccccttccctttcctccctaccccagtgcccacagagaatatctaacagcaaaacgtacttttcctccactggactccaccctggcttggagcagatatggaattcccagttctgcccacagcctcctcccttagctcccgtccccagctgctcacccccaaacacccccatcctcctgccacagttttaaaaagtgttgcttggattgggccatcgcctgcttagaaacttaaatgtcttttgtggcttctcaaataaacatttaggcccttagtttggaaaaaaaaaaaaaaaaaaaaaaaaaaaaaaaaaa

SEQ ID NO: 1645 - DNA, 1020 bp, Homo sapiens
gggggacacgggaaaggcccgtgggaataggcctttgaggggaagcacgctgatctcttgttctgcagcgcatgcttgggatggtatgcgcatgccttctctcactaagactaggactgcttacagaatgcgaatataagtatccttatttgggagaaaagtacattttcaagggctggtaaaatgacgtggaggaagggaggatccagggagccttctgaagagtattgtcaggatgtctcttctctttcagccacctggatatgtttcacattttgtttcccaaacaaggactagattggatcccagaagggaatggtttccttagtatacattccgaattcctttgtaagggaaaaatccacttcatctggtctaagaatacataagaacaaatgaaaatgttgtggctggagatgttcctgagttaatatcaggatgtttgcctgctggtttctgttttaccaaacaaaacatagctgccaattcatccatctgtaaaagtgctccttgtggaccccctcaagagaagtactggttattttatttgcagaaaacgttttatkgggagttgttactttctgtgactgaagtggggaacatgagggtccctttaccgagccctcatattccatgtgtactctgtattttattgaggctgtttcccagtcagaacagcgtctctctttgtttgtcattccaaatctttcagtgtctttagggctctgagggccctggagagcctcacccaacctctcatccttccatggctgtccccacctctgtgcacttatgagtcaatgttgccgcacttcattacatgctgttcatattacagcattataagattttttcttttaaaagcctatcttcttcaatcgggtagtaagaccattgtgggttgaggcatgtttcatacttcccacataatcactccagacttaaaacagaaccggaaatacatgaaataaaaaattatttttctgttctcaaataaaaaaaaaaaaaaagggcggccgc

SEQ ID NO: 1646 - DNA, 1076 bp, Homo sapiens
gagacaataggggaagagatttttatgttttgttcactgctgttttcacagtatgttcaatggctcttggcacagaatagacaatattcgttgactgaatgctattggacattatctgtttattgaattagtgataaatattttaccctacgttgatataaatggacatattctacaggtaacaaccctttatttctaaagcatgatctcaatgtattataaattactgaagtagattagttcttttctttttttttttgagacggagtctcgctgtgtcacccaggttggagtgcagtggcgtgatctcgtttcactgcaacctccgcctcccaggttcaagtgattctcccgcctcagcctcccgagtagctgggattacaggcatacaccacccgcccagcgaatgtttgtagagacggggtctcgctgtgttgccaggctggtcatcaactcctgacctcaggtgatccacccacctcggcctcccaaagtgctgggattacaggcgtgaaccacctcgcccggccgattagttcttaaagtagtaatagacatctcccctccacctttgggaactgcctcctctagggagaagagtaccccgtgagttaggaagccaggtgatatggtttgaatatttgttctctccaaatctcacgtggcaatgtgacctcctgtgttggaggtagggcctggtgagaggtgtttggatcatggggcagatgcctcctgaatggcttggtgtcatcctgtaacaagtgtattcttgccctatttgttcccatgagaacctactgtttaaaagagtctggtacttcctcttctcgctctctctctctctcgcttctgtctcaccatgtgacatgctggctttccttcaccttctgccatgagtagaaggttcctggggccctcaccagaaaaaaatgctggtgccatgcttcttgtacagcctgtgggaccatgagccaaataaacctcttttctttataaattaccctagcctcaggtatttctttgtatcaacaacaacaacaagggcacacaccaaaaaaaaaaaaaaaaaactcgag

SEQ ID NO: 1647 - DNA, 1109 bp, Homo sapiens
ggcacgagctggagtccgacctgccaagtgccgtgacacttctgaaaaatctccaggagcaagtgatggctgtaactgcacaagtgaaatcactgacacaaaaagttcaagctggtgcctatcctacagaaaagggtctcagcttcttggaagtgaaagaccagctgctgctcatgtaccttatggatttgacccacctcattctggacaaagcctcaggaggatctcttcagggacatgatgcagttttgagactggtagagattcgaacggttttggaaaagcttcgtcccttggaccaaaagctgaagtatcaaattgacaagctgatcaagactgcagtgacaggcagccttagtgagaatgacccacttcgttttaagcctcatcccagcaatatgatgagcaagttgagctctgaggatgaggaggaagatgaagcagaagatgaccagtctgaggcttcagggaagaaatctgtgaagggagtgtctaagaaatatgttcctccacgcttggttccagtacattatgatgaaacagaagctgagcgggagaagaagcgtctagaacgagccaagagacgggcattgagcagctctgtcattcgtgaacttaaggagcagtactcagatgctccagaggaaatccgtgatgctcggcatccccatgttacccgccagagtcaggaggaccaacacaggattaactatgaggagagcatgatggtgcgtttgagcgtcagtaagcgagagaaaggacggcgaaaacgagcaaatgtcatgagctcacaacttcattcccttacacacttcagtgacatcagtgctttgacagggggaactgttcatcttgatgaggatcagaatcctattaagaagcggaagaagatacctcagaaaggtcggaagaaaaaaggttttcggaggcggcggtgattatgggtgtacatatttgtatattttttgtcatcctgagatacttctaatttcattgtatataggtggttttccctggaattcattaattgtttgctttggacatgtggaaagagccttactaataaaattgattttacttatgaaaaaaaaaaaaaaaaaaaaaaaaaa

SEQ ID NO: 1648 - DNA, 1963 bp, Homo sapiens
  misc_feature (3)..(3): n equals a,t,g, or c
atncaagctctaatacgactcactataggggggggagcgcaagcgaggcagccatgtcttatcccgctgatgattatgagtctgaggcggcttatgacccctacgcttatcccagcgactatgatatgcacacaggagatccaaagcaggaccttgcttatgaacgtcagtatgaacagcaaacctatcaggtgatccctgaggtgatcaaaaacttcatccagtatttccacaaaactgtctcagatttgattgaccagaaagtgtatgagctacaggccagtcgtgtctccagtgatgtcattgaccagaaggtgtatgagatccaggacatctatgagaacagctggaccaagctgactgaaagattcttcaagaatacaccttggcccgaggctgaagccattgctccacaggttggcaatgatgctgtcttcctgattttatacaaagaattatactacaggcacatatatgccaaagtcagtgggggaccttccttggagcagaggtttgaatcctattacaactactgcaatctcttcaactacattcttaatgccgatggtcctgctccccttgaactacccaaccagtggctctgggatattatcgatgagttcatctaccagtttcagtcattcagtcagtaccgctgtaagactgccaagaagtcagaggaggagattgactttcttcgttccaatcccaaaatctggaatgttcatagtgtcctcaatgtccttcattccctggtagacaaatccaacatcaaccgacagttggaggtatacacaagcggaggtgaccctgagagtgtggctggggagtatgggcggcactccctctacaaaatgcttggttacttcagcctggtcgggcttctccgcctgcactccctgttaggagattactaccaggccatcaaggtgctggagaacatcgaactgaacaagaagagtatgtattcccgtgtgccagagtgccaggtcaccacatactattatgttgggtttgcatatttgatgatgcgtcgttaccaggatgccatccgggtcttcgccaacatcctcctctacatccagaggaccaagagcatgttccagaggaccacgtacaagtatgagatgattaacaagcagaatgagcagatgcatgcgctgctggccattgccctcacgatgtaccccatgcgtatygatgagagcattcacctccagctgcgggagaaatatggggacaagatgttgcgcatgcagaaaggtgacccacaagtctatgaagaacttttcagttactcctgccccaagttcctgtcgcctgtagtgcccaactatgataatgtgcaccccaactaccacaaagagcccttcctgcagcagctgaaggtgttttctgatgaagtacagcagcaggcccagctttcaaccatccgcagcttcctgaagctctacaccaccatgcctgtggccaagctggctggcttcctggacctcacagagcaggagttccggatccagcttcttgtcttcaaacacaagatgaagaacctcgtgtggaccagcggtatctcagccctggatggtgaatttcagtcagcctcagaggttgacttctacattgataaggacatgatccacatcgcggacaccaaggtcgccaggcgttatggggatttcttcatccgtcagatccacaaatttgaggagcttaatcgaaccctgaagaagatgggacagagaccttgatgatattcacacacattcaggaacctgttttgatgtattataggcaggaagtgtttttgctaccgtgaaacctttacctagatcagccatcagcctgtcaactcagttaacaagttaaggaccgaagtgtttcaagtggatctcagtaaaggatctttggagccagaaaaaaaaaaaaaaaaaaaaaaaaaaaaaaaaaaaaaaaaaaaaaaaaa

SEQ ID NO: 1649 - DNA, 808 bp, Homo sapiens
  misc_feature (794)..(794): n equals a,t,g, or c
gaattcggcacgagaaaagacctcatttataataaggtcactccaacatttcaccactggaagattgatgacaagaagtttggtcttacgtttcaaagtcctgctgatgctagggcttttgatagaggtatccgaagagctatagaggatatttctcaaggatgccccgaatcaaaaaatgaagctgaaggggcagatgacttacaagcaaatgaagaggattcttccagttctctagtgaaggatcacctttttcagcaagagacagttgttaccagtgagccttatagaagctcaaatataagaccttctccctttgaagatctgaatgccagaagagtctacatgcaaagccaagccaatcagataacatttggtcagccaggcttggacattcagagcagaagtatggaatacgtacagcggcaaatatccaaggaatgtggaagcctaaagtcccaaaatagggtccctttgaaatcaatcagacatgtcagctttcaagatgaggatgagattgtcagaataaaccctcgagatatcttaatacgtcgctatgcagactacagacatcctgacatgtggaaaaatgacttggaaagagatgatgctgattccagtattcagttttctaaaccagacagtaaaaaatcagactatctgtactcttgtggggatgagactaagttaagttcacccaaagactctgtggtatttaagacgcagccttcctcattaaaaattaagagtcaaaacgaggaaaagaggatggtgaacgttctcgttgcgtatanggccaggaaagttt

SEQ ID NO: 1650 - DNA, 1036 bp, Homo sapiens
ggcacgaggcggcttctacgctccggcactctgagttcatcagcaaacgccctggcgtctgtcctcaccatgcctagcctttgggaccgcttctcgtcgtcgtccaccttccagctgaccctcgtgctgcgcctggactcacgactctggcccaagatccaggggctgtttagctccgccaactctcccttcctccctggcttcagccagtccctgacgctgagcactggcttccgagtcatcaagaagaagctgtacagctcggaacagctgctcattgaggagtgttgaacttcaacctgagggggccgacagtgccctccaagacagagacgactgaacttttggggtggagactagaggcaggagctgagggactgattcctgtggttggaaaactgaggcagccacctaaggtggaggtgggggaatagtgtttcccaggaagctcattgagttgtgtgcgggtggctgtgcattggggacacatacccctcagtactgtagcatgaaacaaaggcttaggggccaacaaggcttccagctggatgtatgtgtagcatgtaccttattatttttgttactgacagttaacagtggtgtgacatccagagagcagctgggctgctcccgccccagcccggcccagggtgaaggaagaggcacgtgctcctcagagcagccggagggaggggggaggtcggaggtcgtggaggtggtttgtgtatcacttgggatctttgacacttgaaaaattacacctggcagctgcgtttaagccttcccccatcgtgtactgcagagttgagctggcaggggaggggctgagagggtgggggctggaacccctccccgggaggagtgccatctgggtcttccatctagaactgtttacatgaagataagatactcactgttcatgaatacacttgatgttcaagtattaagacctatgcaatattttttacttttctaataaacatgtttgttaaaacaaaaaaaaaaaaaaaaaaaaaaaaaaaaaaaaaaaaaaaaa

SEQ ID NO: 1651 - DNA, 938 bp, Homo sapiens
  misc_feature (3)..(3): n equals a,t,g, or c
  misc_feature (28)..(28): n equals a,t,g, or c
  misc_feature (41)..(41): n equals a,t,g, or c
  misc_feature (43)..(43): n equals a,t,g, or c
  misc_feature (48)..(48): n equals a,t,g, or c
ttnaaggggagggggactaatgtaatgncactgccctatantnaggtncgcctgcaggtaccggtccggaattcccgggtcgacccacgcgtccgagaaactgcgcaactgcagttcgcctggcctgcctagcaggcgagctccgttgcacgctgagcgatgactgcattccactcacgtggcgctgcgacggccacccagactgtcccgactccagcgacgagctcggctgtggaaccaatgagatcctcccggaaggggatgccacaaccatggggccccctgtgaccctggagagtgtcacctctctcaggaatgccacaaccatggggccccctgtgaccctggagagtgtcccctctgtcgggaatgccacatcctcctctgccggagaccagtctggaagcccaactgcctatggggttattgcagctgctgcggtgctcagtgcaagcctggtcaccgccaccctcctccttttgtcctggctccgagcccaggagcgcctccgcccactggggttactggtggccatgaaggagtccctgctgctgtcagaacagaagacctcgctgccctgaggacaagcacttgccaccaccgtcactcagccctgggcgtagccggacaggaggagagcagtgatgcggatgggtacccgggcacaccagccctcagagacctgagctcttctggccacgtggaacctcgaacccgagctcctgcagaagtggccctggagattgagggtccctggacactccctatggagatccggggagctaggatggggaacctgccacagccagaactgaggggctggccccaggcagctcccagggggtagaacggccctgtgcttaagacactcctgctgccccgtctgagggtggcgattaaagttgcttcacatcctcaaaaaaaaaaaaaaaaaaaaa

SEQ ID NO: 1652 - DNA, 902 bp, Homo sapiens
ggcacgagctgacacactagtggcctcgagtcactgatagtggtgcctcctccttaccttggcaagcccttgtagccctctgagccctcatcctgcaggcagagcccctcagtgctctgagaaacctgccctgaactcaccgcctcccctgcctgggcactccctcctccctgcgcccacagcccccatgccaatctccgtcagctctttctgtgctgctgtaattgttggtttgcctgtctcctttgagctgtgggcattgccggggtagggtggtgtcttcaccacagctccagaaggcactggtgggatgtggagtcaggagcaaccagagaccccccaatactagaatgggtttgagcttggggtggggtggatggggaagacttactctgaatgttcgttcaccatccgtgggcaccaggtctgtgccaagcacagggactccaggggcagctgccattcgttccagtgatgtatttggggccttctcaggtgaggaagccaaggtggccaaggccctcggtcccctgccctgatagggcttacctgtgggtgggggagggagaccacacatgtcagaggtagtgaaggccgctccaaatagtgactggggccaggcaggcggaaaagagaacagaagagaatccagaagtgttcagacagaactagggacaacagaggggcctccatggtggcatgggtcagcagagcatggagcaggcagaggaagcctatctgtggggctgggtacatttctctgagactcacggaatgtaagtgttgaggtttctgcaaagagggcgcaggcctgcagtgacggttcagatattgataacccatcccccttggcaggtgggggcttaggcatccatattggattcaaaaaaaaaaaaaaaaaa

SEQ ID NO: 1653 - DNA, 1044 bp, Homo sapiens
cgggattcgcacgagagraaagcacattgtcatctttaatcctttccatttatttgcctcttgatagatgacctttatatttttgctttttgacaatttctacctgaggcatgatgtaactaaaatttctaacatgatagtggtagttctctggattaatttatgctcatggttttgctttgtttctcccttaccaaaatgctcttttcagtattacacaagaaaaagatcatgatttgcatcatgatgtacatagcaaatttcatgtatgatcgtgtttcctgttccatcacatttctggcattttttttaacccactgggacattaggatgtcataacataattggatgttagacataggttgagaaatcaagggtagtggtagatggaggctgacagacaccttccagatccactttagaggtactgagtattcctaaaccagttatgtaatttgcatgtggtcatatagctagttggtggccaaatcagggatacaacatgtatgtgagtatcattctatcatctatctatctacttattgacagataagaatatacttgctttgtgtaaatgattaccctttgattttgtggttgtcacaaacacatgaaactattcatggatggacctacctgtctgatgatggtggtagtgatgatgatgatgatgttatcctaggatataaccactattctttaacccttgaaactgaggtgcataaggtacaataattcgcccaagctcacatagataacaagtttgcagggctagaaatcttactgagtttcatctgaaatgcagactttcagagagagagagagaggatgcttagtgtgccatatcttacgtctaacaatggctaatgaatctttaaagagaggactactccctagacatgagcgtgttaggactctgttcccatttctacacatttatgcttatatgagggccattgattggccaattttagcatttctttgtactcgtgggatgatatttaaaaatacaaaaaaaaaaaaaaaaaaaaaaaaaaaactcga

SEQ ID NO: 1654 - DNA, 1417 bp, Homo sapiens
  misc_feature (551)..(551): n equals a,t,g, or c
ggcagagctcggcatcactcgcccagtgccaaccaacacttgtgtcatcttgggcttggctggaggtgttatcatttatatcatgaagcactcgttgagcgtgggggaggtgatcgaagtcctggaagtccttctgatcttcgtttatctcaacatgatcctgctgtacctgctgccccgctgcttcacccctggtgaggcactgctggtattgggtggcattagctttgtcctcaaccagctcatcaagcgctctctgacactggtggaaagtcagggggacccagtggacttcttcctgctggtggtggtagtagggatggtactcatgggcattttcttcagcactctgtttgtcttcatggactcaggcacctgggcctcctccatcttcttccacctcatgacctgtgtgctgagccttggtgtggtcctaccctggctgcaccggstcatccgcagaatcccctgctctggcttcttcagtttctcttccagacagacacccgcatctacctcctagcctattggtctctgctggccaccttggnctgcctggtggtgctgtaccagaatgccaagcggtcatcttccgagtccaagaagcaccaggcccccaccatcgcccgaaagtatttccacctcattgtggtagccacctacatcccaggtatcatctttgaccggccactgctctatgtagccgccactgtatgcctggcggtcttcatcttcctggagtatgtgcgctacttccgcatcaagcctttgggtcacactytacggagcttcctgtccctttttctggatgaacgagacagtggaccactcattctgacacacatctacctgctcctgggcatgtctcttcccatctggctgatccccagaccctgcacacagaagggtagcctgggaggagccagggccctcgtcccctatgccggtgtcctggctgtgggtgtgggtgatactgtggcctccatcttcggtagcaccatgggggagatccgctggcctggaaccmaaaagacttttgaggggaccatgacatctatatttgcgcagatcatttctgtagctctgatcttaatctttgacagtggagtggacctaaactacagttatgcttggattttggggtccatcagcactgtgtccctcctggaagcatacactacacagatagacaatctccttctgcctctctacctcctgatattgctgatggcctagctgttacagtgcagcagcagtgacggaggaaacagacatggggagggtgaacagtccccacagcagacagctacttgggcatgaagagccaaggtgtgaaaagcagatttgatttttcagttgattcagatttaaaataaaaagcaaagctctcctaaaaaaaaaaaaaaaaaaaactcga

SEQ ID NO: 1655 - DNA, 1377 bp, Homo sapiens
ttggcagtcccctgacaccctaagaccggcatctgtcgatgttatttccccagcatggccgaaacagaagccctgtcgaagcttcgggaagacttcaggatgcagaataaatccgtctttattttgggcgccacggagaaaccggcagagtgctcttaaaggaaatcctggagcagggcctgttttccaaagtcacgctcattggccggagaagctcaccttcgacgaggaagcttataaaaatgtgaatcaagaagtggtggactttgaaaagttggatgactacgcctctgcctttcaaggtcatgatgttggattctgttgcctgggtaccaccagagggaaagctggggcggagggatttgttcgtgttgaccgagattatgtgctgaagtctgcagagctggcaaaagctggagggtgcaaacatttcaacttgctatcctctaaaggagctgataaatcaagcaattttttatatctacaagttaagggagaagtagaagccaaggttgaagaattaaaatttgatcgttactctgtatttaggcctggagttctgttatgtgataggcaagaatctcgcccaggtgaatggctggttagaaagttctttggctccttaccagactcttgggccagtgggcattctgtgcctgtggtgaccgtggttagagcaatgctgaacaatgtggtgagaccaagagacaagcagatggaactgctggagaacaaggccatccatgacctggggaaagcgcatggctctctcaagccatgaccacattggagaaatggtttttattgtcaaccttaacacccatcaccaaatcggtaatttcagggtctaaaaaaagtcagcatgttttaactttgttgttttactatcctcaggcatccattccaatcaagaaatgatggtgctctgcatcagtggttcagagcctggttatacatatagatcactcagggagctttggaaaaataaagatttgtcagccctatctcaaacttgaatcaaaatttctggggtgtgggcacaataatctgtaattttctttgtttatacttcccctgatgccactggttccgatgccactggctggggggcctgctttgaaatgcttgtctgcagagtcacagcagccatgaaaaccttatgaccgtgcaaatgagctctgctctaaaattgttgacattcatgtctctgagttacaaaagtgctaattcactacatgtaattgtgtaagtaaacattgtgcctttactacttctttatgtaatagaagttatatacctaagcttatataatacatggggaggattaaataaaggaataaagatgaatggacaaaaaaaaaaaaaaaaaaaaaaaaa

SEQ ID NO: 1656 - DNA, 905 bp, Homo sapiens
ccacgcgtccggggatcagcgctaccaaggcgcacgagttctgccccctacgattggttcggggacttctcctccttccgtgccctcctagagccggagctgcggcccgaggaccgtatccttgtgctaggttgcgggaacagtgccctgagctacgagctgttcctcggaggcttccctaatgtgaccagtgtggactactcatcagtcgtggtggctgccatgcaggctcgctatgcccatgtgccgcagctgcgctggggagaccatggatgtgcggaagctggacttccccagtgcttcttttgatgtggtgctcgagaagggcacgctggatgccctgctggctggggaacgagatccctggaccgtgtcccctgaaggtgtccacactgtggaccaagtgttgagtgaggtgagccgcgtgcttgtccctggaggccggtttatctcaatgacttctgctgccccccactttcggaccagacactatgcccaagcctattatggctggtccctgaggcatgctacctatggcagcggtttccacttccatctctacctcatgcacaagggcgggaagctcagtgtggcccagctggctctgggggcccaaatcctctcaccccccagaactcccacctcaccttgcttccttcaggactcagatcatgaggacttccttagtgccattcagctctgaggccagagcatggtcctccacccttcctgccattctgccctgggctcctcaggtagttggaattcctgacttaggacttggggttgggtccaaggtgcttacatcccaggggcctcatgcctaagatagagggtgggagcgaacccacatgaaccaatacagcccagctccaactagaaaaaaaaaaaaaaaaaaaaaaaaa

SEQ ID NO: 1657 - DNA, 1888 bp, Homo sapiens
  misc_feature (37)..(37): n equals a,t,g, or c
  misc_feature (1475)..(1475): n equals a,t,g, or c
  misc_feature (1477)..(1477): n equals a,t,g, or c
  misc_feature (1879)..(1879): n equals a,t,g, or c
gggggggaaatttgagggcccccggcccgtttagganaaattttgggggagttttggaatttttttttttttttttaaaaaaaagctggagttggtggcttaggccatcacccttcccttggctggaactactggacagacccttttgagatgtgcctgtggtgctgtggagatgtgtgtagtggtcttagctctttgttgagcttgtgtgtgtgttgtgtagtcttagctgtatgctgaaattgggcgtgtgttggagggcttcttagctctttggtgagattgtatttctatgtgtttgtatcagctgaatgttgctggaaataaaaccttggtttgtcaaggctcytttttgtgggaagtaagtaggggaaaaggtctttgagggttcctaggctcctttgtacaacaggaaaatgcctcaaagccttgcttcccagcaacctggggctggttcccagtgcctggtcctgccccttcctggttcttatctcaaggcagagcttctgaatttcaggccttcattccagagccctcttgtggccaggccttcctttgctggaggaaggtacacagggtgaagctgatgctgtacttgggggatctccttggcctgttccaccaagtgagagaaggtacttactcttgtacctcctgttcagccaggtgcattaacagacctccctacagctgtaggaactactgtcccagagctgaggcaaggggatttctcaggtcatttggagaacaagtgctttagtagtagtttaaagtagtaactgctactgtatttagtggggtggaattcagaagaaatttgaagaccagatcatgggtggtctgcatgtgaatgaacaggaatgagccggacagcctggctgtcattgctttcttcctccccatttggacccttctctgcccttacatttttgtttctccatctaccaccatccaccagtctatttattaacttagcaagaggacaagtaaagggccctcttggcttgattttgcttctttctttctgtggaggatatactaagtgcgactttgccctatcctatttggaaatccctaacagaattgagttttctattaaggatccaaaaagaaaaacaaaatgctaatgaagccatcagtcaagggtcacatgccaataaacaataaattttccagaagaaatgaaatccaactagacaaataaagtagagcttatgaaatggttcagtaargatgagtttgttgttttttgttttgttttgttttgtttttttaaagacggagtctcgctctgtcacycaggctggagtgcagtggtatgatcttggctcactgtaacctccgcctcccgggttcaagccattctcctgcctcagtctcctgagtagctgggattgcgggtgcgtgccaccatgcctggctaatttttgtgtttttagtagagacagggtttcaccatgkggtcgggctggtcnanaactccygaccycytgatccgcctgccytggcctcccaaagtgatgggattacagatgtgagccacccgtgcctagccaaggatgagatttttaaagtatgtttcagttctgtgtcatggttggaagacagagtaggaaggatatggaaaaggtcatggggaagcagaggtgattcatggctctgtgaatttgaggtgaatggttccttattgtctaggccacttgtgaagaatatgagtcagttattgccagccttggaatttacttctctagcttacaatggaccttttgaactggaaaacaccttgtctgcattcactttaaaatgtcaaaactaatttttataataaatgtttattttcacattgaaaaaaaaaaaaaatttaaaaactcgggggggncccggtacc

SEQ ID NO: 1658 - DNA, 1899 bp, Homo sapiens
ccacgcgtccggaagccggccactgcctctgctctgctcctgctcctgctgggcctggcctggacccaggggagccacggctggggtgcggacgcgtcatcactgcagaaacgtgcaggcagagccgatcagaactacaattacaaccagcatgcgtatcccactgcctatggtgggaagtactcagtcaagacccctgcaaaggggggagtctcaccttcttcctcggtgagtatgggggcctgatcttcatctggctggagagagaaggggcctgaggccagagggtatggaagggaccctgtggtggccactcagactttctctttttctggcaggcttcccgggtgcaacctggcctgctgcagtgggtgaagttttggtaggtgagtgtcagagtgagccgacccaggccacatcctggcagtggaggcacagtcacccggggcagggccaggatcttggtatatcctcagatctcagtgggcagcgacatgaagtcaggtatgctctgggtgcgtgctctaaaggtgataaggaagaggggacctcatggtggggtgtggagaaagacccataataaagtgatctagggctgggtgcagtggctcatgcctgtaatctctgtgctttgggaggctggggtgggaggatcacttgagtctgggagtttgagaccagactgggcaatatagcaagaccccatctctaaaagaacaaaacaaaacaaaccaaaacaaaacaaaccattccagcctgggaaacatggcaaaaccccgtctactaaaaatacaaaaaattagccaggtgaggtggtgcatgattgtaatcccagctactctggaggctgaggtgggagaatcacctgagcttgggaggttgaggctgctgcgaactgcgattgcaccgctgcactccagcctgggcaatcacagtgagaccttgtctcaaaacaaacaaacaaacaaatgaaaaaccttagccaggcatggtgacacatgcctgtagttctagctacttggaaggcagaggcaggaagatcgcttgagcccaggagttcaaaactgcagtgagctatgatcacaccattggacttcaagtctgggcaacagagggagaccctgtctggaaagaaagagagaaagagagagagagagaaagagggaaagaaagcaagcaagagagaaagaagaaagaaaatgacctaggaccctcggaaagcaccttagggtgggaccacataggcacagctctgagaagatggtgttctagatggagcacagggaccgggatagagatgttacaggggaactgtggagaaaagagcctcctggtggaagggttcagaggtgggacgcagcgaggctgcatgggcgagaggtgatagcttggctcggcagaaccacaaactctgttttaggcggagcaaaagtgaggggcaccacaggcgaacaggtaggacagcaaaagaatggtgggtgcccagacgctgggtgaaaagatgccccgtttccgcaggcttaggagtggccacgtgctaccatttgattttctttcttctaggcaatttcttgcaaccaccaccgaggccccgaaaagcactggtcgtcagggagctcctccccttggcccccagcctgtgccagccctggcccggctgccacacctctgtttcctaggctggggacccagcttgtctctccttgtttcttcccactgcactgtggtgcttcagtggccaccagcctcgtcacatacaccagcatctttctgtacctcctccctttggtgacctgaagtcactgtgacagttctccaggaaggaggagcttcctacttttgagtttctctgtggaaataaaacatgaatcttgtttccctaaaaaaaaaaaaaaaaaa

SEQ ID NO: 1659 - DNA, 1987 bp, Homo sapiens
  misc_feature (435)..(435): n equals a,t,g, or c
aaatatttccaatataatttgaatggctaattttcagttgctaattaattagcagctttgtaatacttgatttgggagcatttacttggaaatcctaaggactataataaaagttttcaacatatttctaaattgtgtgagtttccagctgtagcttttgtctttgtcacattttaaaaaataataagcaagacacattggggacactggcagcagttgccaggttttagctgccaccgcttcagtatgagatatagctgtcccatcttcccccattcagggtaggagatatagtgacccagacttcatgcaaatggaaaaaaagttttaactgaaatatttatttagatttcagggtctagatggatgggaaagtagaaaaacatatgcaaatctcagtgttctcactatgaccactctgagcagagatttggnttttgtttccttttgtaacaaagtgaaaacaggtgagacaatgtgcccaaaacaaagggaagaagagaaccttctgtgactcctaaaatgttccatgctgcatttttgtttcattttttatttttccttgctttgtttttaaacatgaatataatgcttacttcaaattgtttagtaaaacaaaataactaaagaaatgtgagcttcccaaggtttctaaactatcgctgttgtatattctatagcgttccttattctttgagggaaactgtgcttgctgtgatccattttgtctctagcttctagttgtgattcttgtccataagcaccaaatttgatgcccatgatttcaaaaggtcattcttttatctgaatgaaaatggtggtactaagactgtgaaaattatgtgaaacctaaagtagttgccaaagtggctcagggttgtaaaattcattgacttaattattcatgtgccagatcaacccctttattttctctttagctgtgcatatttaaaatattggaaagtatcagatttacagattttctttgactaatttttttcacataactttaggattttcgaaagttgtaaccataactggatatcttagctgagcaaaggcggttataatttgtctttttaagatcactggaaattgataaaattttgtgataattatgattattctgtgccatttacagtttctaatactatactgtatgaaatatgtataaatatatgatgctgagtctgtggaatgatacttctgaaatcaaaattcctcataaggcatgaagttgtaaaaacttgaatgtgtatagttagatatttaaatggttgcttcttcatagaattgtctgctttttaaaactggaagtacaggattttcttcaggtaaaatctgtgtgttccaattacagttgtagctgaaggaagtatgctttggtgagtcaattagtatgggaacttgactaaagacccccagtgttgtaacgtacctttgtacccagacaaaacaattatgttacattcctcaaagtggcatgggctttcttctctaattcttytgttttattagacccaagacaagttctaaaaattgaatgcaatgagagattgtccagaaatgtaatatatactaaaatataccacttaagcattgattgccttttcttgtttgcttcaagaatataaaacttgttacttgagcttggaatcatgggcttgattgaattaattactcttggggaaaaaagacaccttgtggcattaagtcttgctttggttaaagccttatttcacataattgctaaaaactcatttttgtttaatatactacctatagtttaattatcggcacttgtattttgtaacttgatatcttacctaggattgggaatttgggacatgacacgtactataaaagtcagtctatgtacatactgcttattgatgtgctgtgatatgagggaatctgaaatgtttcataaaaataaagcttaaaaattgtcttacactggaaaaaaaaaaaaaaaaaaaaaaaaaat

SEQ ID NO: 1660 - DNA, 906 bp, Homo sapiens
ccacgcgtccgaatggaggcgactacggctggtgtgggccggctagaggaagaggcgttgcggcgaaaggaacggctgaaggccctacgggagaaaaccgggcgcaaggacaaggaagatggggagccaaagaccaagcatctcagagaagaggaggaagaaggcgagaagcacagggaacttaggctgcggaactatgtcccggaggatgaggacctgaagaagaggagggtgccccaggccaaaccggttgcagtggaggagaaggtgaaggagcagctggaggccgccaagcccgagcccgtcatcgaggaggtggacctggccaacctcgctcctcggaagcctgactgggacctcaagagagatgtggccaagaagctggagaaactaaaaaagcggactcagagggccattgccgagctgatccgtgaaaggctgaaaggccaggaagacagcctagcctctgcagtggatgctgccaccgaacaaaagacctgtgactccgactgaggcatgccctgccccaccactcgcccatcaggcctgtcctgcaggggatggtcttgggcagggatgggggctaggcttgccatcacctccagtttggcttctgagcagagactccctgcccatcaagtctgaaacccccatggatgaggtcagctccttgtctgctgggtggcccctgccattctgaatggaggcagaaccagcaacaactctgggcgtgcctgtgtctgcacatgtggatgtacatatgtctgtatatatgtatatattttgaactttctaaaaaaaaaatctggaaatagaaacaagtaaacccctgaaaaaaaaaaaaaaaaaaaaaaaaaaaaaaaaaaaaaaaaaaaaaaaaaaaaaaaaaaaaaaaaaaaaaaaaaa

SEQ ID NO: 1661 - DNA, 4597 bp, Homo sapiens
  misc_feature (562)..(562): n equals a,t,g, or c
ggggcgcggcggcagtcggctctatgttcgcggtcttaacctctcctctggccgagtccttgcaagaagtgaattacccgaccctgcaaaacacttactattttggagtttaaagtatgtcatcatggcaaagtttcggagaaggacttgcatcattttggcactttttattctatttattttctctctgatgatgggtttaaaaatgctgagaccaaatacagctacttttggagctccttttggacttgaccttcttccagaacttcatcaacgaactattcatttggggaaaaattttgatttccaaaagagtgacagaatcaacagtgaaacaaataccaagaatttaaaaagtgttgaaatcactatgaaaccttccaaagcctctgaacttaacttggatgaactaccacctctgaacaattatctacatgtattttattacagttggtatggaaatccacaatttgatggtaaatatatacattggaatcatccagtgktagagcattgggaccctagaatagccaagaattatccacaagggagacacaacccntccagatgacattggctycagcttttatcctggaattgggaagttacagttctcgggatccttctgtcatagaaactcacatgagacaaatgcgctcagcttcaattggtgtactagccctctcttggtacccacctgatgtaaatgatgaaaatggagaacctactgataacttggtacccactattttggataaagctcataaatataacctaaaggttacttttcacatagaaccatatagcaatcgagatgatcaaaacatgtacaaaaatgtcaagtatattatagacaaatatggaaatcatccggccttttacaggtacaagacgaagactggcaatgctcttcctatgttttatgtctatgattcctatattaccaagcctgaaaaatgggccaatctgttaaccacctcagggtctcggagtattcgcaattctccttatgatggactgtttattgcccttctggtagaagaaaaacataagtatgatattcttcaaagtggttttgatggaatttacacatattttgccacaaatggctttacttatggctcatcacatcagaattgggctagcctaaaattattttgtgataaatacaacttaatatttatcccaagtgtgggcccaggatacatagataccagcatccgtccatggaacacgcaaaacactcggaaccgaatcaatgggaagtattatgaaattggtctgagtgccgcacttcagacacgccccagcttaatttctatcacctcttttaatgagtggcatgaaggaactcagattgaaaaagctgttcccaaaagaaccagtaatacagtgtacctagattaccgtcctcataaaccaggtctttacctagaactgactcgcaagtggtctgaaaaatacagtaaggaaagagcaacttatgcattagatcgccagctgcctgtttcttaatgcattgattaaagtttaatagttatcaaaatcacctaatttttaaaaatagctttcgttttgagttctggaaagaaaactgtcaaaatcagtatatactattagttatatttaaaaatatttttttaaattctttacagataatattatacttgttacccttcacaataccacatgagaaaatatctgagacaaaatgtatacaaatatattccttatggcataatttattgcatttctgactgaaatcaaaattctgatttgatggcaattgaattttcattttacaatagataaatgcttgtgytacctaaagcacttagcacacagttaaattatatttacatcctagacccaaataaataggattgtgtgtatatttgggatatctattgaagaaaaaaagaaaaccccttaaarataatgtacatgcttcatgtcatgtctttaaaataatttaatcaactttattgtcttagtatttagactctggataactctacaataatgaggaaattcttaagaataacaaaatcactgtaccttcctctcaattttgctgtgaacctgaaatggctttaaattaatactcttattttttatttaatttaattacataaattaaaccttaccatgaccaaattgtgttaggamggcctgctatctacagcacagtgtgtcatttgcagatttgtggttacctataccacgctaggtgttttgacatgtttagtgtttctgctttacagtgctgaattccatattttagaagctatgaaagtccttttatgaaaaagttactgattgcttctcagttattaggaaaacagttgtttcacaattattatgtagatatgatgcccaaatatcatttttagtatatcttgtcgatctttaagttgttactattgtgttattcatgtctttaaatcagataccaaatattttttaggaaagaaaaatgttattactgtcattaggttgtcttttaatactttaagttattttgacgaaaagtaatagagaaaatttacttagcattttagattctagagacatggaaatgaaaattattttatgtctagagtaggtcctgaagtttggctttacattaagtttagcactgtatcagaatgaagaaactaatattttacataaaaactaatactttcaattttttatatagtaatatccccattttgtaaatgttagacttttatcatacctgtaagttaaaatacttgttatcaataacttgtcatattgtgacaaattgatcacttgtgtacgaaaaataaatctccttaaaaactaaataaaatgcactgtattcttacagttaatgtttataactatagtaaaaaattaatatatatcctattacataaatgttatttcttaggtgttccattaagaagagcaatagaataatgctaaaaaataatgcctataaatcttcagagtataaagacatccattcagaaacaaaaattagcactaaattttttataaaatagaccagatgacaaaatttattttatttttaaacagtggttttgacacaaattatgttattgaaaagcattattaatgtttaatttatttaaaattttggaatttgccatttctcagacaatgatcaggccttaggaaattaatacagtagtagtaatcattttctaggggaaaataaaagaatarrtcactatactgatattttgatataagcaagcacttacatggtaatcactatatagatccaacctgtggattttcttcttatgtccatttaactagaatatattattttaggtataatttacaaatgtcacacctaataatcttttataatataccatatttcattaaagttttgttagagaagtatctaccacagaggagtttttgtcattgtgtacgttgtgtatttgaacccaccatgacagaaagtaaattttaggaaatagttatgagattaagggaaaatctataaaaacaaggttagcatattctcaacacagataccaccactttctttttcccattatagacatggtgaatccacacagcatacttcatctctgagctttrttgtgattcctcaacacattaccctaaccagccagcagtaacagatttcagagtaagataaagcagattctgtcttcattgcaaaaagttattctcaatggaagaatggcatctgatctcataattactagtttatattaatatagtttttttctccctttttaataaaataattacagtcatccctcagtgtctgtgggggattggttccagttacccctatagataccaaaatctgcagatgctcaagtccctgatataaactggcatagtagttgcatataatctatgcacatcctcctgtatacattaagtcatctctagattatttataacacttaatacaatgtaaatgctatgtagttgttataccatactggttagtgaataattacatgaaaaaaaagagtctgtacatcttcagagtttcagtcggcaatttcttggccatggatgtagaacctacagataaggtgagccaactgcattaggaaataactctaataattctgttaattcttagagaggaaaactttcaaaatcttcctcaggtatttattacaactgcctttaccattttagttgtaacacagtttaaattgttatgataacaagtaaataagagcaaagaatttatttcttaattcaaaactatacgtttgaattcaatatggtataacttaaagtggtataatacatacaatgcatgaatcataatggattcttttataagttattaatttttatggtttaatcagtctaattgttttgactgttatagaaaccaaatattttactgtttcttttaaggactaatattgtcaaaaactgctgttattaacttcacttgagttgtttaacttccttctgttttaagattgtaattaaaaattactattttgttatatggaatggttaatttttacctaataaaaacatagatgaaatacattgtaaaaaaaaaaaaaaagcctccctccgtgccgtcgat

SEQ ID NO: 1662 - DNA, 558 bp, Homo sapiens
  misc_feature (6)..(6): n equals a,t,g, or c
  misc_feature (8)..(8): n equals a,t,g, or c
  misc_feature (10)..(10): n equals a,t,g, or c
  misc_feature (33)..(33): n equals a,t,g, or c
acttcntnanggggactttcaactggaaattcnccctcactaatkggaacaaaagctggagctccaccgcggtggcggccgctctagaactagtggatcccccgggctgcaggaattcggcacgagcctccataggaacccagtgactggggggtgacgcctacacccccagctatttgcactctggtgtgtggtttgactctgcttttcttccggattggccctgtggtcacagcctcagggggccaggctgggggaacctcacctggcccgtactcctgggggtttccctttgccattgggccccctgagggactgtgggggctcaagggtaatgccagaggcccatggccccagcgaggggctgtggggcacctagagttctcggtgtgtctccttcattcattggcctctgctggggcctcctatgggtgtcttacgtctgtccatccatctgtccgtggtcagaagtggggtcagtgtgtgagtgagagcaggagtatttatgaaaataaaacgtcgtttttcctggaaaaaaaaaaaaaaaagggcggccgc

SEQ ID NO: 1663 - DNA, 1442 bp, Homo sapiens
ccagagactgcctcacacccctcaaccagacggccatgactgcccttttgtgaacacaatgtgaaagaagcctgctgtggtactgagcgtcsggctgtcacaaggcactggaagaagggagcctgctggtccagagtgtgcgtgtgtatcggtgtgtgtgtacacttgcatgtgtgtgtgtgatccagtaggatcctagagacaacctgtcatactgtttacaaaattgtgcagctggtttcgtgctgacccttagggtgcgtctgttgggttttgttgggctagaaaaatgaaaattttcagatggcgttttcattcctctgactgatattgagctgctttggtgttaaaggtgtaatgtgtacagagttgtatttaacaataataaaagtaacttaagtttgctctatcagattttagttctgcacagaggttaagtgggaaaatgcagctgttgcaaaatgtatataaatagtatgttcatttttttcagtatattatctgatactgtgttagcagcaggtctgcttaaacctagtcttgttgttattgagtcatttcctctcctttgataactagaactgaaagcatttttaacattcttctcctggaagaaatgaattacttgaagcatgaaaagcacaccagggtggttgtttatttagcaattatgactgtagatttaaaaacaagcaaagaaacaacacctcagcagctgcccgtttccttagtctccacttcagagggggatgcgaagaggtcggcccagctccggtgaccatgaaggtggcacaggaattacagtgtgaatggctgtgtcagatgttttcgtacctcagattaaaaatattgctgaggtcagacgccacaattttcatgactttcttcagaagtagcacattttcgtgacttccgctgtcctctgaaaaacaaagttatttggaacatgttcatgcaaaagtgattctgaccaagtctaaatcgagcttttctactgacatgaaactgttggaaactgatctcattttataagaaatgattttcccctcaaggaggcgtctgtaattccagaacagtccagacatcagctgtacctcatgctcagtagtttttatttgagtttcttttgtgagttaactatgggagatttaacctcttttgccaaagagggaagtgtgtgtgtttttttaatagaaaatatggaccaaaaatttttttccctgaagaatgtattataaccctatttgtgtggttattacatcctgtgaaatgtatatatgttaaaataatgggggtgctggaaggtcatggcagactagctgctggttagtgtggaggggaartggtttactttgtagagtttacatggttttatgcgcacactaattgtaataaactatgccaaaccaaaaaaaaaaaaaaaaaaaaaaaaaagggcggcc

SEQ ID NO: 1664 - DNA, 1228 bp, Homo sapiens
cccacgcgtccgggaggtgaagagcatgccttcctgactgtaggatcaaaggaagccaataatgggcctccatttaactttcctggtaattttggtggatcaaatgcctttgggccaccaatccctcctccaggattaggaggcggggcctttggtgatgctaggcctggtatgccttcagttggaaacagtggtttgcctggtctaggactggatgttccgggttttggaggtggaccaaacaatttaagtgggccatcgggatttggagggggccctcagaattttggaaatggccctggtagcttaagcggtcccccggggtttggaagtggccctcctggtcttggaagtgcccctgggcatttgggtgggccaccagcttttgggcctggccccggccccggccccggccctggcccaatccatattggtggtccccctggctttgcatctagttctggaaaaccaggaccgacagtaattaaagtgcaaaacatgccctttactgtgtctattgatgagattttagatttcttttatggctatcaagtaatcccaggctcagtgtgtttaaaatacaatgaaaaaggtatgcccacaggtgaagccatggtggcctttgagtctcgggatgaagccacagctgctgtcattgacttaaatgacaggcctataggttcaagaaaagtaaaacttgtattagggtagccattcacatcattttttatagggtagatcttcatattgctgtgattaatgcatccagattgttttcctagtatttccaggttagaacctgtggattgtttcaattgcatatagcttggtttccataacatagagcattggttgactgtttacagaagactcactcaccaggataaacattgctgtatgttacagtaaagctatctggagagaacacataaatgattttggcataccattagagaaaccatttgtaaaactcaaatgaccacataaagcttatcaaggagtctagattggttttgttttataccatatgggatgaagaaaatagaaatgtcagtagaactcattgagggtgctcttgccagctgctgaaaatagaagttggctactctcagaatttggtttaaagctggacagatttgctttgttatagggtaaagctttgtctaaagtcctcattttcttttaaaattgaataaaatttctgtatacaaaaaaaaaaaaaaaaaaa

SEQ ID NO: 1665 - DNA, 2241 bp, Homo sapiens
ccacgcgtccgcggacgctggacggagctgcggcggctatgctgtggagcggctgccggcgtttcggggcgcgcctcggctgcctgcccggcggtctccgggtcctcgtccagaaccggccaccggagcttgacctcctgcatcgacccttccatgggacttaatgaagagcagaaagaatttcaaaaagtggcctttgactttgctgcccgagagatggctccaaatatggcagagtgggaccagaaggagctgttcccagtggatgtgatgcggaaggcagcccagctaggcttcggaggggtctacatacaaacagatgtgggcgggtctgggctgtcacgtcttgatacctctgtcatttttgaagccttggctacaggctgcaccagcaccacagcctatataagcatccacaacatgtgtgcctggatgattgatagcttcggaaatgaggaacagaggcacaaattttgcccaccgctctgtaccatggagaagtttgcttcctactgcctcactgaaccaggaagtgggagtgatgctgcctctcttctgacctccgctaagaaacagggagatcattacatcctcaatggctccaaggccttcatcagtggtgctggtgagtcagacatctatgtggtcatgtgccgaacaggaggaccaggccccaagggcatctcatgcatagttgttgagaaggggacccctggcctcagctttggcaagaaggagaaaaaggtggggtggaactcccagccaacacgagctgtgatcttcgaagactgtgctgtccctgtggccaacagaattgggagcgaggggcagggcttcctcattgccgtgagaggactgaacggagggaggatcaatattgcttcctgctccctgggggctgcccacgcctctgtcatcctcacccgagaccacctcaatgtccggaagcagtttggagagcctctggccagtaaccagtacttgcaattcacactggctgatatggcaacaaggctggtggccgcgcggctgatggtccgcaatgcagcagtggctctgcaggaggagaggaaggatgcagtggccttgtgctccatggccaagctctttgctacagatgaatgctttgccatctgcaaccaggccttgcagatgcacgggggctacggctacctgaaggattacgctgttcagcagtacgtgcgggactccagggtccaccagattctagaaggtagcaatgaagtgatgaggatactgatctctagaagcctgcttcaggagtagaacccacacttgttctggcctggtgttcagtgcgactgcagtcagtgttgagtggtgccatgtgggccgctctattccaaaggaatcatggattagacccaagggctgagctcctctagggcaggacctgcaccctgtgtgttggcaccagcatcgggtcttggactggggcagaatccccagtggaaccggaagagctggactgatgagaaacatcagaagaacacatactaccttgttttcctaatgccagaagggtgaccagtgaagattcaccgtcaaaccatgaaagtcctttcctggatccactttatcttgattagtctgcattttactagttcactggatccctcctctaggggcctggggactttcactgatgctcttcctgattctagagcaaaggtgtgggaaggggaaatggaggaatgccctcctgtctgtgtcgttctctgtgccacagctacagatgcagaaggtttctctggatagcacacctctgaatgtaaatcatgataaaatggatatttggaaacttactcctaagctgtgatttagggtgtatttctacttctggactgcctcaatatcaagggctgagacttttgaattttgaatattcgttgggtttcatgttaagaagcctgtggtctaggagtgctattcagtgtttcttttcctgataaacactttgaatattttttttgggtttttgtttccttttctgaagctgttcccccttttaaatatttttaatcccattgataaaatctatccttcaccccctttggttctactatagttgattttaattttaaatgtttaattgtatttgattaaacacttaactggattttggaataataaaactctcgtccaatttggcttttaaaaaaaaaaaaaaaaaaaaaaaaaaaaaaaaaaaaaaaaaaaaaaaaaaaaaaaaaaaaaaaa

SEQ ID NO: 1666 - DNA, 1577 bp, Homo sapiens
ccacgcgtccgcccaaggacgacgcagccatcgttggggccgtgcggctcctgtccgtgctgatcgccgccctcaccatggacctcgcaggccgcaaggtgctgctcttcgtctcagcggccatcatgtttgctgccaacctgactctggggctgtacatccactttggccccaggcctctgagccccaacagcactgcgggcctggaaagcgagtcctggggggacttggcgcagcccctggcagcacccgctggctacctcaccctggtgcccctgctggccaccatgctcttcatcatgggctacgccgtgggctggggtcccatcacctggctgctcatgtctgaggtcctgcccctgcgtgcccgtggcgtggcctcagggctctgcgtgctggccagctggctcaccgccttcgtcctcaccaagtccttcctgccagtggtgagcaccttcggcctccaggtgcctttcttcttcttcgcggccatctgcttggtgagcctggtgttcacaggctgctgtgtgcccgagaccaagggacggtccctggagcagatcgagtccttcttccgcacggggagaaggtccttcttgcgctaggtcaaggtccccgcctggagggggccaaacccccagtggctgggcctctgtgttggctacaaacctgcaccctgggaccaagaggcagcagtcatccctgccaccagccagagcacaggaagagcagtgtgatggggcctcagcagcgggtgcccctggctcgggacaggtagcactgctgtccagccacagccccagcccaggcagcccacagtgctgcacgtagccatgggccgcaggagtgcatacaaccctgcatccagggacacggccctgctgggtgacctcaggcctagtccctttcccttgcgtgaaggacacgccccacagaaggctacggggaggactgagaggacagggctggaggcagccaagtaacgtagtcatatcatcgcgctctgatctggtggcatctggctgtgcaaggaagacccggctttgccctcacaagtcttatgggcaccacagggaacatcctggacttaaaaagccagggcaggccgggcacagtggctcacgcctgtaatcccagcactttgggaggccaaagcaggtggattacccaaggccaggagttcaagaccagcctggccaacatggtgaaaccccgtctctactaaaaaatacaaaaaagctgggtgtggtggcacacacccgtagttccagctacttgggaggctgaggcagcattgcttgaacccgggaggtggaggctgcaatgagctgagatcatgccattgcactccagcctgggcaacgagagtgaaactccgtccccaccccctgccaaaaaaaaaaaaaaaaaaagccagggcaaaggacctggcgtggccacttcctcctgccccagcccaacctctgggaacaggcagctcctatctgcaaactgtgttcacccttttgtaaaaataaaggaactggacctgtaaaaaaaaaaaaaaaaaaaaaaaaaaaaaaaaaaaaaaaaaaaaa

SEQ ID NO: 1667 - DNA, 2110 bp, Homo sapiens
ggcagaactaagatttttgactctaaagagagaaaattacaagggtgttgccttatagcaaacccttgggacaatccttcatgtgagcaaagtgttgatcttaatattggttgtctgtggtgtgcttttttgtactgtaaaaatatgtggttcatgtctaactctgctgttttattgtggttgtggttcaagtttttaatgtttaaagttgatgctgttttcagaagagctttttactaatttatttgtcagtgttccctatttgttacttaaccatgatcctccagattttttggagtattcttttctaaccttaaccctgccaaaccttgatccattttgacatttgttatgcactatttttatatctctgtgagagatttttccaacagtcagctattttatggcacactttttttgactgatgacatctcctttgctatacctcaatttttggaatttagagaagaaatcagtagttttgcaatgttaattatttagatatttaatttcgcagatttttaaactttattttcataatttctgcttaatgtttaaaattgaagagccttttcatgtattaaataatgaacacaaattatataattaaaataattggagatgttgaaaatcattttcccttcttaaacagaaataaatatttggaatgaaggggaatgtactagaacaccctttttgccacgggtaaaaataacagaaatgtatggtttgttttaccttcatttctgtacaagtaaagcttattagtctaatgttttgttcctttcccacctcacccctacctcttttgttttgttttgtttttgccctttatgtactacattcttattttctaacttttaaacactgtattggaggtttttttttaatttacagatcatatttattttactatttttgtagaaaattattaattttgattgtatttttgtattttaaaagcttcttcacttgtgttccctaaatattcatattgctgcccaaaaktatgactgtggaggaaaaaaaaatactttaaaaatccacactttttgttaagaaggaaacatttagcatttatatatttgtgtatggaaaacacttgatattttatccctgttgcatctggctgcacagagcctctcctcaaagatgctacaaaacttgaatataacacattttggaaggctgactaacctcgattctgtgttgtgatgtgcaatactgtttctaatgtttgtataaaaaaaaacagtgtaaacctttttaatgcaaatttatttttttcattgcatattttgcagattttatccacagtgtcattttttactgtcagaaaagataccccttttgtcattgcaactattttttaaatccagaaatctttgtactgatgtaaatgattgtagttattttggatagtgttttgctaacaaaaggagagacttttttcatgcatatttctatttkgtttttttgggwtttattttattttaatagtagtaaaatacttggaataatttttcatattcttgtcattaatattattttgtatttttatgtggaaatatataattttatgacactaattgctaaagtttattttatgttgaattatttttggagctgaaatctttgtaatattaaagcaactagtttctaattcccagtttctgtatagaatcgcacaagtggtttatggagtgtttggattgtaattataaatggttctttgatatgcaaattaatattttcagttgattttattttatattcctaatggggtgttaaagccgttttttatttttttctaaataaaaagagaacccatgcttttatggacactaggtaaacaccttcagcttaaatttttcgttaaatattttagtttattttattgttatcttccaggtgtctaaatctccagtctgtctgttgtactggtaatttaactctgtaatggaatagtttgctgccaactatttatattaagtaatttttaaatatttgtaatattgttgactgactaataaactattaagttattggmawaaaaaaaaaaaaaaaaaaaaaaaaaaaaaaaaaaaaaaaaaaaaaaaagggcggccgc

SEQ ID NO: 1668 - DNA, 1825 bp, Homo sapiens
  misc_feature (270)..(270): n equals a,t,g, or c
  misc_feature (814)..(814): n equals a,t,g, or c
  misc_feature (1816)..(1816): n equals a,t,g, or c
  misc_feature (1825)..(1825): n equals a,t,g, or c
ggccgcgcggccccgagccccccgagccgggcggggcgctcaacaattyggyaastctcattcgacatccatctgaactaatgaatgttcctcttcagcaacaaaacaaatgtacagcattagtgaaaaataaaactgcggctacaactactgctttgcaatttacatacccactgtttactacaaatgcttgctctactagtggaaattctaatctttcacagacacagagttctagtaactcatgttctgtacttgaagctgccaagnaccaggatattggattgcctagagcattttctttctgttatcagcaagaaattgaatccactaaacagacgttaggtagtagaaacaaagttttgcctgagcaagtttggattaaagtgggagcagcgctatgcaaacaagcactgaagaggaatcggagtagaatgcgtcagttggacacaaatgtagagcgaagagcccttggagagattcagaatgtgggcgaaggtgccaccgccacacaaggcgcttggcagtcctcggagtcctcacaggcaaacctgggggagcaggcccagagtgggccccagggaggaaggtctcarcgtagggagaggcataaccgaatggaaagagatagaaggcgcagaatccgcatttgctgtgatgagttgaatctcttagtgccgttctgcaatgccgagactgacaaggccacaactctgcagtggaccacagcattcctgaaatacatccaggaaagacatggagattctcttaaaaaggaatttgagagcgtattttgcggtaaaactggccgaangctaaagctgaccagaccggactccttggtgacctgtcctgcacaggggagtttacagagcagcccctcgatggagatcaagtgatcggactgaacaggaatcctcggggggtgaacagccattccttcgtgacctgtgcaacgccttctgcaaccctggagctctgctcggctagtctgactcgaaaagggcgtgactcaagctgacgggactccagtagggactttgagagcacattttgtaaaaatatttatctagacgcaaatgcttatccatgaatgtcctcttagaccatttggggatgaagccatcttaataattagtaataattaattagtaataattagtaagcattttctcaatgctctgattccatcatgttttcttaacatgataacttaaaaaattgacatcctttgtactttctttaatcttaaaaagtacacggctttttacttatttaccttttaaawwtgcccctttagcaattggaacaagttaaattgttaactaaaaacagtttggaaattttatttcattcgttatatcacacccccttgtcatgactctgagtcacgtgctgctgtattgcaacgtgcaggaccattttaaacctgtgtgctaaaaattttccagatacttgctttaaagctacttttgtccacaaatgaaatactgtcacagtagacgcttaaatgccacgttttcataccaagagtcattcattacttcatgtgtcacaaactgtggtgtttggaattgggtttttcaatgagtggctttacttatcacaacaggtaatagcaatagaygttagtgcaatacaaagtcaccctcaataaatactgttaattgggagatgtgagtttgtacacaaaacatcagactagacctttgtatgggagagaatttactgtacattaaattctttattttttgttaaaaaaaaaaaaaaaaaaaaaaaaaaaaaaaaaaaaaaaaaaaaaaaaaaaaaaaaaaangggcggccn

SEQ ID NO: 1669 - DNA, 1349 bp, Homo sapiens
ccacgcgtccggtctcagggacgggctgcagccatgtcctattgccggcaggaagggaaggatcgaatcatatttgtaaccaaagaagatcatgaaactccaagcagtgcagaattggtggctgatgaccccaacgatccatacgaggagcatggattgatactgccaaatggaaacattaactggaactgcccatgccttgggggaatggccagcggtccctgtggagaacagtttaagtcagccttttcctgcttccactatagcacggaggagatcaaggggtcagactgtgtagaccagttccgggccatgcaggaatgcatgcagaaatacccagacctctatccccaagaggatgaggatgaggaagaggaaagagagaagaagccagcagaacaagcagaagaaacagctcccattgaggccactgcaaccaaagaagaggagggatcaagttaatgaaggccacaaggcactgggcaccagtccttttggagtggaccttttgcaaaaggccttgtcatcaccttccaagaaagtttccttctgttgtcctgtgcattataatatacaaaataacttattttgatgatcagaggtcttgaggtcttgacctcttgacatatacactgaaaaaaatgggggttgtatgtatgtgtgtcctacccaaacctgtggccgccacttttgaattctcagattgccctgaattttgccacttttaaataatgtgctgaataagctcagcaactaaaaaccattacccaagaacgtttcttgtgagtgagctgatttattctgattcattatattccttttggtagattttataccccttggggaaataatacaacaaaaacatctcttaaaaatgctgggatggggccatatctactagcagaggccagatggtcagatatgatttctgcaaacccatcttgaccttgagtatgtgaaggggtactgtactttattcctgatacattttggtttccatgtaggtgttgagctcctggttttctgtgtttggatgatgaagatttggacccttccattcataatccctttctaagtgaagggagaggctggcttggctgttccttgttattccgaaagccctggtttggggcccatgttcacactggctctcagtctagtcaggtgcaatgttcttgagaggtggggacctaattattaccagagtagcagcaagagaggaaacgttgtgaattaagtattcaattaaaaggaaacatgatttctacctgaaaaaaaaaaaaaaaaaaaaaaaaaaaaaaaaaaaaaaaaaaaaaaaaaaaaaaaaaaaaaaaaaaaaaaaaaaaagg

SEQ ID NO: 1670 - DNA, 1273 bp, Homo sapiens
cttaataccttcttaaatgtctatatatcccagtgctctggatcagtgtctaaaaatcactggcaacactgcatgaggttgttggttttgttttgttttattaattagtctttcacaggaggaataattgccctcctttatatacttatctattgataatcccctctccctccagaacacaaatcagagggaaagggggtgttcagctgtactaccaaatcaggaagatgtaaggtttacaaattggctaagaatcatggctctgtagccatttcaaccagaataattttattgctaatctgctttgtgtgacagcattccaggccagccagatgggactgccttgtctggaggctttgttcatctcgaaggacacacacttccacactgtttgtgagccctcccacctccacaacttcagttgtaaatcaagtgtgtggatctcaaagggtgcaatttatctttatataggaatacatttctagggcttccttcaagcccactctcttcaccctattttttcttatcttaaattgagagaaagagaattaatcttatactttgtcaaaacattttctaccatatttccagatgacatctgcgcttgaagagtcaaaggaatctgtgtctaatatcctgtttttaactgctgtaggggcaggatggaaaggatgatgggggctgccacaccactgattggccttttctttcacgtgattcatccttcctcattgtggcaaggagtttctttctctttttcttcctcctttgggatcattgtgtatgaaaagaaaaactttaaatgacaaacccagactccaggtgccttgcaaaggttgaaggccagccaggattgctgctgctgctgctactcctgccaacacccctttcattggcatgacggaatgaaaggatgcatgtctccacttcctgaccctccgcccacttccttctccctccaccacccccagtcgtcagctccttccctcatttatttttgttaagttgtgtgaattatttttaacccatttatcctgtttgtgcatagggtttttaagaagaaacagcacagtgcaacgagcaaatctttttggggtgtgtgggaagcaagggagggaggacatggagaaaagttctttaaacaaatagcaaactattgaacatgtgtaaaatcctgtatcatttatgaaatatgtataaaaagcaatgtaccttctggaacaataaatacttattcaatttttgaaaaaaaaaaaaaaaaaagggcggccgc

SEQ ID NO: 1671 - DNA, 1468 bp, Homo sapiens
aattcccgggtcgacccacgcgtccggggagagataccaatatcatcaagccagaccaacagaagttccttcgatttgctcccacgggagttccgtctggtggaagtccatgacccacccctgcaccaaccctcagccaacaagccgaagccccccactatgctggacatcccctcagagccatgtagtctcaccatccatacgattcagttgattcagcacaaccgacgtcttcgcaaccttattgccacagctcaggcccagaatcagcagcagacagaaggtgtaaaaactgaagagagtgaacctcttccctcgtgccctgggtcacctcctctccctgatgacctcctgcctttagattgtaagaatcccaatgcaccattccagatccggcacagtgacccagagagtgacttttatcgtgggaaaggggaacctgtgactgaactcagctggcactcctgtcggcagctcctctaccaggcagtggccacaatcctggcccacgcgggctttgactgtgctaatgagagtgtcctggagaccctaactgatgtggcacatgagtattgccttaagtttaccaagttgctgcgttttgctgtggaccgggaggcccggctgggacagactccttttcccttgaatgggaaggagcagggattccatgaagtgggtattggcagtgtgctctccctccagaagttctggcagcaccgcatcaaggactatcacagttacatgctacagattagtaagcaactctctgaagaatatgaaaggattgtcaatcctgagaaggccacagaggacgctaaacctgtgaagatcaaggaggaacctgtgagcgacatcacttttcctgtcagtgaggagctggaggctgaccttgcttctggagaccagtcactgcctatgggagtgcttggggctcagagcgaacgcttcccatctaacctggaggttgaagcttcaccacaggcttcaagtgcagaggtaaatgcttctcctctttggaatctggcccatgtgaaaatggagcctcaagaaagtgaagaaggcaatgtctctgggcatggtgtgctgggcagtgatgtcttcgaggagcctatttcaggcatgagtgaagctgggattcctcagagccctgatgactcagatagcagctatggttcccactccactgacagcctcatggggtcctcccctgttttcaaccagcgctgcaagaagaggatgaggaaaatataaaaggaaaagagggagattttttgtccagacctactagacccaacagaaaaggtttttgtattagaatctgtttccttaaaaattgatttgactcctgttcttaaacacaagtggtttttcctaattccagaggaactggacgtcaccaaacaaggttgcattttacttttgcaaaaaaaaaaaaaaaaaaaaaaaaaaaaaaaaaaagggcggc

SEQ ID NO: 1672 - DNA, 1176 bp, Homo sapiens
  misc_feature (639)..(639): n equals a,t,g, or c
  misc_feature (700)..(700): n equals a,t,g, or c
aattcggcacgaggtttctctagaagtaatttatgttatcaggttatcccctgagttttttcttactcaccatatgtctggtggttctcacagccaggggcactgaggggctctgccctgggatctggaggccagcactgttcacctgatctccaccactgagatacctctggctagagccataatcaggtggcccaaaggactgaacaaggaagaatgggagggcactctagactaattaaggttgtcttttcagtctaaagttaacaatgacacacatgaattttcatatcagtataattagatgcgggtcccatctaattacagtgggtcattatggctgttcggttagagcagcttgggtgctctgtgaccatggcatgtgcccgtgtcaggactagacaaagtcatttgcttggggaagctctctccccttcaggtgtgaggccaggagcacctggtgtgggtcctgtccctgaggttctgtcctacaccaccctcatgcaacacctactacacacaggtgcacagcgactgtcacaggcgcttcatgtttaaggatgggcctccgtgtcataaacttttttaaagggtatatagrgatagcttatgraatccaaatcaaaggtccagagtttncagcaaattgtacctacctatttgccaacttaacctcaccatagaaagccaaaagattcancctgtggccagtctttcacattacagagtttaaagtactttttttaaattyctattttatttttaacaaaatatttaacaaaatatagtatatctcatgtgccaggtactatttgtaatatttataaacactgatttayttaatcttcacagagactcattttacagattggaaaacagaggcagagagaagttaagtaactttaatgtcactcagctgggtagtatcaaagtcttggctgctggctccagagtctagacctttaaccactgtgttatgctttccatgggtaaagcaacctaaaaaggcccctggaatcagttacatgtggttggagactaactctgtcattgacttactaaatgcttgatattgggcaatttatctaacctctctctgcatttagtaagtcaatgacagagttagtctccaaccactgtgttatgctttccatgggtaaagcaacctaaaaaggc

SEQ ID NO: 1673 - DNA, 1779 bp, Homo sapiens
cctcagtgagatatttggtaccatggtgtaagctgatagcacaagttctggcgacaggtagcacgtatctgagagacacctgcaagcacacactgtcccagctggtacccataatgctgctgttcctgctgctgctcctgctttcctctcttctcgctttaaatgattgttagcaagttagattttcctggagcttcggaagaaatgaaaatggaaacatgatgaagatatagtcactgaatcaatgagaaaaataatgaacatatgaataccacctaaaaatacactgaataaagtacaccatatagcattatttttataggaaatatttcatgtcccttaaatatcttgttagttatagggatggacagtttatgttaagcacttagcttaaacaatccgtttatattagcactgtatcccttgtgccatccaacattttgtatgtttttgtaaacagttcatatacagtacatttctgtactgctttctttaatgtatacatgccttgtttaacttggaatctattattattaatcaattgactattaaatctggttaaatagttcacctggattaacagtattgttggacagtcctaaaaatggccagattgtggaacagctgttgaatgtaatacttccaaaatgtacatatctttccccacgtctgtttcactggttcgttcatttgtttgtttcttaaagtcaggtgctctgtcagactaacctagagagctgttatggtagagaaagttatcatatgtgtgtggcatgaaatcaagaatacacctatgaagttagtccatatactttgcaactccttagagtacttttttccttaattaaggaagtagtccttgcacttctaatcttacatagcatccatacttagaatttggcatatcatctgggattttgccaatatacgtcaaagccctttaagagtcatggtaaggagatgggtgaaggaaaatttagcaacaggtaattgaagtcctattggatatttcatgtttaaatagatattctatattaaacactaatttaaatgtaataaaggccaaaggcctctgtatgaaattggatttaaactttcttattttagggaataaaacattattgatcaaacagtatctgttctaacctaaaattataggtagggcaggctaagtgaacagcattgaggattttctgaatccctcatgataatttatagccacatactgcttcctttgacttcaggaatgatcaggtttcataatggccactgggcctgcttagattgcagtattcattatctgcatctaatttggtagtttccacaatcggtatttgatgaaagaaacttcagtccccattattacctgtgtctttgccaagctgcctagcatacatcagtatgtaatgtaaaagacatatgagcaagaaaaaagtgatttaacttacctcatcaagaatgtgcccctacaggccgggcgcagtggctcacgcctgtaatcccagcattttgggaggccgaggcaggtggatcacctgaggtcaggagtttgagaccagcctggccaacatggtgaaaccccgtctctactaaaaaatacaaaaattagctgggcatggtggcgtgcacctgtaatcctagctactcaggaggctgaggcaggagaatcgcttgaacctgggaggtggtggttgcagtgagccaagatcacaccattgcactccagcctgggtgacagagtgagactctgtctcaagaaggaaaaaaaaaaaaaaaaaa

SEQ ID NO: 1674 - DNA, 1473 bp, Homo sapiens
cggggtggtaggcaaaggtgcttggggtccggccaacgcttgggctgggcacagggcggatcagtagattgggtcagataagacgccatttgaccaggttcacgtttttgtggatcgaggggtttcccatggagtgatataatgggggcgcctactaggaagtgcagtgttcagtggctttctctatctgttcctttcctcagcgcccagtgtagcgcgtggcgttccatataagttgtggaattgaaatggattccagggccatgccattccccttctctcattctcctcgctctccaccccccctcccccgccaatgtcctggaaggacgccctttagtgggtgcctcctaggagcttggagcagctggcagctctcttgccgggcttgcacggcacccgggctcagttgtaggtggtaagggggctggaagactgtgtccggctcctgccttggggattccgaattgaatccgcgctgagactagaacacgccctcccaagggagcagtcccagagtcatccacccgaggcggattaatcttctctgagtagaaatgtgaaaagcccacaccggccaggaaccctcgcttcgattcactttattttccagccagcgattttcctttgaacatagggatcccatccaggaggaggagacacagctcctagaaacaggatccgccgggtcctcctcctgcgcgggtagacgcagaacgttcccacagtctactttatgcgagcgtggcacccctgcttgaggcaccccagagcaccctcgggccgctccttttcacccgaaagataggatcaccccccagttaagtcgcttctgggttttccgaaactcacctgacactcccaacaccccgaccccgtcccggggctcgctgctgccacctactgcccaactcgaatgaaatttcagacgcatgatcaagcccagtttaatagggaggaaaaaaaaaaaccttttcttctccatgactggggctaagagctgttctgggacaagcatgtatgtgtgtgtggtgggatgggatgggatggggtgggaggagggggcagcaggggatttttctagctggtgccagagcagccaggcctcttagaggtggggtgagtctggccattgtgcaaccccttccagttcctctgagcagataatagctgaatccagatggtgacagcccgtgtgtcaccgtttccagttgagtctaggatatgagtaactggactgaacaaaaggcctttaaagagaccagccagcttcctagaagagaggagatgctactcattctaggggtggggtcgggtgtggggggataaacaaacaagtggaaaacccattcgcaggattccatacccttcctgtgagaattgtaactcaaggctgcttacacttgagtcggactgtaggcaggttgcttaaggctgcattgtcccagcctccccaaaaaaaaaaaaaaaaaa

SEQ ID NO: 1675 - DNA, 779 bp, Homo sapiens
  misc_feature (652)..(652): n equals a,t,g, or c
cccacgcgtccgcatgagtggtaggaaaggattactgtcaaaaatacctatttcaggtgtcacagtcaataatagcaagatagcataaattgactttttccgccctagggatatatagtttatcttcttcagatttctgaggattaaccgaagcaatttttaccagcattcacttcttcctaacgttgtcagactgccctccttcaaggaaatctcaaatctcttctggaagtatatgggacatgaaatctagcaggttaaaacttactataaatgtgtcatctgaagaatgcaatctcatttcctcaaagatttccaccctgaccctgccctggacaagcacttcttgctttttagaagtaagacctataaatcctgtaagtaagttacagggctctacattaggaacaaccaggcataggcaggggkcttgtctccaaaggaccttcggkctatcacagcataatgctggcactaaacttactgtggtaaactacagcaaacagatcattagaaagacaacacgcaaacaatgtacaatgtaattagccttttctaaccagtgtacccttggcttcctaaacaataacaaaaacaagtgacacagaacacataacagtgagaagtaacgactagttcataatataaaagncctttatactttttcaataaatacggtatttggttaaaaaataattatgttgacttagwgattaaaatttgtttaaatctattactaaaaaagaacacgcaatgatacacaccaaatttaaaaaaaa

SEQ ID NO: 1676 - DNA, 1332 bp, Homo sapiens
cccacgcgtccgtttacattgactggtttatgaatgttaaaccagccatgcatttttgggataaggcacatttgctcagatatattctttttcttatcttccccagtttctctcattccccataatgctccagaatttctaattgccaaaatgccctttaaatacttgttcatgggttttatctctcacattctctccgctccttcttcagaaactcttcacctgtttcacttacctagtaaagagtctgaagcagatgactgattttacatttttctgggaaattcaagcagttcattgaagattatcttttggcattaagaaaatgcaatcaaggtcaggcgtggtggctcacgcctgtaatcccagcactttgggaggccgaggcgggtggatcacctgaggtcgggagttcgagaccggcctggaccaacatggagaagccccatctctactaagaatacaaaattagtcaggcgtggtggtgcatgcctgtaatcccacctgcttgggaggatgaggcaggagaatcacttgagcccgggaggcggaggttgcagtgagccaagatcatgccactgcactgcagcctagaaaacaagagggaaactccatctcaaaaaaaaaaaaaaaaaagaaattgcaatcaagtgtcacttaatgatggggatacattctgagaaatgtgtcattaggtgatttcttctgatgggaacatcgtagaacatacttacacaaatctagatggtataacctactgcacacctatcctatatggtataacctagtgctcctaggctacaaacctgcacagcatgttatgtactgaatactgtaggcaattataacactatggcaagtatttgtgtatctaaacctatttaaatatagcaaaggtactaccgtagtaaacttttatgggaccaccatcataaacagagttcatcattgacctaaatgtcattatgcagcagatgactttattcaatttatatttaaagagaaccacagttctgatatgttagacattagtaatgccattcaaaaacttgagtcaaaaactacataaatatttctgaaaatttaaaaaatgtaaatgtatattacaaaaagccaaaagaagtagtaaaaagccaaaaaagagtaatatcaatttcatttaaaaataaactgaagtggctgggcacggtggctcacacctgtagtcccagcactttgggaggccaaggtgggcggatcgtgaagtcaggaaatcaaaaccatcttggccagcatggtgaaaccccgcctccactaaaaatacaaaaaaaagaaaaaaaaaaaaaaaaaaaa

SEQ ID NO: 1677 - DNA, 2129 bp, Homo sapiens
cacgcgtccgcggacgctgggctgttttatgtgtgtgtttgtgtatgtgtggtgtgtgggggtgactgtgagagtgtgtgtgtggtgtgtgtgtggcatatgggccaactattatgaatgtgtgtgtgtgtggcctgtagggtgactattttatgagtgtgtgtgtgtggcatgtgggatgactgttttatgtgtgtgtgagtgtgtgtgtggcctgtggggatactatgagtatgctggtttggagtgtgtttctttgggcctcagttttctcctctgtggaatggggatgatcatggcgtctcgtcactgggccgtgtgaggatcgaaggctgtgttgtttgtgcagcaggcagaagggatcctggtaggagcccacgcgtgggagcctctcatgcgccatcatcagtgtctccaagtgggtccgacatggtgggagcagctggctcggcctgtctccctggcagccccttccagcctccacaggtggtcccggctgactcatggcctgggagggctagggtgggtgggaagcccgccctcgagactgtctctgcccggctctggccacggagtgtcccctgtgtccagcactatgtgcccctgtgctcctgagtccggaaacagttctgtggggtccacatccctcccccatctcatagcagaagggactgagcgtccaagtggataaaggatgaggataaaggaccgtgccaaagccagatgcctcccagcgagggtcacaatctcgcttccacctcatgagtggctgcggcgcctcgggaatgaatctgttccatgttctgtgttgggagctggcgctgggggaccacaaccctcaaagtccccagcaccaaggcaaagtgcctggggctcaagaggggaagcccacctgacgggaagctgagggcagggcctgggtcatgtccccactggctgcaccctcaggagggcgggatccatcaccctcatccccatgcagggaaaggcccagggaccaggtcagaatgacacagagcccttgagctgatgcctcccctgacccctcactgagggccatgctagaaggggggatccctacaaaaggggaaatcctgaggctctggaccgggcctccagtaggggctgtcacccctggctctgaccttgctcccggagcccacctcccctgggtcgcctcctggtcatgggagcctccctggggaagagccactcctagtgtcctagagatgtggccccaggcgctttctccaccaggctgcaaatcccttcccaagctcacatcccccaagtcgtcatccagcccaagccgagcccccagttgcaccccaaggccttagcacaaggctgcagctggtcctcgagccatgatggacacttaactcctgtcccatgcatgtgccagtgcctcacttactcaccttggtgaatccttacagccctgaggaggtgcctgttcctcctcttctccctttttactgatgtggaaactgaggctgaggttaaatcactcactcaaggtcacacagctgttcaatggcttagatgggatttgaacagaagtctgagtgagtccagaacctgggacttcagccaccgggagtgtggctcccaactgtacatgcatgcatgtacacagacacacgctacccagacacttctcacacctgatgtgcacttgggagcagtgccccggctcccacctgttctcgtggcacatctgggtagagcctgggtgttgctggtgcctgaggcttgcgtgagagctttccacttttccctaagtctcccatcaccactagggttatgtgaattggctgcgcgtgatggctcatacctgtaatcccagcactttcggaggccgaggcgggaggatcacttgaggtcaggagttcgagaccagcctggccaacatggggaaaccctgtctctactaaaaatacaaaaattagctgggcgtggtggctcaggcctatagtcccagctactcaggaggctgaagcatgagaatcgcttgaacccgggaggcggaggttgcagtgagccgagatggtgccactatactccagcctgggtgacagagtgaaactgtgcttaaaaaaaaaaaaaaaaaaaaaaaaaaaaaaaaa

SEQ ID NO: 1678 - DNA, 2332 bp, Homo sapiens
ccacgcgtccgcactatcaaataaaaatagggcatttcttatggtagatgggagtaagaaatatcatcttctgtttttaaaaaatgtaactatataaatgttaagaaagaaatctattgaataaaagttggagaaaaaagaggatggttgattttaaactctactgacttggttgacttttacttgatatgtgctatctgaaaaaatggacaatggccactccctcatttctttttttcttccttttattgaattttaacagcagttttgtctggctcttttcatttctgtgtttatttcctgtaaaattgtgatgcataatcagagtaagtttttgtttgtgtatgattttgccatgaaaagtcactgtgtatctgaagccaaaattacacttagtatttcatgcggttttggctgatttcctttctatttttcttcattaagcaagtgccatcaaggccagcagtacccatattatatgtccagagaagagccaggccagatgggaactgcgtgaaagcaaccagttatcttgctaattatgccagctagaaccagttgtattgcattaaaaaatgtggaatccaacaacttagctgttcacactcaattagcagtgtgctggagaatggaaaactcaagcaaggagtccatgtgctccaggaagtgacagctgcttccttacccagcatttaatatccatgtaaaattttttcaataaacgttgtgataatttttgcaagaatcatgtatatgttatgtctctaattcatctcataatttaaaaaaaacataaagttcagtggtctatctccactttataacctttctttagcccacatgaagaataaagtgcaaaagtaagccacaaattcttgacatgttttcaaaaagaagaaatcagtagagaaaggagaaaaaaatcaggaagacaacaattagcgtatttatcataaatgaaggaaataaaacatcgagactaaaagaagactcaagtgtttcatttgtacatcttctgagataaaaatagctggaaacggcaactcacttcactggcatttttcgttccactgtctgtcacagatgatgccgagtttctctttctgactgatcttcaagctgaaggtaatgtgacagcaggaacattacaattagtatgcgaatacctatcccctgggttacaaattggcattctttaaattctgctattctcagcttttttatttttgttattaacttttcattggtcaaaacacttaaacttctaagtaataaataactctttgaataaatgtgacatttctctgagtctgtggcataattgaaataaattccatctgaaagttttttctgaagttcatattcatctgtttgcaagacaactattgttcacaggaggttaaaccaatatataatgatatacatattataaatatacatatttataattaatattcacctttaagtctttaatctgcctaagagatcattttgttttcctttgttctttgattttcagagaatctgaggagggctctacctttagtatacttatcttaaacaactatatatgtttaactatttaagcaattttattcatgaactaaaatgttctaatataagacattgcagttttctttgaaatttatgcagtttttattgcttaataacatacatttctctcttttaaccatggatctcaagtcattttatgccaatatttctttatgcaatatgatgtttaatgtaataaggctaatatatttatcaaaacaaagaccatatattggcaattttaattatagttaaagttttataacttcatgctttgtcaagcttttatctcaatgtaatacagttctttggtagtaaaattcaactggtatgtgtttatgaccctcaatgtcaattaaaaactcttgaaagattgacaatttttcaggtgggagaaagaaagcagtcaaaagaaggtaaaaaatgttcttctccttgacttaccgtggaaatgccctagttgatctatagaaatggttagtatcagtggccctggactaatgaaactgagagaagtagaagaaatgacctaaaaagtcggtgtatcattaagaagggaaatcatcaatcagcacgatcccttttgttaattcaagcaccattaagtaatgttcttaggataagcaaaaactgaatcattaaacatattttcactttttgttttgctcaggggggataatgaagtattaattttataatatatgcttgaaaatagtacagtttggaaaatacactgtcaaaatttaaagaccctcttggttaaaaaaaaaaaaaaagg

SEQ ID NO: 1679 - DNA, 1907 bp, Homo sapiens
  misc_feature (24)..(24): n equals a,t,g, or c
aagtcatattactaaaagtttttnccgttcaggaggagttggtctcacttttttgtgttcagatagtggagaactgtgctcccgttctagggccctccctcctttctctttattaacttctccccacgggagaaagaatggcaaattggaaagctcggggcttgacattaatatgagtgaagtcactgtatttccacatggctttcgttcttttttttttttttttgcgggggaaacaaggggtggaggcctgcagaaaggtgccagctatcctctactttttgcctgctgtcttcaggcaataaggagattagggaggtgttcccctggcaggcctaatctggtctatacttcttctagtccagcctttgcctggacaggtaaatcagttcaggtttgctctgtgaacctggccaccttcaggtctggaagaagaacataggaagccctgctgacgtcaggcttaagctgtattctccagcacatttaccagaagcctctggggttgtgtgtgaccatgcctcgaataaagcccatgttctgatccccatctgtctgtcagatgttatttgtggatgttatttgtggttatgcccagttggttagaacctagaaagtgataaaagtgagccatgcagccgggcacggtggctcatgcctgtaatcccagcactttgggaggatgaggtggatggatcacctgaggtcaggagttcaagaccagtctggccaacatggtgaaacactgtctctactaaaaaatacaaaaattagctgggcgtgatggcatgcgactgtaatcctagctaccgggaaggctgaggcaggagaatcccctgaacccaggaggtggaggttgcagggagccgagactgcgccactgcactcaagcctgggcaacaagagctaaactctgtataaaaacaaaaaataacaaaaaaactagcgagccctacagctgcaggctgaggttctagttttggcaataagctaaagtgtaaataattttacatttaaaactatggaacaaatagaggtgggacatgggctgcccctgcccacctctccagccagttccccgactcttcgtcttctttctgctgcatgtggtctgaccatcttagttctcaagtttgmcaaactttttttcagccatgtgtcctttgcctatgctgktttctctgctaactttctcttttttttctctctcttacttgctgcttttatggtcaagttctaactcttcaagcgtacacttaaatagtaccttctytgaccccgtaggctaggttgattgcttcagtgtactaaggcaaaaataccctgagtatctgtgctcattaacctctgtgtttcccttttgtaagatttatcacaattgtaatcaaatatttatgctatgatatattggttgcctttctagattttctaacagtcttctttgcattgttacataaagtgtttagtgcagagctgggcactcatatttggtgcctgagggagatttgttgagtgaataaaatagcagtgtccagcagcgacatagactgctgagatatggcatgtcagagtctgaaaggctctgtccagttggcaagtggaattcattggatgttttacaaagaatagttttagtaaggkggtggggacggaagtgagtttgcaaagtatcttataaaaagctagacttaattactcatttacgcaacattggaacccttacaagtgatttctctrctgagagcaacttttcttgagttttactaactcagtagacactgtcagaatctgccagattacaacaaaggggtaaaaattcctgatcacttgaggkcaggaattcaagaccagcctgggcaacaaggtgaaacccgatctctactaaaaaaaaaaaaaaaaaaaaaaaa

SEQ ID NO: 1680 - DNA, 1639 bp, Homo sapiens
  misc_feature (1623)..(1625): n equals a,t,g, or c
gaactgtcagactctcaagtaaaagcagccagaaaggggaaaaaaaggtaacagattcagcattgtccaaaagttccagaccagtgattaatgtgtaagataatggacttgggaaatgagtaaacactccccatgctccctgctttgtgcttgaacgacttgatgacaagggcagagcaaggtgagaatttaaacaggaccacaggaaaaaaaaaaaagacaaagactggcaacaacataatgcgagggagggggagtttactggtttgcagtctaaaaggtacataataactttcttcaaagcaggccttaacagtgtactaatttaaacttcaacatgggcatggaattacccgtagaaattatatgccactcagtcatcttttaatataccggatatttatatgtacttgttttcatttatttgttgttaacttccttcggcagacccattaagcatttagatacatatttgtgttcagatgtatcatcctcagggaaaggagatgctgtattttgattaagtggtgcatttcaaggtatttcaagctattcttaaataattatataggcacattttagagtattcctccataaaaaaatatttgaggatctggatgccttgctagctgtcgcactgcatttcttagcaatctgtcatcacttgaacttacacttttcttgatcacattgaagacctttyatatgtataaaacatttatttactttgaataaaacttgttttgtttccaggttctcactccctgtatttctttagacacctacagaggtgttttccagggatctctttttataggatcagtagcttaaacatgttaattttgtcagtgttttacataaaaatctatttctgctctgtcaatctgttttaaatgcacacatcacaactgacacccactgaggatttatttgkctctaaaaaaatcctgacaatttctctggacaaatgktacccattmccttaaacggtgcttaatgaactttgagcaatggccatggagagactgtgktcacagscctaaatctctatawtgttgtcaggtaatcaagtcttcggtggtcaatttaaaaatatttgaaattatcatattggttctgaatacaatattcatcatttttcttttaatcatagagaggtttgtaattatgtttatgtatattttgtaaattaagtccataatttaaaaaatcttgatattgcatcttcctaaaggcacttcagtgattcaaccctgaaaagcatgataatacagaaatgccattgtgattatcaacaactggattgctactttcaaagtacctttaaggccaggcgtggtggctcacacctgtaatcccagcacgttgggaggccgaggtgggcagatcacctgaggtcaggagatcaagatcagcctggccaacatggtgaagccccatctctacaaaaatacaaaaattagctgggcataatggcgggtgcctgtaatcccagctactcaggaggttgaggctggagcatcgcttgaacctgggaggcagagattacagtgagccaagattgcaccattgtactccagcctgggcgacagagcaagactctgtctcaaaaaaaaaaaaaannnaaaagggcggccgc

SEQ ID NO: 1681 - DNA, 1858 bp, Homo sapiens
aattcccgggtcgacccacgcgtccgctggtctgatctcagcgctccttggtctgcttgcctctcccaggacgcctgcacattacctctccatactgcagccctttatatggaaacttcctacatcactttgctgtgtgtgtttacacatgtgggttttgctgtacttgccctgacagcacacgggagtgcaggccacaccccaacccacaccaactgccactgaagacagagccttggtgggcacagaaccaagaaccccacccctgccagcacctaacccttgagctaatgctgtgcagataaatagggaccttcttataccctgagtgaccacagttgctttgaggggcacagagaaggcaccatggcctgcactggccagcagcccaccctgaaccaacactacctccagtgcaacacacacacagcaggggacccctggcccacaccccagctgtcttgcctccaccactgggtgaacgccctcagggaggcagggaattttgcatccactagcattctgccacagttgccacactttggtcccctcagtgcagtggactccaaacctccaagagccagggaacaaagttggggcccaagacaagttccccagatttaaagcacacagtccaggaattgggagccgcacattggcccccctaaaatcctccaaaaacaaagccagttagttgaatccaccttatcccacaatgaaactctcaagatcatcaaatacaataaaagaaaaatactctgtccgaaagtcagcaacctcaaagatggaaggtggataagcccataaagatgagaaagaatctgtgtgagaacactgaaaactcaaaaagtcagaatgccttctttcctccaaatgactgtatcaactctccagcaagtgttcagaactgggctgaggctgagatgtctggaatgatacaagcagggttcaggatatgcgtaggaacaaagttcactgagtgaaagaagtatgttgtcatgcaatacaagtgagctaaaaatcattgtaaaacattgcaggagctaacagacaaaatagcaagtataaagaagacataaccgacctaatagagctgaaaagcacactacaagaattttcataatgcagtcacatggtgattatgtgtgactggattatgaaaattattgtagtgtgtgtgggcacccgagattgccctgtaagcaggtgtggccagacaggggtcctgggagaggcaagcagactaaggagcgctgaggtcacaccagttccatctcatgtgcaagaccacccagcagaatagaccaagctgaggaaagaatcccagagcttgaaaactggctttctgaaataaaacaggcagacaagaatgggggaaaaaagaaggaaaatgaataaacaaaacatccaagaaatatgagattatataaacgaccaaatctatgactgattagtgtacgtgaaagagataaggagaatggagccaacttggaaaacatacttcagaatatcattcatgagaatatccccaacctatccagacagaccaacattccaattcaggaaatccagagaatctcagtaagataagccacgagaagatcatccccaagacatataatcatcagattctccaaggtcaaaatgaaagaaacaatgttaaaggcagctagggagaaaggcagtgtcacctgcaaagggaattccatcagacttagcagacttctcagctgaaaccctacaagccagaaaagatattcaacttcttaaagaaaagaaatttcacgtagtatggcagagacagatataccatataataacatggtgttattataaatgatttaaaaaaaaaaaaaaa

SEQ ID NO: 1682 - DNA, 1036 bp, Homo sapiens
aattcccgggtcgacccacgcgtccgagttgataattattgaatgtggataatgggactgttgtatatacttgtattctataattttaaaataagcataaactctcaaaaatgggagaggaaacggcaacaagattttggaagctggaggcaaatatattagtggtaactgatttaaccaacctgagagggctgaatcttaggtcagcagtgggaaaggcaaactgctttgctttacagatttcccaaatgtcttaggaatttgtgacatcaggaacctctggaagtgggtgtataaggatagaagctttcattcaaagcggtttaaaaaaaggccctaaataccctcttcagttccatgtagccaggatgaaaactgactcaaaattttttctctggaaagagtaaaatagaagtctggattgcactggtagttgagttgtagagctactaaatagggattaaataactgtgtgcattctggttgttctattactcaaggaataaaactaaagggcttgccccaaacctaaagataattacaggagaaaaaaaaaaaacccagccagttacccttcagtgagcccacaatcactatgctccatcccttcagtctccctatcaccttttttatttgtcacacttaaataagagcaaaaacagccaaggattatcaggcatctcaggaaagtctctaacatgaaagagagagacaaaaaaccattggctgggcacggtggctcacccctgtaatcccaacactttgggaagctgaggtggccagatcacttgaggtcaagagttcaagaccagcctggccaacatggtgaaaccccgtctctactaaaaatacaaaaattagccagccatggtgacatgtgcctgtaatcccagctacttgggatgctgaggcatgagaatcacttgaacctgggaggcggaggttgcagtgagccgagatcacgctactgcactccagcctggctgacagagcgagactctgtctcagaagaaaaaaaaaaaaaaaaaaaaaaaaa

SEQ ID NO: 1683 - DNA, 849 bp, Homo sapiens
  misc_feature (844)..(844): n equals a,t,g, or c
ccacgcgtccgtacttttagtagagccggggtttcactgtgttggccaggctggtcccaaattcctgacttcaagtgatccacccgcctcagcctcccaaagtgctgggattacaggcgtgagcactgcacccggcctcacttatcattattaaactctaacatgtgttgatcacttaaaactctcgagttgtactgtgtgacatgtgatagctaccttatttcattacttcatttattcccttgaggcttggagactgatgtgtgagggaggagtctgagggctcctgggccctcgcccatgggagctgggtgcgtggctgtcctgttgttaggacaagctgcaggagagactgtgtttccttggccatgtcccgtggggcccagcatgatgtcctgagtagcagaaagatgggtgagggatgggctgcctggatgatgactggctgatgcatttctgccctcagttttcaccatggccaggatctcttcagagtcatgattcaatggaatttataccaagtgtgccctgatttgggggtgtttctcagatgatgtgtagtgcccccactcagaggagccagaagccaaagaaactcagatacacttgattctctaattcattctctcacaggaattgtcttctaaactgcaaatattaaacagcgcagagaatggtctcacaagctcagaagggatctgggaggaaatgaactgctaagagggttattttcagctactttcacttactgctttaaactgtgcttctattgtttgaggtttttgcagtgagcacatacgacttatataataaaaaaaattccattttgaaaacaaaaaaaaanaaaaa

SEQ ID NO: 1684 - DNA, 1759 bp, Homo sapiens
ccacgcgtccgctataatcccaacactttgggaggcccaggcgggaggatcacttgagaccaagagttcatgaccagcctgggcaacatagtgagactcagcctctatttttaattgaaaaaaaaaaaaaaagcctgatgcagtttcatgttaaataatcagtattttttgtattattctgtctctcttcatcttacaaaaaaagtagctttgaaacaactaatatgctcttttttctttgcttctgctttcttcagctcttccatgtctataaagccaaccccttctgctcagctcactagaacaccttttccatgttatgaaattaagtgttgccacattctagagttgcaataaaaccaattgagatctttaatctaaatttgttgtaattttgtcctttgacactctgtaaatacggttttataatctgtgttttttccccactttatactatagacatctttcttgttaataatatatacttactaaatatgatgacatagaatttcattgtatgggctgtaccataatttaccaagccaaactcctgttagacatttagatttattctagttcttagctgttaacagtgtgctagaaatgctgtatgtgtgtgtaatttcacatatatataatcatttacttatattactagaatttattgttaaattctagacctggaatttccaggtttaagagtatgcacaatttatatttttaaacaccttgataaattgtccttcaaaagttgtatcaatttgtagtctgcttacatggagaaaattacaacctgctgtttttccactgatgtagtattagctttcactgagaaaatgaattggatgttttcttttttttcttcctaaatctcatatgtggtggaaagatattttcttttaaaaacacattctcagactgggtgcagtgtctcacgcctatgatcccagcactttgggaggccgagatgggtggatcatgaggtcaggagttcgagatcagcctgaccaacgtggtgaaaccccatttctgctgagaatacaaagattagccatgtgtggtggtgcatgtctgtaatcccagctactcgggaggctgaggcaggagaatagcttgaacctgggaggcagagtgaggcaagatcatgccattgcactccagcctgggcaacaagagcaaaattctgtctcaaaaaaaaagcggggggtattttttagtgcagagctccccaaagcctctaacatacttccaaatagaatgacttaagcaactcagaagaaaagtttttcagaaagacaaaagcatttatttgcaatagaggcaagagggcaacgggttttcccatgctcctgctcaatccctctcccagatgaacagatgatgtcttgccatccttaaacttcattgcaaagaaactggtttcatccacagctcccttcacattcccacccaatcccttagcttccattttggaccatgggacttgactcatagactggctatcaacctgtaacacagccaggtataaaaggatgacctgagcttgggcaacgcagtgagactctgtctctgcaaaaaaaaattttaaaaattagccaggtgtggtggtgcatgcctgtaatctcagctactcaggaggatgaggtgggaggatcacttgaattcgggaggtcaaggctgcaatgagctgtcattgcaccgctgcattccagcctggatgatggggagagaccctgcaaaagaaaaaaaaaaaaaaaaa

SEQ ID NO: 1685 - DNA, 2220 bp, Homo sapiens
ccgggtcgacccacgcgtccgcccacgcgtccgctaaaattaaaatatttctctgagcctccttcccttgccacatcagtggcctgggcttgcacttctaaggccaaaagcacaggcataaatattttgaggtgtcactttaaagagaacatgcatacatctctgttgccaccttaactttcctcctggcatgtgcccaggcagagttcagggcataccacaaatgcactcagcaatattcagggcctgatttttggaagcctgcttgaaaactcgcctgtaatttaaaatagtgagaccagaaattccagaaagtaccctagtttttgggaacgcctgatggcctgcacatggactcaatcctgattttcaaatggcaaaagctggggtggggggcatttaaaacttgctttttaaattgtgtgcttacttatactatctggtgttttatttgtttattttttctaacaatgtctcgaaggccatgagtctttaggcaaaagctgcaatttggaggtttaaagcaaagatgataaacagcatctaatcatcccattaacattttaccacttttctctctttttaacccaaagatccaacacagcaacaatactaattgatatggaagagtcaggccgcaaaggaggagagagaggtacagatagagcaaacctttgatgtaaggtcagggtcaaaaatgctggggctaggctgcacaggtgtaaagcctggcctggtcacttacccacctagtatgaccttgaacaagtcacttagtgtctctaggtctcagcttcctcatccatagacgtggatgtgatagtaatagactctgcctcaaagggctgtaggcagagtaaataagctaatacatgtgaaatgcttggaacagtgcctagtaagtacatggcaagcacaaggcaagttagcttggatcctcacccagtgctgcctcacttaattcactggccctgtgtccctgtttaacaatctatacacaaaaagtaagtagaatggcctaaaaaggcaaactgcctcctcaaaccaacaggctaacagagacagtgagaatggcacttatgggcatgcaaagagccatcaacgttgatgggtatacagcagatataattatgcaatattgccattaggatgccagaaagaaaaagcatgaataaattgaaatgttaatgacttcaagtgttcaaggaaatattccatttattatggaaaacaaatgaaaggcaagttaacctgtcatttctcctactcagagttagttcatcatgacttcatgtacggtaggatcgaaacaatttatggaaaatactaccaaagaaattaagataatgtcaatgcattacatattgccactggctctgagtttctcttcctaagctatcatccccaaagctttgatagttgtttgcacaagacagtttcagcaagaactcttcaaaaggaccctacgcccaagttctgtcagagaagtgaagagtgtcatctggaggaaaggttcagtgctggagagagcattctgctcagtcataaagcctgttaaaggaaggttaagaaggaagaccaggagtagcacagatggattctacagttctattcatctgcatttccaggacatgttgactggaccaccaggcatccagtttcgacttgttgggtcttgaggcttgttttccttgtttgtaaaatggggataagaaaataagaagacgaacaagcaggtcatggtgagaattaaatgagataatagatgtagagtgttggatgcagttcctagtattcagtattcagtacacagtattcaggaaagagtgtcaatatcattaatattaataagatatgtaaaataatttatattattaatattatcccaagcacttgagagtttccctgaaagataccaagaattctgagcagggggctggttcacaactataatcccagcactttgggaggctgaggcaagcaaattgcttgagctcaggagttcaagaccagcctggccaacatgacgaaaccctgtctctacaaaaaatacaaaaattagccaggcatgatagtgtgcacctgtaatcccagctactcgggtggctgagcatgagaatcgcttgaacctgggaggcggaggatgcagtgagccgagatcattccactgccctccagccggggcgacaaagtgaggctctgtctcaaaaaaaaaaaaaa

SEQ ID NO: 1686 - DNA, 2702 bp, Homo sapiens
ccacgcgtccgcggacgcgtgggtttttcgaaaatatgcagaaatttgtggtaattatgtatttgtgtcttgtgacaattatgttttatagacctacactagtgccaggtcactattgtaagatgttaaaatctcaagaaaatttcacagagctaaagaaatgatgtcaaattagtcacattaagctatagtagaaggaattggacacttctccagatatttggcttcaaaggagtacctttacttacatgtgctttatggtaagtacattgaattttactttaaatgcattttactacaaagcacaattcatttgtaatgcatatccatcttggattcaatccaaggtgctttagctatcagtagtaccaaaggatctttttacaaggcttcctgtggtattgactctgagaataacacatagtgaagatctgtgggcttttaaaattgttcacagccaatttaagaagacccctcatgaagtctcagttttcagtacagtacatcattcctcctcactaggagcactttgatgtaaaccagaatagctttaaaaagacaaaaaggatcgtagatctgatttttaaatggttggttgctctgacagatctgaacactttgcttcatgactatttcgtcataaaggtatatgtttaaaatctgaatggcagtactagctctatacttttaatactgctttgtattttatatgtaaagtagtattgctgacattttaaaaaaatacaaaatacaaaagaaaccattagaaattaataactgtggctcttccagttgaaataggaattggagagaaaggattagaatattttaattaggggagtagattattgtccaaaggcttttatttagagaaacgggtaattaaaacagcagctttagaatagcttcttactgaatatgcaaaagaataattccttgttatttcctaattgatccaagtctcataaatttagcttttgtcataattccttaccgaaaacaactgaaattgagagtcataaatactgtgggttagaataaaaaccagttgccaaagcaacactctacttagaagcacatgtacatacatggacctcattcagaagtccatgttgtagcagttagaatttgagtatcagccatttcattgtagtaacaaaaattgaattgcattttgtgctcagttgtttattgtaattttatttttgttacattaatattagttaagatatggtcacttgaattttttgtatttaagaattttctgttttaatgcatgttatacttttatgtaggattccaaaccttccctctaaatgggatttaacccacatctgcgagatcagcgttatgctaagaggaaatcactgaggccatatctttttacaatctgaaaaaaaagtagtaaaaaggtagttaaaaaaaaaaaaggccgggtggtggctcatacctgtaatcctagcactttgggaggccaaggcaggcagatcacttgaggtcaggggttcaaaaccagcctggccaagatggtgaaaccccatctctgctaaaaatacaaaaaaaaattagccgggcatggtggcacgtgcctgtaatcccagctacttgggagactgaggcaggagaattgcttgaacccgggaggcggagattgcagtgagccaagatcacgccgttgcactccagcctgagcaacagagcaagactccatctcaaaaaaacaaaactactttcattaattacccattatttattttagttacttaattttgagttcataaatggccaccctaatggaaagtttgggtatgatcttaggttttatggagatgttttcaatagagattatttttccctcaccctatttgtgaatatataaattaaagtaagacaatggagtaagtaagagggtagatccaaacacagtatgtctaaattctagcactctactggctgcttagaatacaccaaacctggaagacctttccaagagtaaaatcccagtctgccactatcaaaattgccacagtcacttttactacttgtgttcatagtagactcagcacttctttttcactggacctagtataactgagaaataaataactgtgtgcaaaatattggtatcattaaggacccagagctgcccattttctctttggtctaatagggaagcaattactgatagaaatgtgagattaaaaatagggtcctccctgctgctccaaacaaatgcctaaacacagtatgtatctcagtcctctgttcccagagattccaccctagcccaggaaagaactggcctgtgtaagcaaaacccaagtcatccccctccagaaatttctctggcagccaagcctgaccctaagggttccactttgctttaaaagctaggagtggcctctagagccaggaacacattaatacaacagttcaacctcagcaccaagtcaggtacgaagcgcttgatacgtggaatttttctctatatcaagtttaaatttctggaaatagactttggttgctaatgacaattacagttataccatagtctgtaatttgagaaaaggtgaaatgtatttaatatatatttagttttaataaaaagataaaattattacagaaataattgagagagagaaaatctattataatttatttgaaaaataaaacattttatccagtaaaaaaaaaaaaaaaaa

SEQ ID NO: 1687 - DNA, 1785 bp, Homo sapiens
  misc_feature (936)..(936): n equals a,t,g, or c
  misc_feature (1004)..(1004): n equals a,t,g, or c
  misc_feature (1730)..(1730): n equals a,t,g, or c
  misc_feature (1750)..(1750): n equals a,t,g, or c
ggcagtatgactatagggaggctggtacgcctgcaggtaccggtccggaattcccgggtcgacccacgcgtccgaaaaaaaaaaaaaaaagagcagagaaaatgataaacaacttgcaggttgttgtgtggtataatggtcattcattattttctactctttctggtaaagagttggtgtgtcatggaaagtacctgttctatgtgtgtgtgtctgtgtgtataattcggtgtgaaaattaaagagaaaaaaacaataaaaaaccctttcctatacttatgtgtaaattaccatggtgtgctgcaaaaaacatatgtcaaggtgatagaattattttgactttcctgtacagttataaaatgactcagtgagtttggttagatatcctcgttctttgaatctatatccttgtctgcttatgatgaaaaaaaagaaaaaaaaataatggcgagggtcttccaaactctaaagaatatgtcaactatgatacaagtagcagttagccttataactaactgtaaacactgtctgtgggttttaagttttacctgagcattggatattaacagaccattagcccaactttcaaaaatatgaaccctatgaacttcacaactgaagtcagatctgtatgcctgagagaggtaaaatcatgtcatgaaatcaaacggtggctgatgcgcccaaattctggcctcatcctctaactggaggacatctggcaggacagcaactgggctgtgccttttttcagtccagcaacatcttccactcaacccacgccatttggcagtttccccattgcccctggcacctagccctccggtaccgggaactaaatatctttgamcatcccgcccgcggggtctgcctacttaacctgaggcaggtgaaagagcctcacgcagggttaggaactccgggggsgtggcgtancgtaacgcartgttggggaaacttgcggstgtggattgggggaccggaaagggaggggtgggccscangcgccggacgtgacgtaagccggaagcgactttccgccgagaaataaggggcgcgtgtttggaaattgatagaaaagataaagggaccgagctgctgtcagcctggcttactgatctgcgtccgtttcaccacggattcagttactaagcatttttttctttttttggttctttgcaacgtgagtggcattggctcagtgatttccatgagcatctctaccagaaaacattgcctcgatgaggtgtggtggaagcccggcagccccttctaatcggctaggcttgagaaagcgtgtacctctgcatttccgaaattaactcagcgtgatcggcaagattttcctcagcatctggtgtcaagacactcgtcactattaattcggaaaraaaaaaaaaaacaaaacaccgttttccagcatttctcttggtggagaactaaacaacaggaaaaatgtctattttccctaagatatctttgagacctgaggttgaaaactatcttaaggaaggctttatgaataaggagattgtgactgctttaggtaaacaagaagcagaaaggaagtttgaaactttgttaaagcacctgtcacatcctccatcatttacaactgtcagagtgaatacacatttagcctcagtacaacatgtgaaaaatctgtttacttgatggaactttcagaagtttaatgggttaagggttcccattttttcaacatccagacntcaagatgggttacctattncccgttatttgggccccgaagggtttttaaaacca

SEQ ID NO: 1688 - DNA, 1162 bp, Homo sapiens
ccacgcgtccgcccacgcgtccggtgagaagctagctgagagaatgctagcagtgttccttcggatcaagttgagactagctggtacagttaagcctaagtttctttttgtttctttccttgcccctctcatttttctagactttgagaaatttacagtttggtagttaaggactatgtttgcaagcctaattcaaagcttttggggaatgagttgttttgttgtgcaaaagacaaataggaagtatatgactgtatgccttataggaatagaaggcagcagatagtatagctattttccatatggggaaactgaggcatgggagggttacttaatgaagtccctgatctctcaagaggcaaacattaaaaaaaaaaattagagaaagacgtcattatttgaaaatagaggtgagccctcctaaagctggtcttgagctgtttcacgtgttagtgctggcaggaggtaaccaggacggcctaaatcttgctttctgaaactcgttcatcaggcatttcctgagtggatgtgagtactgagatacatcatcagttctcccatgtgccacgtcactgctgacacgtccttagaaatgtctgatgtggtgttggctgatcttggtattgatcagttgtgaaagtggaagaggcatgagaagagacacctcttggggcacgctaaaatgacatatcgtgggggtccctggacaactttttattaggactggagccagccctaggaatatgtgttttaaataagtcttttaggtgattctgacgtaggtcatccaggaactcactttggaaagcattgtactagacatgaaataggagtggctggatgaaaaacaataaggaaaatttgccccggtgctgtggctcatgcctgtaatcccagcactttgggagacagaggtgggaggatcacttgagcccaggagttcgagaccagcctgggcaacatggtaaaaccccatctctacaaaaaatacaaaaaattaaccaagcgtggtggagggcacttgtagtcccagctgctcgggaggttgaggtgggaggatcacttgagcgtgggaggttgaggctgcaatgaattatgatggcaccactgcactccaacctaggtgacagagatcctgactcaaaaaaaaaaaaaaaaaaaa

SEQ ID NO: 1689 - DNA, 1024 bp, Homo sapiens
tcgacccacgcggtccgctgacttccatttcccccgaattgaagagcaattagaagttgtccaacaggtggtactttatgctagaacccagcgcaggagtaaattgaaagaatcacttgattctggaaaccaaaatggaggaaatgatgataagactaagaatgctgagaggaactatttaaatgttttacctggggaattttatattacacggcattctaatctctcagaaatccatgttgctttccatctctgtgtggatgaccatgtgaaatcgggaaacatcactgctcgtgatcctgccattatgggactccgaaatatactcaaagtttgctgtacccatgacatcacaacaataagcattcctctcttgctggtacatgatatgtcagaggaaatgactataccctggtgcttaaggagagcggaacttgtgttcaagtgtgtcaaaggtttcatgatggaaatggcttcatgggatggaggaatttctaggacagtgcaatttctagtaccacagagtatttctgaagaaatgttttatcaacttagtaacatgcttccccagatcttccgagtatcatcaacactcactctgacatccaagcactaaacccttatagattgacatgctggcagaagatgattgttaaactctccaggaacttgtgctatgctgggaatctgtcaagcaaaagatgcccagaaagagaacttgcagctcaatccacaaatcaagatacatgtgtgtgaaaccattccaaaaatttatatactgcacaaactggtgatcaacccctaacttaaacacttaaagtctctttatgaatttctctttttttcttctctgtgttacctgtgaatattagtaatctaaaactttttatttatcacacatggacacttgggaaaggaaacttgattatatttacatggaggcatttgactttttcaagaggcttgactcgtctcaggtgcaatccttaattaaacatacaaacaaaaaaaaaaaaaaaaaaaa

SEQ ID NO: 1690 - DNA, 2191 bp, Homo sapiens
ggggtccgaccccacgcggtccgcgtgactttccatttcccccgaattgaagagcaattagaagttgtccaacaggtggtactttatgctagaacccagcgcaggagtaaattgaaagaatcacttgattctggaaaccaaaatggaggaaatgatgataagactaagaatgctgagaggaactatttaaatgttttacctggggaattttatattacacggcattctaatctctcagaaatccatgttgctttccatctctgtgtggatgaccatgtgaaatcgggaaacatcactgctcgtgatcctgccattatgggactccgaaatatactcaaagtttgctgtacccatgacatcacaacaataagcattcctctcttgctggtacatgatatgtcagaggaaatgactataccctggtgcttaaggagagcggaacttgtgttcaagtgtgtcaaaggtttcatgatggaaatggcttcatgggatggaggaatttctaggacagtgcaatttctagtaccacagagtatttctgaagaaatgttttatcaacttagtaacatgcttccccagatcttccgagtatcatcaacactcactctgacatccaagcactaaacccttatagattgacatgctggcagaagatgattgttaaactctccaggaacttgtgctatgctgggaatctgtcaagcaaaagatgcccagaaagagaacttgcagctcaatccacaaatcaagatacatgtgtgtgaaaccattccaaaaatttatatactgcacaaactggtgatcaacccctaacttaaacacttaaagtctctttatgaatttctctttttttcttctctgtgttacctgtgaatattagtaatctaaaactttttatttatcacacatggacacttgggaaaggaaacttgattatatttacatggaggcatttgactttttcaagaggcttgactcgtctcaggtgcaatccttaattaaacatacaaacaaaattttccttttactttctttgccaaaacaaaatgtaaaagcactgaaatatacattgcaagtacaaatttcctgtgaaaatctttttatagaaacacmaatgtataagacmaatgtgctkgtycttttaaattctcctgkttcagaatctctttttaatctactcctaaggatgtacaagttagagtcagaagacgttttggattttttccctctctctcatsctcccgctgtgcccttgcacttgcatattaataacatttcatggactgggaaatagtgttcttttttgcaagcttgatgtcaagttagtctaaaccagcacctggcagtattttagtgctcatcaacattgtgacaatcacacaaggaagatcatttctacatttctgtcctccctgcgttctcagcttgcttaaccattcctctacctcttgcatttttttgcggataaatgtatccccatttctgcttctctgtttcccctccttttccattgtttttccttatggtactactttctcaggtgctacatatcatatatttgtcccatctataacatatttaaatgctataagtagtaactccattaaacaaaggcatttacaaaagcacacaggtgtttagaaaagcaatagtttcatcaattccaagttatgtggatattgtaactggccacaagaatgaaatggagggcatttggtgtcataagatggcatgtcttgatgacaagaaacaaaacgcccttcattaatatgcctcagtgtaataactattatagaaactgttggcaagcagagtgctttcctataacagaatgtgtcttaattttctactcgagggaaaggtttgtccaggtaacaacactaaagacaaccctaagaacacccactccagcagtatgtccattagacactaaaactctccaaattatttgtcagggagcctggcgattctgccaagaaggcaggtgttttgcccttagagcctatacagttctcttggagaaattgtctttcaggcaccactgttaatcactgagactgattctaatgcaaagcagggaagacagaggtgacaaaggaagagttgggcagcagcattcaacaaacatccgtgaatgaaactttgctcctccattccgatatctgggctgcactgatctcgtgccgaattc

SEQ ID NO: 1691 - DNA, 1103 bp, Homo sapiens
gcattgataatattggtcctattaagtggtggtgtagagaagtattcacaaatttcaaaccaaaaaattatgtgaatagtaggggaattctttctgtacccttgagttattttatcactgttgtgwttacaccttataagamaattccactctgagaatgagcacaaggaacagataggaaatgtgcagctggtgctgatgtgtagccctgcgcccttcaaatccatgtgtgcaggcagtcacttcctcagtcattagcttttcatctgaaacaacaaagctagtggtaggcagcttctgagatggttcccagtgaagcctgcccgctggtgtgcactcttgtttaacctcctgtccttgggtgtgagctgcacttagtaacctgcttctaaggagtagaacatgggggaagggagagagcacacctgaggtttggtggcagaaaggctctggcttctgtctcctcgcccactcttaactttcatgctttcctgctcagaaggtgaggtgttctttggaaaggcccatgtgacaagaagcagaactttccagccgacagctamcatggaactgaggccctcattccaacggcctccaactgaatcctgccaacaagacatgagtttggaaggggatccaccccagtggaactcctgagatgattgcagccttgtgagagacaaaccaagatgtttgtttaagtgctaaacgtggggataatttttatgcagttacagataactaatacaaagctagaaaaagaaaaaggcataatacaaatttcagcatcttaatgagtctgccagcatctgaagaactgaaataaggcgaactggtcttcctcccgcatgagcacctgtcagctatcttagtcttaccttaaataaaaacacttaaccaaatacattatctctctcaaggacagcaaaagatattgaaatttgatgattctgtatttgaaatgtaaatcagattacaattaaactctaactcttgaatactgtcccttttaagtcaccaaatctcctttgagtaagatgaaattatctaaaaatgaataaaggataaaatttttaaaaaaaaaaaaaaaaaagggcggccgc

SEQ ID NO: 1692 - DNA, 1658 bp, Homo sapiens
  misc_feature (778)..(778): n equals a,t,g, or c
ggtccggaattcccgggtcgacccacgcgtccgagcacgtcatagccaccatacggagaagagtccagttccttttccctgggaacccccaacccacactcttcatcaggcaggtcccctggctcatgaatgcagaacaatcaccgcacccatggctgagcgtacccactggtagtggcctggagtttccctagggagaggctccaagaggcatatggctgtccctctgccactgccacagcaacagttctatccctacttccctcagcctggggaagaaacaaagagcctgaggcctataccaagtttacagcacaccacagtcaccatgtggagaagagaccaatctctcctcctagtgagccttcaactgcctttttccccagtaagtggaaccccacgcttcatgccagcagtgcagccatgccaaccccacagactgaacactcccagtaatagctgctctgtgtttcttgggggtggagcccccaggggcaactaaaagcctgtctgccattgcctctgatgtggtactacccctactactctcagactaacaaaggagcaagaaaataaatgccttatccacacttccaacaagctgcagtcaacccaaggagacgaggccagtctgtgtcccatgggtcctgcccatcccccctgctcatcaccaagcagggaacccacaacttgggcacagagcacacactctctatccttggctgattgcactgtgaaattgctgacctgcatctctctggggtggagcccccagganacaagcaaaagcccttggccacaaccattactaaggtccctttctctgtcctacttagggaggaaacataaaccatgagatcacctcaaagctgtagtgggcarcctgggagtgctaaactgcaatgtacagccaacattcatgtgggagargagcctacactttgagagctttgacagggagcatggttgcaactgtgaggaaatataggggagccacaagaacttaccagctgaccactacacctaagtgtcacctacaggataacattcgaaagcttcaacaccaaaaatatcttactgacatacacccctgcgaaaccaaagatgagaagtcagctacaaataaaggcctgcacgaagccatggccttgtgaaaacatccagaaaataagtctattgaaagtaaacaatttacactgtagttaaaggaacacctaaacmcagaagtgagaaagaatgaatgccagaattccagtamctcaaatgamcggagtgtcttatgtccttcaaacgaccacactagatctccaacaagggttcttaaccaggctgaattggctgaaatgacagaaatggaattcagaatatgactaggaatgaagatcattgagattcaggagaatggcaaaacccaattcarggaaactaagagtcacaattaaataatacaggatctgacatatggaatagccggtataaaaaagaacctaactgatttgatagagctgaaaaacacattacaagaatttcacaatgcaattgcagggattaacagcaaaatagaccaagctgaggaaagaaactcagaaattgaagactggctctcttaaataagacagtcagacaaaaataaagaaaaaaaaaaaaaaagggcggcc

SEQ ID NO: 1693 - DNA, 1167 bp, Homo sapiens
ccacgcgtccgcggacgcgtggggtcccgcccccctctcctcgctgcttaggctccgcggcctccaagctgtagctatgacggcgcgcgggactccgagccgcttcttggccagcgttctccacaacggactgggtcgctatgtgcagcagctgcagcgtctgagcttcagcgtcaaccgcgacggcgcctcgtctcgcggcgccagggagttcgtggagcgggaggtgatcgacttcgcccgacggaatccaggggtcgtaatatatgtaaactcgcgtccgtgctgcgtgcccagagtagtggccgaataccgtgagtggggccgggctcgggctggagggcgggatcaggggctcgacccgctatcctccttctcgcttggtcgcaccggccagcttccacccactctcacccctcttctgccagttaacggggctgtgcgcgaggagagcatccactgcaagtcggtcgaggagatctcgacgctggtgcagaagctggccgaccagtcgggcttggacgtgatccgcatccgcaagcccttccacaccgacaaccctagcatccagggccagtggcaccccttcaccaacaagccgaccacgttccgcgggctacgcccccgagaggttcaggatcctgccccagcccaggtacaagcacagtgaagagttgccccaccaactgcagccccaggctttggactgttactccggtaaaggtggttcttcccctttgggattccaagcccaggcaaatggaacccatcaatgggcaagttgacagagttctgcttgggataatgaagaactgcctgtttctttccagtgcctgcttctgggggcagtgaccttgtgaaccactcatttttatgcaagtggcatccctaaaacctgagatgaggaagacttcaagggttttacagggcccttgttttttaaatccaaattgataataatgatctcaaaacacagtgagaggtctgaaggctggcttctgaagaatccctgatgtcttattggaacaaccactgagctacggagagctctgctgtgatgggctaggcactttatatctgtgtgaatacagatttataaaacaggttaataaacttatccaaggtcacaaaaaaaaaaaaaaaaaaaaaaaaaaaaaaaaaaaaaaa

SEQ ID NO: 1694 - DNA, 1671 bp, Homo sapiens
  misc_feature (1050)..(1050): n equals a,t,g, or c
  misc_feature (1478)..(1478): n equals a,t,g, or c
  misc_feature (1541)..(1541): n equals a,t,g, or c
  misc_feature (1632)..(1632): n equals a,t,g, or c
ggtcgacccacgcgtccgctgacctccaaaacaactttgagacaccttctgagaaccgttagcctgccagctcacagtgtggaaaagccccacgttgaactgttgctcttttgcagcagctcatccctgggatcaccccaggccatgctctctctgctcagcctgtgccttcttaatcctcaggcacctgttttgcctgacagtggtacgtgcaccctcccgttacaaagtggtgtgctgagggcactcagaaccatgaagcatgcatggtgcatcttcctgagtgttaattttcctcactggctattatttaatccactacatttttatagtaaaagttaacatagttctaattatacaccataggttctgtctgtccttctcaacaaaatctttttttttttttttttttcaaacagggtctcgcttcgttatccaggctggagtgcagtggtgtaataatagctcactgcagccttgaactcctgggcacaagtgatcctcctgcctcagtcatgcaagaaagtacctagaactacagatgtgcgctaccgtgcccagctaatttttaattttttttttctggagcagggtcttgctttgttgcccaggctgatctaaaactcctggcctcaagctgtcctcccttctcagtctcccaaagtgttagaaacacaggcatgagccattgtgtctagccaacaaatttttttaatgaccctaattaaacatgttcaattttttatgccaaaagaaaatagatgtactatagtttagaatgtaacatttgtgtacaatttttaaggaaaaaaataagatcaagaaatttaaagtttccatgggccacttagggttatgtctttagtcttcccargattatttggtccctcagctctgaattaggactactttgatggaaaaggttagaactacctatttaagttgtcagatttgtaattctgtattttggttttgttcagtggagctattataacatttttattcagcatggaataagaactggccatgggttggtctctgaatcatcangcttttctggttaaaggtaaacatataagtattttttcttttagccatgtttaattttgaaaaatgtcattaaagtaagcattgctgcattataaaaatgattgacaagtccgggcactgtggctcatttctgtwataccagcactttgggaggccaaggcaggtggatcacgaggtcaggagttcaagaccagcctggccgatatggtgaaaccccatctctactaaaaatacaaaaattagccggttgtcatggcaggcacctgtaatcccagctactcaggaggctgaggcaggagaatcgcttgaacttgggaggtggaggttgcagtgagccgagattgagccactgcactccagcctgctgggtgacagagtgagactccatctcaaaaaaaaaaaaaaaaaaaaaagggcggccgctctanaggatccaagcttacgtacgcgtgcatgcgacgtcatagctcttctatagtgtcacctaaatncaattcactggccgtcgttttacaacgtcgtgactgggaaaaccctggcgttacccaacttaatcgccttggcagcacatccccctttcgncagctggcgttaatagcgaaaaaggccgcacccgattgc

SEQ ID NO: 1695 - DNA, 506 bp, Homo sapiens
aggttcactcgttcagcagacacgcatgggaactgatgctttgagttttcttctgtggggttttccctttctctggtctccgtgcagcccctgccctccctcgggtgctgctggcctcaaaggaggaactcgtggggggagggtgtgatttgcagacctgggtctctgctctgctctgggggtggggcttgctttcacagagaccctccttccctctcacccctcctctcccggcctcgccaggagtcttggctgttggcagctcagaggtgggggaggcctgtggtgtgaggtgccctgcacctgctcctgctcctgtcaccccttcctgctgcctcctccatgcccaaggaacacccatggtgcagtcctcaggcaaggccaggacggggctgaggccctgcgtggagatgctgcaccagcggaaggctgagacccgcttaccttagttcatctgttcactcgtaataaaaagaattctctcaggtcaaaaaaaaaaaaaaaaa

SEQ ID NO: 1696 - DNA, 1721 bp, Homo sapiens
cagacagccgagcctgcggaaggcggcggcggcggcacctgcgatcagcggctggggcaggttatggtagtgcggactgcggtgtgagcagagcggcmcacggggcccgccatgcgccggcggccctgacatgggcgccagcgggtccaaagctcggggcctgtggcccttcgcctcggcggccggagcggcggctcagaggcagcaggagctgagcaagctttggtgcggcctcggggcmggctgtgccccccttcgtattcacgcgccgsggctctatgttctatgatgaggatggggatctggctcacgagttctatgaggagacaatcgtcaccaagaacgggcagaagcgggccaagctgaggcgagtgcataagaatctgattcctcagggcatcgtgaagctggatcacccccgcatccacgtggatttccctgtgatcctctatgaggtgtgaccctgggaggtggcagacagaagcaccccctgccccggcaagaaactcccaggctcaatcaaggtgtggcttccattgaggagcccaggctggggccacaaccctgaataaactctgttggcccataaccttcagctgtgagcgggtcggtcccacagtattggttgggtgttggtttgtgtgtggacaagaggtggttggtgggtggtgaaggctaatggcagagttagcaccccactctcccaagccacccctgcaagcagcacagcagggcatataccagtcaggaatgcccgttacctggttccttgcctggtctgctttcttccaagtttgcctggggcctagccctgctagaggctacagcactttacaagcaaggtatgctttcttccagcccctaggctgtgggcactgtatacaagtaggaacttcctttccttcacttcccttttaacccctagtcagagcatttcagccgtttgctacctcgattcctcctgtgttggacagaggctgggggcagtgccagcctgattcttccgacctacctgccatttgttcccgccttcagatggatggacagtttgctggctattgataggagtggggactgggtgggggcttctccctctacccagggctgggctgatccccctactgcaactaactgttgccccccaaccccgaacccccagttgaggagttgagagagtgcaggctggggtcaggacaggctgcggatgcttgtgcctatggggagttactccaacccacctattctgtctaatctccatggctttgcaccaaatcctccacccctccaattgggaggggactgttcaccaccttgtggtaagggacaacaccctaaggctggtgccagtagttatgagtagcctaccaccccctcccttacagtaacccccaccccttcaggatcagtcaagggaaagcactagaacccctgggtagggaaagaaaggagggaaaaaccataaaaggaatacttataatgtgaaggtttgtaaatagtccatgatgatgtcgtggcagagtctgatttctatatagaggtgactttttttttaagtactgtgcaagctctgtgcttctataatgtgggaaatggcttggggaggatggcccctagcttaggaagactgttgtgttatttgttcaatttcaataaaatgatttgtagatcctgcaaaaaaaaaaaaaaaaaaaaaaaagggcggccgctcgcgatctagaacc

SEQ ID NO: 1697 - DNA, 1994 bp, Homo sapiens
ggcacagcagcgggctaaaaccacgaggggacacatttggcgggagcttgccatgcgtcgtacacttgaggtctgtatgtcagtgcactgtccctgcatcggcccatttaatcctcgcccaaggtcacacagctcacaagggacagatccagaggctgggctcctgttggaggagccacacaccctgagctgtgcagcgtagaccagctcttgcacaggattagtgctcagtaaatggcgatgtgggttgttgctgttattgcaagcagtgccactctgggtttagctaaaataactcatgatctccaaagcaccctccagctctgattgtaggaggggggctgtcaggagctccatgcacacaatatggcagaggagctttgggagactgttttgactggcatctccttttccagcacgttgactggcagctgtttcaaggtctcttgaaagagtccctactccctccctaagctccattctctcctgggtttggatatgctgagagagggtagggaaaactgaaaggaacattgatcaagtggactggatctgttggcaggcaatggagatgtcacccttctcaaagtaaatcactgcaggtcaccattgagacgggacacaccccaaatgaggcatctgagacttctctgccttggggtgaaccaggcgcctcccagtgaaacccctccctgcatcaccctctgcccctctttgtgaggcctgtctccccatccccgcattcctcttgcttcagggacccctgsctcactggtttattgctaccctyctgccttctcctccctccctttccttgggctcgcatccctttgatgtttttacaagccttttttyaaacytgcactcactggtgggtgaatcgcctccctctccttgggagcattagtgcccttcctggcctccgccaagggggagggcggcttttatctcccagcggaatctcattagctttgccgcacaatgggaccgaacctcggctgccacagagtggatttaaattagttaatagcagattttttttttttttttgccccaggcctgttttttccaagtcttggatgctgagcaaaaaaacaactttgttgttgaaaaatgtaaaacaaaaaaatattgaaggtggagtgctttgacaagacggaagatcactgtaggtgaagttctcctgtgctccacagccacccagaggaattccaaaaccagcagtggaggacttggggaggacaggagggaaaacatggcgagttcatcagctctgyttcctttattaaaatatttctgtaattggtggtgggaaattgaagaaatcaagtgattgcatcagcgctggaaaaagctgccagcacttggcagtggaagagaatatatgctttatactggactttttgaaaaagaggctgagtttggccagattgccgaccagcaatggaaaaactaattaggtgccttgcctgtgagccagacgcccagcagggctgtggcgcatggctcccgccgcctctgaagaggacactttctagtgaattcagttcgtgctacccttgagcagcctgtgctacagcaggcacatttgtgaatctcccaacctgtgcctggcgtcggaactgtagcttcccaaagacttacctgccctgggagatggcgggcagctgctggccacagccctgggcctgcacctttatctgcaaactgggagagcggggatgggagtcagtgggtaggaggtgggcagaggcctgggcctcccagtgttcgggctcccacactgctgccctcacccactatgtgcatcttcccaacttctggacatcctcactcctcctctgtccaatgtaaatcagaatagtgggccgggcgcagtggcgcacgcctgtaatcccagcactttgtcaggctgaggcagaagaatcacttgagccaggagttggaaaccagcctgggcaatacagtgagaccctgattctacaaaaaaaaaa

SEQ ID NO: 1698 - DNA, 443 bp, Homo sapiens
ggcacgagaaacggtagtatcatggagagatcataataaattcttagtattaaaagtggttttgctttcagttagggagaaaaattagattgtactatttttcctctatgatttccttcagttatcttccaaatgttgttttttccccacagcccccttaacattgttctctatgcacttctcaatacattttcatttgtttctcaagcctctttgtggatgactcctaaatataacttcttccactagctctagatccgtatttccaataaaatcccctacctgaatattcaagttaaacatgtccagaatacttactgattttattgttaatagccactattctgttgtctggaattaaaacctgtataactaatttgcatccctttatcttcttagtcaataaaacctacaatcctctttctaaaaaaaaaaaaaaaaaa

SEQ ID NO: 1699 - DNA, 1560 bp, Homo sapiens
ggcacgagggcagatggaccttgctttggtccagctcttttccttaccctggctctgacgtgggaaggcttggagggcccgtctcatcacccccgttcgccctcagctgtccctttcccttgtcgcctggccgctgcctcgcccgcctgaggcctcctagcaggcagcctgggtgtgagttgagcctctctcttttccctctggtgggaaagtggcctttccctcaacacctgctccccggccccagaggaacccacctgttttggagctcagcttggcccagcgtttccttggggaagggaaaggagggctggacagcactgatccgggcaggcagcgtgtgcagcagtggccagccagagtgccaaagatgcacggggatgtggtgtgtggctccgggccctcgacatctctgctttgggggatttttaccttgtctgcacacttgtcaggggagaggggacagcaaggtgggaagttgaagagctttgaggctcagcakcatgtytgtggcattcggtggacaccatggccttgggcggctggacaggtttttgtgatgtgagggacacgcatggggcacatggtaagcttggcaagggctccaggaacgctgacgaaaggttttaggacccccacccccatgcctgtaccaaggctggcctccagagcgggtgaggacagagcagctgtgggcttttcattctgaggtcttggcccccctggccaccgcaagggactctttgcttgtcagggcttgcaaaaaccaaccttcgagaaagaaaagggaactcttcacgttgaatgttgactttgtgtgtatgcgtgtgtgtgtgtgtgtgtgcacgcgcgcgtgtgcgtgttgacttcatggaattttgttttgtgaaattcccctccaatcgtgtcagaatttacctccatgccccagtcacactgttggttctgcgctctgaacctgggtgtagccatttgaaggactctcttctgcgtttcctaacagttatttggtggtctcaagagttgaggttgtggagggttgggagaaactgaagttctatacatttccatagagtttacatcctgcagttaaaaggcagggagggctcagcccgggccccacagctccaggccatcccctacgggctgcccacagtgcccccttttctctagccgaatctttttcgaacagcccgggaaaggaaaacggattcacttgctgattttgttcacggcggaagcaccatgttccgttcctttttcaggttcagtttgttgtgtaaatggcggttttttctggtgtgagctttggtgatggtggcagggctcctttgaagagatggttccacctcgtggtctgaagaacaaaccagagaagagtctggtttggccagaggcccctccggtccacgtcaccctgagtacacccctctgattgctctgctgtcaagaagcacgtttccaccagctgtattcaacactacaatgcattttttaaactatatttgcatccaagacaataaagacaccttattttttttgaaaaaaaaaaaaaaaaaa

SEQ ID NO: 1700 - DNA, 463 bp, Homo sapiens
ggcacgagctggtggcgtgttagtttctgcccagttctaccccctcatgtgcttcttctgaatactgaatgtgactgttgaaagctggtagaattcatccctcttactgtagataacactgcaaatcttggaattttgttttttgctgtttccagatgtatctataaatatctatacattatatgtgtgtgtgtgtgtgtgtgtgtgtgtgtgtgtgtgtacatcgggtcctcccatgtgtggtgttcttctggaggttgtctctttggtcaaggtgaacttttaatgtttattattttcttctccgcacaaagtaaagagcctaattttgtgtattctggtggctgctgtcatgagatgataaaatgtaaaacaaaactctagtcaacgtagaaagagttaactgtgctgaaaaactaataaagaacctaagaagaaaaaaaaaaaaaaaaaaaaaaaaaaa

SEQ ID NO: 1701 - DNA, 477 bp, Homo sapiens
cggcacgagaattacaccactttagaccctatgtgtagcaggtcacaacttacccttgtgtgtttagatgtgtatgaaatacctgtatacgttagtgaaagctgtttactgtaacggggaaaaccagattctttgcatctgggccctctactgattgttaaaggagttcctgtcacctgctccccccacccccgcatgcgtctgtccacttggctaacttttaatatgtgtatttttacattatgtatattcttaactggactgtctcgtttagactgtatacatcatatctgacattattgtaactaccgtgtgatcagtaagattcctgtaagaaatactgctttttaagaaaaaaaataacatgctgaggggtgacctatatcccaaaaaaaaaaaaaaaaaaaaaaaaaaaaaaaaaaaatgaaaaaaaaaaaaaaaatagaaacaaaaaaaaaaaatttctagggggggccc

SEQ ID NO: 1702 - DNA, 687 bp, Homo sapiens
ggcacgagggaaaacctgagactagaacccttgtcttcctcttacccaaattctaggatagctctgaagcctgctggaaacttggtggcatccaacctgcctcattcggcctgaccggtagaggcaggtggcctgtggacagaagtaatcctctttctgctcaccccaggcagacacaactgcctatgttcccccgatgagaggaaacaggctgagagaagaaaaatgactgctccaggattataccacagtggagagcgggtcacaggacatgatgcagggtccaggtttctgttttgatcaagtcttacatgcccattcagcttctaggcccccctcacctccctgccctcattcacaagtggccctgagacacgtgaacacctccctcctatgcatcacaaaccttctccaccgagctttggtgctttggcctctggcacacctaactagcattggcagaggagagtctacactctcttcctcattcagggaagatgctttaagaaatcctgcctctgtgcagcagaggagctggaggcagctccccaggcatccctccccaaataaaggcttatgtactggtgaaaaaaaaaaaaaaaaaaaaaaaaaaaaaaaaaaaaaaaaaaaaaaaaaaaaaaaaaaaaaaaaaaaaaaaaaaaaaaaaaaaaaaaaaaaaaaaaaaaa

SEQ ID NO: 1703 - DNA, 1877 bp, Homo sapiens
ggcacgagggggaatacgggctgtcagcaagacgctgcaggggtcaaggaggagagcaatgaaggacaggaagcagtgggcattcaagactcgctggccttttttccattttctcatgctttctttggcacttgactgctacaggtttttaacttcctgaactgtaccgtccatcatggaaggctctcctcacttactaaggctaaaaacacaggctccatagcctcttcattttatcacactaatggtcgaaaggttcttatcctattttgcatttgtttcttgaggggaacttgagaagcaaaactctggagccatgctccccacgtgcaaatctgagctctaccactccctgctctgtgaccatgggcaagtcacttagcacgctatgcctcagattcatttttaaaattaggatggtaatactagtatcttcacaagattttatgaggattaaattagctgttgggcactgttgtggttaatttcaggtgtcaacttggctaagctaagtgatacccagatagctggtaaggcattacttctgggcgtgtctgtgagagagtttctgcaaacattagcatttgattcagttgactgagtaaagaaaatcaccctcactgatgtgggtgggcagcacacaatccattgagggcccagatagaaagacagagtgaagggtgaattccctctctgcttaaactgagacatccatctcctcctgccctcaatatcagtgctcctggttcttgagccatcaatttgaactgggacttacactgttagcccctcaccccagtttctagccttaaggtctaatggaatttgactgtcagtcctgtctttcttttgatttctcccttttggaatgggaatgtctatcctatgcctgtcccccactgtattttaaaagtgcataactcgttttgtttaacgggtttatagctggaggggaatttgggctcaaaatgaatcatatcttaggtcccacccagatcagatttagacaatatttagatgagactttggacttagattttaaggttgatgcttgactttaaatgctattaggatggaacaaatgggaggacataaattttgagaaaacggggcgaatgctatagatggaatatttttgttcctccaaaattcgtatgttaaaacctaatccccaatgtgatagtgtttggaggtggagtcattggggggtgattaggttttgaggatgaaaccgtcatgaatggaattcatgcccttataaaagggaccccagagaacttccttgactcttacacagcaagaatgcagccatccatgaaccaggaagaggaccctcaccagacagtgtatgtgccatgcactttgatctaggacttcccagcctctagaactatgataaatacatttctattatttataagccacccagtttatgatattctattaaagccacctgaacaatgtaaggcaggaacatgataaatgctcagtaaatgttaagggaaaaaatcctccttgaaaacataacacatttattcagcatatgtctgataaaatccttgtagtatggagttgatatcagggttgtgcagttcatctccgtcctcacaccatgtccagcggcttcctgaagactctgcacagtgacttctatgtgaactgaagccagtgccacagtcaatacttaggaggtgatggtgaaaaacggtcatggttctgaaaataagccatgcatttgtatgttggaaatcttccctttgcataactggaaaacaaatctatgagtttttcagcaaaagtggagacataaaaaaatcatgcgggcctaaataaattaaaaatcaattaaaggcaaaaaaaaaaaaaaaaaaaaaaaa

SEQ ID NO: 1704 - DNA, 782 bp, Homo sapiens
ttccggcacagtrgggaaccacttgtttttctaaaaaatattgttctgtgatcctctgaagacaagctgtgatttgtgatgtttagtatgttagattgtggactggcatcttcttgatggagctgattctaaccttagaataatttttgctttcatcaatcttgtcctctgattatcaaattagggccatagctgtattttcatggccatattattaaccttcttagtttatgtaattattacatccataggaaaacagttacacaaaaagaatttgtatattttcaacttctagcagtttgtaattactcagctcctgaaattaaagaaatttaatcagttttagtcatcttgtcttggttgccatggtttggaaggaaataccaaatagatttgaatcagtagactagaaggctgctgtttaaacacatgaaataattttttaaaaagctttctgggttgggcgcagtagctcatgcctgtaatcccagcacttggggaggccgaggcgggtggatcacttgaagtcaggagtttgagaccagcctggccaacatggtgaaaccctgtctccactaaaaataaaaaaaaattagctgggcgtggtggtgcacccttgtatttccagctactttgggaggctgaggcaggagaattgcttgaactcaggaggcactctcatgaggcggaggttgcagtgagctgaaattgcgccactgcactccagcctgggcgacagagtgaaactccatctcagaaaaaaaaaaaaaaaaaaactcgag

SEQ ID NO: 1705 - DNA, 1003 bp, Homo sapiens
ggcacgaggaaaccttcctgagtttcagtttccttatttgtaaaatggagacaggagggaagaaagctaactcctgttgagtgcctgttatgttctcgggacagtgttagggaaatcagaggaattgttttatttaaagctgtccagtcctgcaagtaggtataattggcctcatttaatagaccagaaaatggaggcaccggagcctaacaattttctcggccccacacagctggtaagtgatgaagccggaattcaaatctgggtcattctgactgcagagccaatgcgatttttatggtgccagcctgttgcctccgtgtggggctcataacttactccacagcggtgtcttattcaagttcgtccagaagcagatcctgagatagactacaagtagtttatttaggaagcctgggaaacatcagtcaggcagtcaggaaatgagacagggaatgggaggcagcccctgaaaaagtgtgttatcaattcaactaccactgtaagctattagagcttgttcacactggggaggctctgggaaccagtggagtgcatgtacctctgaattttcccatctgaggaaaaatccgagggagccaaggtatttatacaccaattcctgagagtagttaactgagggctacttctgggaggtggagtgttctaataatttgtaggtgcatatgttgtatcccgtgcttggcaaagtaggactctagcagcacaagaaagtcctcagcagagaaattcaggtgctggcagttggaagcaagccactgtgctctgaaatggtaaggacaaaggagtgggagggatgccgaaagcacctgctatggtggttttaagaattagaaacaggccgagcatggtggctcacacctgtaatcctagcactttgagaggccaagacaggcagattgattgagcccagaagtttgacactagcctgggcaacatggcaaaaccccatctctacaaaaaaaaaaaaaaaaaactcgag

SEQ ID NO: 1706 - DNA, 1692 bp, Homo sapiens
ggcacgagctgccgccacccagctctcgcggcagcagtccccagagagacctgttttcacatgtggtggcattcttactggagagtctggatttattggcagtgaaggttttcctggagtgtaccctccaaatagcaaatgtacttggaaaatcacagttcccgaaggaaaagtagtcgttctcaatttccgattcatagacctcgagagtgacaacctgtgccgctatgactttgtggatgtgtacaatggccatgccaatggccagcgcattggccgcttctgtggcactttccggcctggagcccttgtgtccagtggcaacaagatgatggtgcagatgatttctgatgccaacacagctggcaatggcttcatggccatgttctccgctgctgaaccaaacgaaagaggggatcagtattgtggaggactccttgacagaccttccggctcttttaaaacccccaactggccagaccgggattaccctgcaggagtcacttgtgtgtggcacattgtagccccaaagaatcagcttatagaattaaagtttgagaagtttgatgtggagcgagataactactgccgatatgattatgtggctgtgtttaatggcggggaagtcaacgatgctagaagaattggaaagtattgtggtgatagtccacctgcgccaattgtgtctgagagaaatgaacttcttattcagtttttatcagacttaagtttaactgcagatgggtttattggtcactacatattcaggccaaaaaaactgcctacaactacagaacagcctgtcaccaccacattccctgtaaccacgggtttaaaacccaccgtggccttgtgtcaacaaaagtgtagacggacggggactctggagggcaattattgttcaagtgactttgtattagccggcactgttatcacaaccatcactcgcgatgggagtttgcacgccacagtctcgatcatcaacatctacaaagagggaaatttggcgattcagcaggcgggcaagaacatgagtgccaggctgactgtcgtctgcaagcagtgccctctcctcagaagaggtctaaattacattattatgggccaagtaggtgaagatgggcgaggcaaaatcatgccaaacagctttatcatgatgttcaagaccaagaatcagaagctcctggatgccttaaaaaataagcaatgttaacagtgaactgtgtccatttaagctgtattctgccattgcctttgaaagatctatgttctctcagtagaaaaaaaaatacttataaaattacatattctgaaagaggattccgaaagatgggactggttgactcttcacatgatggaggtatgaggcctccgagatagctgagggaagttctttgcctgctgtcagaggagcagctatctgattggaaacctgccgacttagtgcggtgataggaagctaaaagtgtcaagcgttgacagcttggaagcgtttatttatacatctctgtaaaaggatattttagaattgagttgtgtgaagatgtcaaaaaaagattttagaagtgcaatatttatagtgttatttgtttcaccttcaagcctttgccctgaggtgttacaatcttgtcttgcgttttctaaatcaatgcttaataaaatatttttaaaggaaaaaaaaaaaaaaaaaaa

SEQ ID NO: 1707 - DNA, 1274 bp, Homo sapiens
ggcacgaggtgaggtactgttaggttggtcagactgatagtttattgtacgtattgctgtaatatctttgtacatttagcttttccatgtttgtaccatatctttgggttttcagaagtctgtctctctctctgtttctctttttgtctgtcttttctatctctcaccttcatttggggagcattttgtgttctctttcacaggactaattaagttttattggatcttgaaaaacgggattagaaattttttcttacttatataattagaaamcaatgcttttggacttacattgccacggcagtttacacagttttattcccaaaaattgtagttttgtgactaggtgataaaaatgatctcctatatgtgccaaacttggtattctagacactcatacttaggatgtaaattgactgtagtccaataatttaatatgttgtgtttaattcttgtaatattttactcacaaattgaacttttccttaccaatttaatgtttgtaggcttaatttggcatctttgtcaggattattagacttctctgcattcttctgacttctccctaaactaatgtttagaactgaattgggtccagcaatttaagtggaaaatcagtatgactagagacttctagaaacttctggtgtcactgagatggtgaatttgatgattctgaccctacttgctcatctgtaaaagctattagaggattgttttaagcatttctattctatacaggtatatgtacaccatgtaataccactcagccataaaaaagaatgaaataacatttttgcagcaatttgggtggagctgtaggccattattctaagtgaagtaactcaggaatacaaaactgaataccatatgttctcacaagcgggarmtaagtcatgggwacgcaaaggcatacagaatagtaaaatagactttggagactgagacgcggggagaataggaagaagataagggataaaaaacgatatattgggtacaatgtatgctactttggtgatgggtgtagtaaaatctcagacttcaccactatacatttcatccatgtaacccaaaaccacttgtactycaaaagctattgraataaaaaagatatttaaaaaaaaagaggccaggcaggttggttcacgcctgkaatcccagcactttgggaggctgaggcgggcggatcacttgaggtcaggagttcgggaccagcctgaccaacatggtgaaaacctgtctctactgaaaaaaaaaaaaaaaaaaaactcgag

SEQ ID NO: 1708 - DNA, 1601 bp, Homo sapiens
  misc_feature (12)..(12): n equals a,t,g, or c
aaggaagagaantagaatcagaagttaggacatctattgcttgatgcttctgggatgggtaagacgtagttctggtgatagaagttgaagctgcagcataatgagagatgaaagagaaactgctcttctggtgattttaaccctagggatgtagctactgggacaggaggaagtgagggacccagtgctgcagggtccctgttgtcacatatgtcaatcctactttaaagtcaaataatggattctggctgataaagcctatcagaattatggtgttgatacgaaagtgtcacatagccaccaaaatgtgttctctactttcttgctttgctctgattagctaagtcttggtcacatggctttatagcactgggaaaaccaggatctggtcttttatagggtaggaagtgagccctatcttttgtgtagatttgtggcggggagtttcccaagcatgggaaatgggctcagatgatgtggttataaaatgtgaatgtccattaaaaggcagtcagtgttggctactctaagccttcaaattgttgcttttccccttcaacagggaccaaggggagatactggaaacctctgagcttcagctgttggtttttgggttttgtttttgttttattgagatacagttcacttaactatacagtttacccatttaaggtatacagtgttttttagtaatttacagaattgtgcaactattmcaattttggamcatttttgacacctcccccccaaaaaaaccccwatgccccttagcagtcatcctcagtctcctcagccctaggcaaccactcatctactttctgtctttatagatttgcctatttgggacatttcctataaatggaayctgtatgtggtctttscttggttttgtttttggggtggtgggggctgactacttagtcttgacaagccaaggtcccaacccagcagtagaaatataaggagtcacggctgtgaggatggcctcacaatgggctcagggtagtgaacttctgtcccctaagttatctcagaaatgaggccaactctctgccctctagaatggatggccctgagggagagaaaggttcatgtccttcctggctggtgacagaaggctggactgtgcctgaaatcaaagcttctcacctggatttgggcaaatcaagcagtcccgaatctcagggtggggtgagatgtgtgctgaagagggcaacacaggagctgcactgcagatggcgacatgcagggtttcaaggccaaagctggtgtgttcttcccttaagaattgctgtaggctaggtgaggtggctcacgcctgtaatcccagcactttgggaggctgaggtgggcggatcacctgaggtcgggagttcgaaaccagcctgaccaacatggagcamctctgtctctactaaaaatacaaaattagccgggtgtggtggcgcatgcctgtaatcccagctactcgggaggctgaggcaggagaattgcttgaaccccggaggtagaggttgcagtgagccgagatcacaccattgcactgcagcctgggcaacaaaagcgaaactccatctaaaaaaaaaaaaaaaaaactcgag

SEQ ID NO: 1709 - DNA, 766 bp, Homo sapiens
ggcacgagtccatgagaagcacccgggcaaacttgctggctatatatccagcctgctcaccctgacaggctttgctacagctatggctgctgttgtcctctgcgtgaatagcttcatctggcaaactgaaccctttttatacatcgacactgtgtgtgatcgctcagaccctgtcttccctaccactgggtacagatggatgcggcgaagtcaagagaaccaatggcagaaggaggagtgtagagcttacatgcagatgctgaggaagttgttcacagcaatccgtgccctgttcctggctgtctgtgtcttgaaggtcattgtgtccttggttccttgggagtaggtcttcgaaacttgtgtggccagagctcccagcccctgaatgaggaaggatcagagaagaggctactgggggagaattcagtgcccccttcaccctctagggagcagacctccactgccattgtcctgtgagccgccaaagaccccacggggtgcccgcatgtccctgtctagggcagcccagggcccccactcctggctcctcacacttgcctcccctatggccgctctccagaccctcctcctttcttctccccacatccgcacctgctgttcccactctggggttctcaagtccatgaacagatattgttgcattttccacaatgctgattaaacataataaacaatccagaaaagcagttttgcccagaaaaaaaaaaaaaaaaaaaaaaaaaaaaaaaaaaaaaaaaaaaaaaaa

SEQ ID NO: 1710 - DNA, 3237 bp, Homo sapiens
  misc_feature (1)..(1): n equals a,t,g, or c
  misc_feature (6)..(6): n equals a,t,g, or c
  misc_feature (32)..(32): n equals a,t,g, or c
  misc_feature (3237)..(3237): n equals a,t,g, or c
ntccgnaattcccgggtcgacccacgcgtccngcaacaactatttttatgatgggatgggggagtatatacacgtatagaatctgtacgcgttgaacaacttggttcaagatggtgggggcatttttagagcggcaataattgaaaaaaaaggcgaactctgccttggagaggtagatgataagaaataaaaaggtgtttataactattttgtattataaagtgggccttagagatagsaagaagaatgatggattccttttggatcaatcagaaaggaaacacgaaagaaaagtcaggaaggtagagagagaaaaagggagggaaggagaaagaatgggaataaaataaggaggtaagagatactatttttgctgagcaaccagtgtgtttcaggatgatacaaagaaaaatatagaatagaaataagtgcaggcttggaatcagctacaaatcctaaagatggggtgtgtgtggatgtgtgtgtgtgtgtgtgtacaccattgtgtgtttgtaaaatgtgtatgttcatgagtaagggtgtgtgtgtgtgtgtattaaaattccagagtgaccgtggcacttgggtgtacaggtaattcctccagagctgtttgctggcttcaggagtggagtgagaatttcttttttatgaaaagggatataaaggcaccgagctgatgcagtatttgtaatattaagttgacctaacaaggtatttgcatgagtcacaattacaaagttttgagcggttttgtaatttgacatttaggaaagtctcctatttattctcatactttacattcatgcttagtatactatagaggatgccagctttaatctttctgtcatttaaagcaatatgataagggtattcaataattgggtgccctaaatttctggatgagaaaattttcaattctggccatgagaaagaaaaaaaaataaacagccttctttttttttcctttgttttaaaactgtggttttttaaaaaagcaataattaactcagacctcactaaaaatcatttttgtttttatattgttatgtcataagctctattatgttattctaacaagtagcaatttcacaaaatttgtatgtagatgttaacgcacatttcctttgcttcttttattagactagtgttgactttggggggggacatttattcacaaatgagaagtaggcacaaagtaaaaaatggaaccatctactaacaaggatcctttaaaactgccaagggagctctaacttgaagccacatcctacagatggcagcccaaatagcacatgggcaattggcaccatctttatatggttgagtctcctgaatattttgaatgaattctcaacaaaatgtgctagccactggggacgcaaaacaagtaagatccctgttgcaagaaattcattttatagtgagggaggttggcatggagactaaaattctcaggaaaatgagatccgtgttagattagaagtcctgatgtgaaatgggaggactcaggaaggaggatcgtctttacctgaggatttctagccagaggtcccagatgcctgggctgagaacccagcgataagggggcgttcccaaagcagacacagggataagaacagaggaggcagcagcattgcacagccccaggcacagtggcagttaggatggctggagagtaggatagttctatgggttgcccaaaaaatgtgatgygcttcatgttttctctgactcatggatctggtagagaccatagacatgatatagactaacttccccatttttcacaagaggaaaccatccttatgacttaccttaaagttttttgttctgttttgaaggaaaccatgtgcttcatgaaacctacagttgacaagagaatgtacagctaagagaaaagcttaagaggccacactattcgcggaatggctttagaggcagatgaagtggtctttgaccacagttgattgaaccagagcacttattgcttaaagaataacagagttctagagctgggggttcttgggccatgctccgtgtgtggataaggaaagaaatactgtttctgggactctcccacagtcacaaagctgttttcactgtggcccctacatctcttaacttttgctattactcctatgctgccttccggattactgctgtctatcttcttgctccactcactgaagatcctattataatcccatgaaaatgtaaattacagtttacttgggagagccagattttctctgtgctcttgagttttttattcattcaagaaaccttgggccaccgctttgtacatagcaccgtgctaggctctgggatcccaaatggacccttttaactttctgaagatgggaccgtcccctggaggaaagtcattcctgcctaatccatcgagagaaagaggcttacgaaaaactttgcctctgatgctcagccccacccccaaatagcacacaagcttgttaaccccacctcttacaaaatgtttagattctgtaggtgttaaaagcctttctggaagtattgcattctgccgtgtttataggtgttcactttcctccagagctgattaactactgacatgacttggctttctcatccagaaattatggaaacagggtctgtcagtggcaggaggccgtgctgtgttttacttggatgacacaatgcagtttacttgcctcttcatacccatgcatgctgctcaccctagacaatgacatataagccgtatatagatcaatgtccacatatatatacacacacacatatatatatataaagtgtaacaaggaacactaaaacagtgttgattcttgtctctgaagacaaataattaaaccttttttttcccaactaaagaatggatttaattaaactatgtattgaaaaaaaagtagcctaagtgttagagatggtgaatatattccattttagttaaagaacaaatttcctgaattttaagcattcagtgagctgccaattttgattttgtgttgctctttacccaaattattttttctttgtttttctttttttgggggaggaggggaaaaaagcagcaatactgtgtttggaaattatactctgtatctggttttcctgtgtatgttaaccacttaaatgttattatcctgctttggttttagagtgattgtgaggcattcaatgcaagtatacagttattttctcattaaaatccaatgtgtgttgagtttttataan

SEQ ID NO: 1711 - DNA, 2070 bp, Homo sapiens
ggcacgagcccagaagtaaagaaaagggagggttttaaaataaataaatacataaacagggtttttgttttcattttcagaaatatctctaaaagcaaatagttttacagcgatatcattatatgtgttaaacttccagctctctgagtatgacttctgcatttttatttttatttttagattcagttttgttcacttgggcatgtgtatggcttggagacaggcaggaatgccaaaaagctggtagatgatggcaactgtgatgagcagaagaactcactgcctcagttacctggatgtgggccattttctttccctggagttggagggcgggcaacaatgttgaaactggctggaagttgagagagaaactgaatttgtttcagggcctagtgatattttagtgcataattttataaaataacagctccatyccatgaatataggagaggaaaaagattattgagaaaataatttttttacaggcactggtacttttttttcatgttttgtgttgtagttgcattttactagagcagctgacaccattcctatgtggtctgattttgtagttcaaagaccaaaaccaaataaaaagatctactctttaaaaactctcttttccaatgagaggattatggaaaaagtgacagtgattgaaagtctgtgttctatttgccagagtgggggagggagtggtaaggcaggttgactgggatagaccagtcacgaaggagctggaacattcacccaggcccattgccatgtgamttgtagaaggtctgtggggaagacaccatctgccactgtttggcaggatttggccaccatggcacagagtgggcaattgtcctcaaccttggaggcagaagctggcagctggccaaaagtctgctttctcccagaagagataggcagtyactgagccgagatactgatgatgtctctctcttatcgtgcaacatggagagcgggagaaaatgagggaggacagaagagaggagaaggaggaggaaaataagaaaaggaatactaattaactcagcctgtctatccagctaagcttgagcttgattttgctctctagttgaatggaacatgcaacctgaatttctgaataacagaattaccaaattactgtttaagtgtttgagaaaaaaaggtgaaaagtgtgtgtactatatgtatagacgtatagattgacatatagtgaattggttaattgaatgtctgcatcagataagaaggtgttaggtcaatttccacaataatgccattaaaatcggttctttgattaaatccaattaacagatgtggaaactgaggtttgtgacaaggttcaatccctgatttctgtgactccaaagtatgtgctgttatttaatgtttatgtattctctattatgaattgttttcaagttttttaaaatatcactagctagcctgtacgtttcttaggaggcaaaaacaattgccttaaattttgttatattttagtgccattttgcacataggttataagcaacagataatttctgtaatctttagaatatcgattaaacttgttaaaatgtagatattttgaaatctcacacaggacacctaaattatgtraaatgttataaactttatgatttacaggggccctggagatggaagtyctgaaaaaatgtgcctttattcagtattagtgcattatcagggattccagatytcagttaaaatgagagaatctgaatctctagscaatgatgagtgtttctgaaattcagattcaccagaaagaaattgaaagcaaagagaagacagtgttgtcaaattatcatataattcagctaaaaaaaaaatcatggtacttaagtgggagctagagcacatcactgcctttaagaagatatttaggggaataaaagagktctgggacctcggaggtgaaactgagagaaagacaaagggacttcaaatcaagcatttgaaagagccaatgaggggccagatgtggtgactcactcctgtaatcccagcactttaagacgccaaggcgggatcccatctcaaaaaaaaaaaaaa

SEQ ID NO: 1712 - DNA, 1259 bp, Homo sapiens
tttttttttttttttttttttttaaagttataaaaatattttatttaaatgatacagaaaaaaatgtatacttaaaagtgattaaaacttcacattaggaaatgctaaaaacccagtaatgtacataatgataaaatctaaagtgatgagaaaacataaaatattttcatttggtcctgtcacctaacaaaactatcataaatatgagattatagtaattactaaagctggttaaaggcacatgacaacataattcctttatacacatccagtcattttatacaaggaactgctatcccttaaatggaagagtgaactacttgtttaaaatattaacagtgcactatgtacctacaatgaaaccactttctccaaagactcaaacagattaacattgcaaaatagtacttctgtatcactgacttctgaaaattttaataatttatgcatatgcaagtgaaatataatttattctggtttcaaccaacagttatacaaagtcacaattttccccaggaaaccattcacttcatagctgcaaaaacacactgtagcttttctgttagggtctgccatgctttcagctagctggatgtttaaccattcacttcaaatttacatgtccagccaggcacggtggcgtgggcctgtagtcccaactacttcgaaggctgaggcaggaggatcacttgatcccaggagttcaaagacagcctgggcaacatagaagaccctgtctcttcggaaatcatccaaggagtgtgataaacatgacaacccccataaactgggtaaacaacaacaatggagtgaaaaacgaccacacatgccataaagcaatgttgaagcaaattcctgctgcaataaaggaggcagtggtaatgggtatcaaggctggatacttgacatcatattctccaattccacaataccattccaggtagactatgcagtaaaatgcaattgataaactgacaagcaacaaggcactgccacagagaaaccagctgctagtgtggaagttttctttaagggttttaaagaagtcaacataataggtcacaacaatggatgccaaaatccagaatccagaatggatattaagtcttggaagaggtttctcctttttctcaacagctgtggaggtttccggcccggcgtcaccctcgcggtccagctgggcctcggcgtccggcaggaggaggaatcgccgccggagctgctgccgggcccgcgaggagtccatcttggctcgtgcc

SEQ ID NO: 1713 - DNA, 1905 bp, Homo sapiens
  misc_feature (846)..(846): n equals a,t,g, or c
ggcacgagaaaaagggcagtacagaaatcaaccagcacccagtcacagtcgaaggtgcttttacccttgaccctccaaacagagccaaacagaagcttgcacctattcctgtggagctagccccaactgtgggagtgtctgtggctctgcagagagaaggcatagactcccagtctttaattgaattaaagacccagaatgaacatgagccagagcattcaaagaagaaagttttaacccccataaaggagaagacacttactgggccaaaatcaccaacagtgtcccctgttccatctcacaaccagtcacctccaacaaaagatgatgcaacagaaagtgaagtggaaagtttacagtatgataaggacaccaaaccaaatccaaaagccagttcttctgtacctgcttcactggcccagctagtgactacattccaatgcttcagaagtagcttcagsacagaagattgctgtaccagcaacatcacatcatttttgcttttcaatagacttaaggagtatacatgccttggagattggttttccaatcaactgtatattaaggtactcatatccattctttggaagtgcagctcctattatgactaatccycctgtagaagttcggaaaaacatggaagtttttcttccccagtcttactgtgcatttgattttgcaactatgcctcatcagstgcaagmcmccttcttaaggattccattactggttgaactatggcmcaaggatwaaatgagtaaagatttacttctgggaattgcgagaatccagctttctamcwtcttgtcttcagaaaaaactcgttttttaggttctaatggtgancagtgttggcgtcaaacttacagtgaaagtgtgcctgttatagcagcacaaggatcaaatamcaggatagcagatctttcttacacagtgactgtagaagattatggactagtaaaaatgcgtgagatttttatctctgattcatctcagggtgtatctgccgtacagcaaaagccgtcttctcttcctccagcaccttgtccttcagagatccagacagagcctcgtgaaacgttagaatacaaagcagcacttgagctagaaatgtggaaggagatgcaagaagatatatttgaaaatcagctgaagcagaaagaactggctcatatgcaggctcttgcagaggaatggaagaaaagggaccgagaaagagaatcactagtaaagaaaaaggtggctgaatatactattctagaaggaaaacttcaaaaaactctaattgacttggagaagcgagagcagcagcttgctagtgtggaatcagagcttcaaagagaaaaaaaggaactgcaatcagaacgtcagcggaacctgcaagaactgcaggactctatccgtagggccaaagaggactgtattcaccaagtagaactagaaaggttaaaaatcaaacagctcgaagrggataaacaccgccttcagcaacagcttaatgatgctgaaaataagtataagattttggaaaaagagttccaacagttcaaggaccagcaaaacaacaaaccagaaatccgtctacagtctgaaataaatcttctcaccttggaaaaggttgaacttgaaagaaagttggaatctgcaactaagtctaaactgcattacaagcagcagtggggacgagctttgaaagaacttgccagacttaaacaggcagccaaggcaaaataaagattatactcacttgattgaggagcctttaacccagagcacctggcactggagaggacttctttcactaccctctaacttgtgtgtgtgtgtgtgattattattaatgccctatacttgattaaaaattcaaagcatttaaaggaaaaaaaaaaaaaaaaaaaactcgag

SEQ ID NO: 1714 - DNA, 1147 bp, Homo sapiens
ggacacgaggtggccgtcggttccgagtccatgcctgttttctccgccaccggggacctatgcaagggccagggctgggccactgccactggacttacaagtgactgctgaggctatacactagcttctagaacaagataaccactgctgctgatggatacttttccctcactgccatggcacaccagtcatggatcttgtaatcatgccaagagaatagatacattatggacctcttgttcttagatatgggcctctcagcctggcagatgtggaaactcaaatttctcgtcccactccaggttttggctagccaaccctgcaggaaagtggtttataggccattcatacttaagttgatcacttgcccatggtggacatttttgtggtggtgatgtccattaaggaaaccagattttcaattatttagtgagagaagagttagagcaaaagacagtggtaaatgttttattccgtctccatgaggaattgaaggagttggtctccacctagagatacatttgatttacagcttaagtaattcagaggctaagctctaagcttttttctcycattgctggaatgatttaagcagaagtccttttgkgtacttttaaaattgkatctttccaggagcccctcagattgtaccttgctttctcaccaatagacaccttcccgacacttttttaatgttgtagctgagcactttaacaagttgagcattccatgtttcattcttagaaccttctttaatagagggtcttccctcaacagcctgtgcctctggtctacctttgaccaccactgataactaatatattggtcacaatgactggaatgtgactagtgatctcaggagatggcactgtcctaaagtgctgtcagggtggcaccactgctctctgaacaacttaccttggtcagagggactcaggtttgggacagcacaagctgaaggctggagagtaacttgcatagtaggaccatacctcttcctttcccatcccacccacatatgatagacagcccctctgttgagatatggaggggacagatactggaatcgggggtgggacttgcagttacttaaaattttttaataaactgtgccctgaaacctaaaaaaaaaaaaaaaaaactcgag

SEQ ID NO: 1715 - DNA, 998 bp, Homo sapiens
  misc_feature (358)..(358): n equals a,t,g, or c
  misc_feature (481)..(481): n equals a,t,g, or c
aattcggcagaggaattttatgaataagtaatgaagtctaattttccgttatcatagccattggttaaaaatgcatgtctgttaggacattgtaattattttgtattacttaggaaaacttttatgattctactcttttaatttttttaataattactttatgacttcttcattagggattctctcctccagtgcgtacgcagatcttctgaaaaggaatctgacaaatttagttgctgcatttttctaaattgctttcaagactacccagcacttcagatacttttcatggccctttttcccaaagtgttctccaggatgcctttgatctgcacgggcaatcccattagcagtgganggcttaagttcccacagaaactctgccacagaggcactgacaccagaccaggcgtgatccctaacagcttgctgtaccgactcatatgagggctgtcttggtccgtctcatttaaggtttggncttctccaaagwttagacaccytgttttcgttcaacctttgtttggctttgaagcatcatgcacttgggtcttgaaatcttgggctcaccgctgcttgtaccagtatcttctaccctccggttgtttgtggccattatcaaacaaacaccatgccaactaggtgtaaatgcagactgatattctgaagaatccaggaagggctgggcatggtgcctcattcctgtaattctagcactttgggaggctgaggcaggaggatcgcttgagcccaggagcttaagaccagcttagggaacatagtgagacccctgtctctacaaaaagtaaaaaataaaataaattggctgggtatggtggcacatgcctgtagtcccacccactcgagaggctgtgatgggagaatcacccgaggctggggaggttgaggccgcagtgagccgagatcgagtcactgcactccagcctggacaacagagtgagaccctgtctcaaaaaaaaaaaaaaaaaaaaactcga

SEQ ID NO: 1716 - DNA, 810 bp, Homo sapiens
ggcgttcccgcaaggtcgctttgcagagcgggagcgcgcttaagtaactagtccgtagttcgagggtgcgccgtgtccttttgcgttggtaccagcggcgacatgacggggtacactccggatgagaaactgcggctgcagcagctgcgagagctgagaaggcgatggctgaaggaccaggagctgagccctcgggagccggtgctgcccccacagaagatggggcctatggagaaattctggaataaatttttggagaataaatccccttggaggaaaatggaaaaaccatatggcatagttgaaaagaagtccagaatattccctgtaagtcttaacacttctgattttycttttgtttattgtttttctctttccttttcctccctttccaagcaattattagattaaaatgttctttccttctcactttcggtttaagtccctgttttgtgtattcttgtaaaaaacaaaacaaaacaaaaaaaaacaggaagaaataccgtgaggtaacaattacagttcaaatgggaagtgagcacatttattttcaacctggctgtaaaacgtgttttgtgaccttgattttcctaaagggagttgaaagtaccaaaagtttttcactgtgtcctgtttcatgttgggtaaagagcttagggcatgagcctaagcaaacatccatgcatggtgacagcaactgaatttctgttattaattccaaactctcatgtcctatggctttgtacctcattttcaagatttgaccttaagttctccatctgtgaatttaatatccactaatgggtgttt

SEQ ID NO: 1717 - DNA, 436 bp, Homo sapiens
ggcacaggccgggcacacccacaggagagcaatggctggagggtgacatggactgcagggtgtggccgcggcagcccagctcttaaggggacagcctgggaaaacagacttagggacaatgatcttgagccatgaaatgatgtccaatgccccttgtgccacctgacatcagcctgattaatgaacaaacagaagaggaagcaggggacctgtgtgtccctctctctgcttttctgtctttctctgtgccccctctcttatgtctctcacgctgtctcttgtccttgtttttaactctgacacgccgtgggaacttggctcacttcctagggggaagctgtctggactggcccagagatgggcaccaccatttcccaataaacacaagataaaatcaaaaaaaaaaaaaaaaaaaaaaaaaaaaaaaaaaaaaaaa

SEQ ID NO: 1718 - DNA, 3714 bp, Homo sapiens
  misc_feature (2324)..(2324): n equals a,t,g, or c
tgacttcacctgaacaagtagccgactcagtgaaacgtttcagagtgcattttrsccaaatggcattttagcagaggctgttccatgcagagataaaagtattcgaatgagaacaagagtagcaggaaaaacgaaatyacttgcaattatgccagatgagctgaagcacattattggggctgagacaacacggaaaggtattcttcgtgtttttgaaatgtttcagcacaaccaattaaataggagaatggtttatgtcttcttggaaggctttttagaaaccttatttccacagtataaattccgtgaacttttcaacaaactgcattcacggtcaaagcagatgcagaaatataaacagaaacttcaaactactcaagcgccttctttgcagaaaaggtgacactccactctatgaagctggtgttcattttgtccaggactaatggtatggacagatcttctggggcttaactcaaatactgttgtgtctgcaccagtcttttagtgtctcaaaatagattattaatacatccataagtctgtggttcttctcattctcatctataatccaccactaccaagagagatttctgtgtcttaaatgatttggtgcatattttgcaacattgagagaaaactgcccccatctcaagcaagaatggcgttggtttcttccatttcaaactaatcagcattctccagcaatgacaaagtgccagagtgtatatatgaaagctaaggaaagcacaaaacaatggttcagagataaattggctaatttgtttaacagttggagactgtgcaatgtacgacttggaggagtttgtttggcataatgattttgtaggtctgtcagcattttgatatattgtggattagccaggtgaatgatccttgaaacatctctttcaggtctggagaaagagacagaatgcccttaaagtgtgaaataaccttatacctgaattacagttttgtgatataaaataaagctgagtataaaataaaaccaatcaaacacagaatttgattggatttgttattcattggtatacaacaatttttattcttatgtgtgctttaagggctgtgttttgctcttagggtactcaattttatgtttccttttggcattctttgtgcaaaaagaagcatgtggtggctctcatttaaatttcaaaattattagttttatctttaacagattactgattatacagaagatataatttattggaagaactgccaaatacattttgtccttctaaaaatatggaaatttaaatagtagtctggaaagttaccatatgataatttttaattgtgtgatctagacatgccttaggtaactgcagaaatagcaaattaaatgattaatgagcttattagtcatagtaaacatacagattcctaattctatgacagtgtacatatatgaaaataaatgatgaaaaaagaactataatatttttaaaaatatgcttttatttatatttcacataatgtaaagttctacaaaataaagctagtaggcaagacccctcagtgtatacctttaaacccataaattaattttatatcaataaaataaaatactttctctagttttggagcttctgtatttcctatagttttctgactgtccattttatccatcttagaagtattcacatcccttctatgcaggatttctgcatagttttaaatactttcattgcctaagggtttgggtgtgtcagctttttttgttttaaaaatatttaacactaaaaccttaaaataatgaagctacttatcagaccactgagccaagatcctggtattaaaagaaagtctgggtgcttaagataaagggacagagtattggtatcccagttatttgggagctttaagattggaacaagatatcactgtcttgttttcacttagatcctacttacaaagtgagggttattaacagaataaagccttcctttaaagctttataataatcatatttattaataatgctgttgtgcatacttatagtatgcatatattcagcatatgttgcatgtcttcagaattacataaaatgaaatccctttcattgcaacttgcaagtgagaaaagatccttagtggctctggtggargaaatagtatttcttcttctcagggtgtctccctgccttggcccctccctgagccccaggctttaaaagtgaaaatgtttgaaacatgaaacatgtctgtaggaagcatcagcatggccataagtgcagtgattttcatatatgcctctgcccatttcaaatatatttttgacatgaataaatctancagtatacagaataattcatgtaagaccctaacgtgtacatgtgaaaaagcatttctatataatgtgaggagcactggccatcaattagggaaataaaggtcatgtaatattgcaaattttcaaaatagagccctgcaagataactgcaatcataccaaaaactatttgagtaaatggatttttaaagtaatttttgtttagaagagtttatatttcagaagcagaaaatgtcaaatgatagtctttgtaaatggtggtgcaccttctctatgcacatctgtcttttacatcagaaagagctgtggtcatgctaaaattagagataactttttgaatgacttggtcaagctgtgtgtaaaatatttaaccataagtcaagtacagtgtactatgtttaataaagttacatttaatgcatttattgcatatatgaatatatacatgaagaggctttatgtcttctggtatttgattttgaatgttttttaagtcagtggtgcctttaggcaagaactttcgaaattaatcattctttgtgttttctgatttttcaggtaacatgtacactatttagaaaccatcatagtttattcaccttaaaaaattgattgtattatttaaatatatcacttagatgggcatttcctataattaggatattccaaatagttgctgaaatcaattgtgccattgaccaatggatgcacttggttagccttaatttttttwaaaaaaaaaaaaacaaaaactttcttgaatatttcagtttgttcattttaagtttgtgctgctggtatttgggaagaaaaatcaatcagttaagtgctaccagaaagtgtaccaatttttataaaaattaagaatgatataaatttcacaatctaaaattttaattttgtgcaatattttcatttaatgcatgtgtatttgagtaattgtaagataaatgaatttttaattttttgagatgtagcttaaactgtcttcttaatccaacaacttacattccgttgttgctgcatccttttatttaaggacttgttttaaaagtctttttgtcactccttggaaaattcttttattagtagtaaattttgcttttargagcatggctcctgtattacaagggaaaaaatatgaagagcacattttaggattataattgttaaaagataatgtgtgcatatcattgtacagtaagtgtcaactgtgtgcctaactgttctatcaatactttctttctttaacaaagaagaaacaacaatcagaatgtcagttatttttattcaactaaaaggattaaaaaatttatttggtttgtgttctgtccattagaaaatactaataaagtattaacaaacaaaaaaaaamaaaaaaaaaaaactcgag

SEQ ID NO: 1719 - DNA, 1263 bp, Homo sapiens
  misc_feature (184)..(184): n equals a,t,g, or c
  misc_feature (1254)..(1255): n equals a,t,g, or c
  misc_feature (1261)..(1262): n equals a,t,g, or c
tggttactgagatggtgaaaaccaggggagacctgggggacatcacaagcttggttcctaccaggtttatggagccgtacatctttgggagccgcctggaccacgacatcatcgacctggaacagacagccacgcacctccagctggccttgaacttcaccgcccacatggcctaccgcaaggncatcatcttgtttataagccgcaaccggcagttctcgtacctgattgagaacatggcccgtgactgtggcgagtacgcccacactcgctacttcaggggcggcatgctgaccaacgcgcgcctcctctttggccccacggtccgcctgccggacctcatcatcttcctgcacacgctcaacaacatctttgagccacacgtggccgtgagagacgcagccaagatgaacatccccacagtgggcatcgtggacaccaactgcaacccctgcctcatcacctaccctgtacccggcaatgacgactctccgctggctgtgcacctctactgcaggctcttccagacggccatcacccgggccaaggagaagcggcagcaggttgaggctctctatcgcctgcagggccagaaggagcccggggaccaggggccagcccaccctcctggggctgacatgagccattccctgtgatgttcactctcctcccaaagcaaaccacagccaagcctgtctgagctgggagtccccttccccagccctgggtcagcggcatcctcagtcgttgttacttactcagctgatgtcacagtgcagacatccaccgttccaccacagaaccagtggctgagcggaccaacgttgccatgtgcgtttgctctgtggggaacagagcacagagggtgagcgacatgtgcagaacggccccttggctgcagttaggacctcagtggctggtatggccragctgctagaagatgctgctgtccctgtgatcccagcagccctcccttcaccgtgacccctgacctttgtcaggaaggtgcagtttttcttctcaatctaaatgcctttcaggtgggccgcttccttggctacctggttccagggggctgttttgtaatgagatgctgctggcaggccactcagaggctcccagctgggttggtgggacagccaggccagatgacctgattccagcaaaaataaaactcagatttgggcaaaatgaaaaaaaaaaaaaaaaaaaaaaaaaaaaaaaaaaaaaaaaaaaaaaaaaaaaaaggggggnncccccnna

SEQ ID NO: 1720 - DNA, 1476 bp, Homo sapiens
ggcacgagccgggcgcgaaaatggcggcggcggcgacggccgggcgctcctgaagcagcagttatggagcttccctcagggccggggccggagcggctctttgactcgcaccggcttccgggtgactgcttcctactgctcgtgctgctgctctacgcgccagtcgggttctgcctcctcgtcctgcgcctctttctcgggatccacgtcttcctggtcagctgcgcgctgccagacagcgtccttcgcagattcgtagtgcggaccatgtgtgcggtgctagggctcgtggcccggcaggaggactccggactccgggatcacagtgtcagggtcctcatttccaaccatgtgacacctttcgaccacaacatagtcaatttgcttaccacctgtagcacccctctactcaatagtccccccagctttgtgtgctggtctcggggcttcatggagatgaatgggcggggggagttggtggagtcactcaagagattctgtgcttccacgaggcttccccccactcctctgctgctattccctgaggaagaggccaccaatggccgggaggggctcctgcgcttcagttcctggccattttctatccaagatgtggtacaacctcttaccctgcaagttcagagacccctggtctctgtgacggtgtcagatgcctcctgggtctcagaactgctgtggtcacttttcgtccctttcacggtgtatcaagtaaggtggcttcgtcctgttcatcgccaactaggggaagcgaatgaggagtttgcactccgtgtacaacagctggtggccaaggaattgggccagacagggacacggctcactccagctgacaaagcagagcacatgaagcgacaaagacaccccagattgcgcccccagtcagcccagtcttctttccctccctcccctggtccttctcctgatgtgcaactggcaactctggctcagagagtcaaggaagttttgccccatgtgccattgggtgtcatccagagagacctggccaagactggctgtgtagacttgactatcactaatctgcttgagggggccgtagctttcatgcctgaagacatcaccaagggaactcagtccctacccacagcctctgcctccaagtttcccagctctggcccggtgacccctcagccaacagccctaacatttgccaagtcttcctgggcccggcaggagagcctgcaggagcgcaagcaagcactatatgaatacgcaagaaggagattcacagagagacgagcccaggaggctgactgagctcaaaggaacaggatggcacccagagccgcaggacggagactgggggcagccctcacccaactcacaacaggctggatgggtgggtggtaaaaagggaaggatgaggctcccccaatgtcacattaaattcatggttttcattcaaaaaaaaaaaaaaaaaaaaaaaaaaaaaaaaaa

SEQ ID NO: 1721 - DNA, 475 bp, Homo sapiens
ggcacgagcttggaggaagaggactggcagttatgacaggaaggctctctatacctggctccccagtgttctgcccctggcactgagcatgaggagccaggctttggggagactttgcaatcacccccccaacctggtccattttccacaggtagctttcttgaactcaccttgacccctcctcagccagcagcccccacctccaggggcaaaggagctgaaagacagtcctgaactggggggagctgggatcacatcagccaggccctgtccctcacaggaagtgagatgaggtgataccatggatggtgactaaggccccaaagtccctgcctctctgcctccccagaaacctcacagccaggccagcccccagagcagagcctgtgtaaacatgcccaggaggggaggaggggttgctacatatgagaaacagttaaaaataaatttaaaaagcaaaaaaaaaaaaaaaaaa

SEQ ID NO: 1722 - DNA, 2708 bp, Homo sapiens
  misc_feature (1953)..(1953): n equals a,t,g, or c
agcctctttggctcaaaagggtgkgttatgaacgaacctccttcagtccaactatccagacgttcattctctctgccatttggcacggggtatacccaggatattatctaacgtttctaacaggggtgttaatgacattagcagcaagagctatgagaaataactttagacattatttcattgaaccttcccaactgaaattattttatgatgttataacatggatagtaactcaagtagcaataagttacacagttgtgccatttgtgcttctttctataaaaccatcactcacgttttacagctcctggtattattgcctgcacattcttggtatcttagtattattgttgttgccagtgaaaaaaactcaaagaagaaagaatacacatgaaaacattcagctctcacaatccaaaaagtttgatgaaggagaaaattctttgggacagaacagtttttctacaacaaacaatgtttgcaatcagaatcaagaaatagcctcgagacattcatcactaaagcagtgatcgggaaggctctgagggctgttttttttttttgatgttaacagaaaccaatcttagcaccttttcaaggggtttgagtttgttggaaaagcagttaactggggggaaatggacagttatagataaggaatttcctgtacaccagattggaaatggagtgaaacaagccctcccatgccatgtccccgtgggccacgccttatgtaagaatatttccatatttcagtgggcactcccaacctcagcacttgtccgtagggtcacacgcgtgccctgttgctgaatgtatgttgcgtatcccaaggcactgaagaggtggaaaaataatcgtgtcaatctggatgatagagagaaattaacttttccaaatgaatgtcttgccttaaaccctctatttcctaaaatattgttcctaaatggtattttcaagtgtaatattgtgagaacgctactgcagtagttgatgttgtgtgctgtaaaggattttaggaggaatttgaaacaggatatttaagagtgtggatatttttaaaatgcaataaacatctcagtatttgaagggttttcttaaagtatgtcaaatgactacaatccatagtgaaactgtaaacagtaatggacgccaaattataggtagctgattttgctggagagtttaattaccttgtgcagtcaaagagcgcttccagaaggaatctcttaaaacataatgagaggtttggtaatgtgatattttaagcttattctttttcttaaaagagagaggtgacgaaggaaggcaggaatgaagaagcactgcgtggcctccggtggaatgcacggggcacagccgcgactctgcaggcagcttcccccccatgccagggctctgcgccgtcatgtgagacttaaaaaaaaagttgaatgacttcgtgatactttggacttctaaattaaatttatcaggcataaattatgtagaattagaggctttgaaaataatactggtaggttgctcaaaggttttgaaagagaaatcgctaggtaggttactatctggctaatccatttcttatccttgacaatttaattcatatttgggaaacttttagggaaatgaaaaataaaagtcactgagtctgggtgacattttttaagaataatataaattcagtttcaaactcttctcacattaaaattttgctgtgaactcttactaaaatgagttttargttctgtaagtggaaaaatgtgcttttattttatgggccatttttaccacaactaatcttgccttggattactaagcatctcctgcgatcccacagaggactgtggtggccacaggagctraagcagaagagtgggatttratgccaggcagtggagtggcctcagccccagattgtacctcctgccctgtaggaggggagggggcaaagcnttctgaacttcacctttgtttgacctatgtatggaacttacttttactttttgccttaaatttttaatgaaagcaaattttctgtgatggggttctctctctctttttttcggggggtggagtcactaataaatttgcaaatgaagttaaagacaaggcaaccatctggcttatgctatataatacttcatttaaagaagaaaggaaaagcaaatgcacttgcagcttttgaggtctcagcaaaaatgggcatgtgtcttttttgaagtttagaaatatcctaatctatttttatttatctaaaagtaagtgttttccggctgataaggctaaccctacccaggaaaggattgataactaaataaatttcctctgttttcccatgcattgaaattatgttggctgagccactgcacccagcttttgctggaagtttgattagcttgggttgaatctgtagaacaagttaagaagaactgacatcttgacaatatgaagtcttcctattcatgaaaatggaatatcttttcatttatgtagttcttctttgataacatcagacttttcctcttgtaaatcttgtaggtatttcattcatttatacccatttcattttgagggggactaatgtaaatggtaattttgtttgtttgtttgtttttgaaacggagttcactcttgtcgccactgcactccagcctgggtgacagaggaagctccgtctcacaaaaaaaaaaaaaaaaaaaaaactcgag

SEQ ID NO: 1723 - DNA, 1314 bp, Homo sapiens
tcgacccacgcgtccgggtaattgtttgaaatctaaaatgtcaactttctatattttcatttttatgaacaacactgttcgtaaaggcagtaatgcttcgtgtaattactggtacataaaagtctgattttgaaagtcactgtaaactaagcctgttttctgcctttctttctagtaacaacccttcagcagcgtctgttacagcctgacttccagccagtctgtgcttcacagctctatcctcgccacaaacatcttctgatcaaacggtccctgcgctgccgtgtaagtattccattctgtagactgaccatttgtacaagaggaaagcaaaaataaatgtggctggtgtctgactaatgtcaaaacctttggaatgtattaaatacagaaaatacttgtagagaacatactaattgccaggcactattttaaatgctttcaatataaacagctcttacaactctgtgaggtaggtactactgttaaacctgttttacaaatgtagaaaatgaagtatctgaaggttaagtacatagggttaacccctaaaagaatagtgaaagagtgtgaacttttaggctagtgttcaggctcagggaggaccaataaaaaataatcaatttaaaagaaagcaagaaaaatcagcaaaatccaggctctggtaatctacagaacaaatgacagagtttcttcaataaataaattgtaaaaacaaaatggaaaagaaaccttttagaggagtactatccaacagaactttctatgggtgatggaagtatyctgtgtctgtacagtccccgcatgatagccactaggcacatgtggctcttgagcacatgaaatgtgatagtgcagctgaggtactgagtcagtctttaatttcatttaaataaccacatgtcgctagtggctaatgttacttaatcattctctagattagaagagacttaaagtttaccaaacacaatgtatagagtttacgtagattcggattcaaacaaaacagaaagaaagggcccaggggaggagggaagaagggaaagaggaaagaaggaaagaaaaatttgtgaaatctttgagaaaatttaaacactggtagcattttcgatgctattaaaaaactattgggcagggcacagtgacatgcacttgtagtcccagctactctggaggctgaggcaggagaatcccttgagcctgaggagtttgagactgtagtgtgtgatgatggtgcctgtgaatagccactgcactccagcctaggcaacacagaaagaccctgtctcttaaaaaaaaaaaaaaagggcggcc

SEQ ID NO: 1724 - DNA, 1022 bp, Homo sapiens
ccacgcgtccgggagcgcagactgtgtccctgacaatgggaacagccgacagtgatgagatggccccggaggccccacagcacacccacatcgatgtgcacatccaccaggagtctgccctggccaagctcctgctcacctgctgctctgcgctgcggccccgggccacccaggccaggggcagcagccggctgctggtggcctcgtgggtgatgcagatcgtgctggggatcttgagtgcagtcctaggaggatttttctacatccgcgactacaccctcctcgtcacctcgggagctgccatctggacaggggctgtggctgtgctggctggagctgctgccttcatttacgagaaacggggtggtacatactgggccctgctgaggactctgctagcgctggcagctttctccacagccatcgctgccctcaaactttggaatgaagatttccgatatggctactcttattacaacagtgcctgccgcatctccagctcgagtgactggaacactccagcccccactcagagtccagaagaagtcagaaggctacacctatgtacctccttcatggacatgctgaaggccttgttcagaacccttcaggccatgctcttgggtgtctggattctgctgcttctggcatctctggcccctctgtggctgtactgctggagaatgttcccaaccaaagggaaaagagaccagaaggaaatgttggaagtgagtggaatctagccatgcctctcctgattattagtgcctggtgcttctgcaccgggcgtccctgcatctgactgctggaagaagaaccagactgaggaaaagaggctcttcaacagccccagttatcctggccccatgaccgtggccacagccctgctccagcagcacttgcccattccttacaccccttccccatcctgctccgcttcatgtcccctcctgagtagtcatgtgataataaactctcatgttattgttaaaaaaaaaaaaaaaaaaaaaaaaaaaaaaaaa

SEQ ID NO: 1725 - DNA, 2820 bp, Homo sapiens
  misc_feature (68)..(68): n equals a,t,g, or c
  misc_feature (2818)..(2818): n equals a,t,g, or c
  misc_feature (2820)..(2820): n equals a,t,g, or c
aattcggcacgagccgcggtctccggaggctttatctgcagtgctgcctgcccgctgggtggtactgntacctagtgggtyttggggaccttcgaaatcgccgccgctctcacaatggcttgggtccagactgcgccacagcctctcgggagacgtgggccctcggaacctttttagtgccggactccgggccgcagagattcccgcggcagcaggtatcacaggtggcagggactcagctcggaattctgtatagaaaaagcacctggatcccagtctttcaatggcttcaagacaaccagaagtgcctgctcttgaggctagtgcgcctctaggcaagatgtccctgcccatcgggatataccgccgggcagtcagctatgatgataccctcgaggaccctgcgcccatgactcctcctccatcggacatgggcagcgtcccttggaagccagtgattccagagcgcaagtatcagcacctcgccaaggtggaggaaggagaggccagtctaccctcccctgccatgaccctgtcatcagccattgacagtgtggacaaggtcccagtggtgaaggctaaagctacccatgtcatcatgaattctctgatcacaaaacagacccaggaaagcattcagcattttgagcgacaggcagggctgagagatgctggctacacaccccacaagggcctcaccaccgaggagaccaagtaccttcgagtggccgaagcactccacaaactaaagttacagagtggagaggtaacaaaagaagagaggcagcctgcatcagcccagtccaccccaagcaccactccgcactcttcacctaagcagaggcccaggggctggttcacttctggttcttccacagccttacctggcccaaatcctagcaccatggactctggaagtggggataaggacagaaacttgtcagataagtggagcctctttggaccgagatcccttcagaagtacgattctggaagttttgccacccaggcctaccgaggagcccagaagccctctccattggaactgatacgtgcccaggccaaccgaatggctgaagatccagcagccttgaagccccccaagatggacatcccagtgatggaaggaaagaaacagccaccacgggcccataacctcaaaccccgtgacctgaatgtgctcacacccactggcttctagagccctctttccagggattctggtaaaggtggtttcttgcatcccactccccttttaccttggctttgacataggaaaggtatatttaaaaacttaatcagctgggcgtggtggctcacgcctgtaatcccagcactttgggaggccaaggtaggtggatacctgaggtcaggagttcaagaccagcctggccaacatggtgaaaccccgtctctactaaaaatacaaaaattagctgggcgtggtggtgggcgcctgtagtcccagctacttgggaggctgaggcaggagaatcgcctgaacccaggaagcagatgttggaccgagctgagatcatgccattacactccagcctgggcgacagaacgagacgccatcaataaataaataaataaagtaaagtaaaaaacctattaaattgaggctagagctggagatgtaattggtttttgagaaacattagtataaagcttgcccttgttgtgtggaagaagccattttgtactgctttaaagttagactaatattctcagcacgggtgtatggggacctcattacctatttttttcatcatttaccctaggtaagaactttgatcactgcttactaggtaaagaatgtttgtactgttccaaaacccaggcttctttattcctttaccactatccatgtgagcattgacaaatcatggcttagaggtgctcactgactcgctaagacgactttggccctgttgatgactggtgctgtgctccagccttatcagttaggggacccaaggtttgtttgggacctgggtacaggtaaaagccagacttggcagggacccctctttctaggctgaaccttgagtccccctgctttttggcagacctaatggatcactgtcttgcagctagttcttcatgtggggcctcttaggccagtgccggaggaggcatgctcctctttctatgccacagaacaaacactactctagcagagcctttcttgcactttaaagtgagattaatttagctgtaatttggttaaaaacttcctaagagagaaaattaagtctactgatttggtataggtaaatggacattaaacttttttaaagtaaaggagatggtagataccgttagattatagtcttgaggttcatgtgaagccagtggtgttaacttactttgatttccttgttcaggtcagggcctggaacgcctgtgcggggaggtcactcaattcaaaattttctgtatgaaagcatttttcaccaaaatgagcctcatccctttatgcaacacataaccttactgagggagggaaatacrgaagccacctttttatttctcttcactgtgtacaagttcacttgttgtcttgaacactgtctcaaatacctgctttttgttttggatagtaccttgtctgtataagaagctggcctttccatagagaggccctggagtctaaaattatgagaacaattaatttatttgtgtcttctattatgatctcgttttgacaataaaaatccttactactttctcaaaaaaaaaaaaaaaaaaaaaaaaaaaaaaaaaaaaaaaaaaaaaaaaaaaaaaaaaaaaaaaaaaaaaaaaaaaaaaaaancn

SEQ ID NO: 1726 - DNA, 787 bp, Homo sapiens
ccacgcgtccgcatacccaccaggcatcttataagccattgttgaagcaagttgtggaggaaatatttcatcccgagaggccagattccgttgatattgaacacatgtcttcaggcctcactgatctccttaaaactggatttagcatgttcatgaaggtgagccggcctcatcctagtgactaccccctcctgatcctctttgtggtaggtggggtcacagtctctgaagtgaaaatggtcaaagatcttgtggcatcattgaagccaggaacccaggtaatcgtgctgtccacacgactcctgaagccacttaacattcctgagctgttatttgcaactgaccgactgcatccagaccttggcttctgagcatccgctaagaagataagacctactcaagctggaaatgccgatgcaattttctgccaccactccaaatactcctccacaaccagcgtccctgtcactaattgcgagaatgatggaattctgcctgaagggtcttgatacctactcagtgaggtactttgcttggattgctgtgattcttaaaaaaaaaaaaaaaaagtttttttattttcctgaaggcgacagtctgtcttttggcgagtccaattagtgatcgtttccatttatccttaaccctctgtttgtgatcttcctgattccacctacaagttcattagttctaaataaaagcctgttggcaagtgaaaaaaaaaaaaaaaaaaaaaaaaaaaaaaaaaaaaaaaaaaaaaaaaaaaaaaaaaaaaaaaaaaaaaaaa

SEQ ID NO: 1727 - DNA, 2638 bp, Homo sapiens
cccacgcgtccggaggtctacagtatttgtgttggcatagtttttgtaaaaaaaaagattaaaaaatatcaggatggtggaaaaactagatctgtgtatctctgttttggcatgcatttattcagtatcttctagcaatggtttttctctgttgatctaccgtagtatcctatttttaagtttattttatttttaaggagtattgtcatcacttttcaaggtgtcttgacttctacacaaagtatatatattcaggactttaaaaaatagcagtacacatttaacagtagcgaattacaccaaaatgatttactttgagatttgaataatttgcatagcagtaaaatgtgttttgtgtaacatacaaatagaaaaatgacccagtatcttaattgatacttactggagagtatcagaattacccagcagctcttacagaatgccataaattctttaagactaaatattgaaatcaattatttgaagtaatgttwctgatttactgttaaaagttgctgagctcagtttttggagatatcatttatgcctgcctgttcccttatgacagtgaggccttctttggctccacctagtatgataatcatgggttctgttttagttgatgagaagtggctcctatgaatgcctctgctcaatttctttttattttactttattttatttttaggggtctcgccaactcctgggctcaagtgattctcctgcttccacctccccacagtgctgggattacaggcatgagccaccacgcctggctctctgttcttttcagtgtctccgtgccatcagtcagcagtgcttacatgtttagcatattgtcatgcagtttctcttctgttcccacgagatatttttggrcaaaaaattgacaaaagtacatgtgtttttccccacctatcccttagaaaacctaatgtgtactgctatttttaaaaccaaaaagagacagcgtgacgatgcgtaaagcatttttcttagcctttcctttgtcttgatctgttaatgagaacaaaactgccagactcaaaatactctactattgtgctgaaagaaatacaatttagattgcacaaaatttgaaaatataactcagctgtcttttaaaagagttgtgttgttatctacaagactattagcagtcttttttcagagcaaattttaacagctagttgtgagtggtttaaaatatagaaaattattaaaatcttagtttgaggggttttatagtgggagaaaaaacaggaccaaagtttatgtgccttcttcagtagtcttaattgaccttttcttcctatttgagactaaagtagtatcagtattctggttttcaggaaatatgtactatatagttttaaaagaatgttgtcccaccaactattcatccaagcaaagaattgtaactataaataaagtctcagttacacttttgcctttatcacataatattcattgtagagcattgtgcaggtccaagaatagagctgctcaaaatctttgtggtagtttccttagtttttgtaacctgaggcatatgttccagagaacagggatatttgtctggtccagtgaccttggtgatcatagtcataattgaaagatgcctatggcatgcttaaatcagcattgtcaactgatttgttgttgtattattttcacttcttggatctatgtagtagttgtaataacaaatatttaaatagctatttttttgatgccattaaaaaaatcatactctggccttttttcccccttactgttgtttcccagatcttttaaaaattcatcccatatccagaaagtaccagttataaagattgctgaccaagcaaagttttgcatcaaagtgtcacctcattgctctgaccaaagactgactgttgtggttttaactcctctctgtaaagcattttgcattttccccaagctcctttctgaaagaagacccagtgcagagcggcctttactttcaatttctactgctgaatagactacttagagaaaatgtgagtttcagtgtgaacagaatggattaggatgacgagtttgatgggcattttcagtactgtatctaagaaaaaaaaaatagcacagctaggagcctctgacattgtctggtgttttacgtggtctgttcatcaaaattccccttttcagtttttaagaatgttcgtctaacagaagaaaatgctgtaaatatttgtaacaacattttttttaacaaggccaaaaaagaaaaaaaggtttttgggaacaaatgaacttataaagtggttttatataaaacatcaattgtcttgtatattttggataagcagcagtaccagctttcatttgtaacagtctgtggcattggraaaaaaggagtctgtgattgttgaagtgaattatgttataaatgcaaagagaagataaaatattaaaaaacatattttctaaatgcgtagtgcatggttaattcaagcttctgtacactacagtatattccattttcgttcagtttgtatatttgctgactattacttgatatctctaatctcttttcctaacaaatatagcattgtagcatgccttttaataaatgtcatgacatctgtactctcttaaaaaaaaaaaaaaa

SEQ ID NO: 1728 - DNA, 787 bp, Homo sapiens
  misc_feature (4)..(4): n equals a,t,g, or c
  misc_feature (11)..(11): n equals a,t,g, or c
  misc_feature (13)..(13): n equals a,t,g, or c
agangggaaancntggtactccgtgcaggtaccggtccggaattcccgggtcgacccacgcgtcmgacagtccacagctgaagagcaaggtttcgtggcagcacggcccggcccctcaccctctgtccccacgaggggacccatgggggctgtctttgcagggcacagatgaccaaagtcccttcctgcttcctgttacctgtcttgctcctggggagaaagaggggcctgatgagactccactcaggtgcacacatcaccaggtgcatctgcaggcaccgggctggctgcttgcagccaggagaaggtcagcgagaaggagtgtatgagtgtgagtgtgtgtgcatggaagttggggcactgggcgtctgactccctccccacccaagagaggaaggacccctcaccacccccactggcgagacagtttactttgccgacttgccatgtttttgccaaaaccaagattttgaaggaaatgagtggccagcgccagggcccagccatgtggcctgcccagcctcaatgtcacttggyggcggggtggggtgggggtgggcagcagcatcccagccttgagatgcttcactttccttctctgtaaccagactttgaaaaattgttcgtttcatcaggctctgttcctcaatggccttttgctacgtgcctcccgagaaatttgtctttttgtataaatgacaaagtgttgaaaatgtatttcctgaaataaatgtttcaaatgcagaaacccaaaaaaaaaaaaaaaaaaaaaaaaaaaaaaaaaaat

SEQ ID NO: 1729 - DNA, 799 bp, Homo sapiens
  misc_feature (4)..(4): n equals a,t,g, or c
  misc_feature (11)..(11): n equals a,t,g, or c
  misc_feature (13)..(13): n equals a,t,g, or c
  misc_feature (779)..(779): n equals a,t,g, or c
  misc_feature (793)..(793): n equals a,t,g, or c
agangggaaancntggtactccgtgcaggtaccggtccggaattcccgggtcgacccacgggcgtcaggggtgcacagtccacagctgaagagcaaggtttcgtggcagcacggcccggcccctcaccctctgtccccacgaggggacccatgggggctgtctttgcagggcacagatgaccaaagtcccttcctgcttcctgttacctgtcttgctcctggggagaaagaggggcctgatgagactccactcaggtgcacacatcaccaggtgcatctgcaggcaccgggctggctgcttgcagccaggagaaggtcagcgagaaggagtgtatgagtgtgagtgtgtgtgcatggaagttggggcactgggcgtctgactccctccccacccaagagaggaaggacccctcaccacccccactggcgagacagtttactttgccgacttgccatgtttttgccaaaaccaagattttgaaggaaatgagtggccagcgccagggcccaggccatgtggcctgcccagcctcaatgtcacttggyggcggggtggggtgggggtgggcagcagcatcccagccttgagatgcttcactttccttctctgtaaccagactttgaaaaattgttcgtttcatcaggctctgttcctcaatggccttttgctacgtgcctcccgagaaatttgtctttttgtataaatgacaaagtgttgaaaatgtatttcctgaaataaatgtttcaaatgcagaaacccaaaaaaaaaaaaaaggggnggccgttttaaagnatccaa

SEQ ID NO: 1730 - DNA, 1726 bp, Homo sapiens
  misc_feature (1695)..(1695): n equals a,t,g, or c
  misc_feature (1707)..(1707): n equals a,t,g, or c
  misc_feature (1710)..(1710): n equals a,t,g, or c
  misc_feature (1724)..(1724): n equals a,t,g, or c
gtcatggcggcggccgccccaatgccggaggtckgcccctgagacagcgggttccgccgaagctccgctgcagtacagcctgctcctgcagtacctggtgggtgacaagcgtcagccccggctcctggagcctgggagcctgggcgggatcccaagtccagccaagagtgaggagcagaagatgatcgagaaggcgatggaaagctgcgctttcaaggctgcgctggcctgcgtgggaggatttgtcttaggaggtgcatttggggtgtttaccgctggcatcgataccaacgtgggctttgaccctaaggatccttaccgtacaccgactgcaaaagaagtgctgaaagacatggggcagagaggaatgtcctatgccaaaaatttcgccattgtgggagccatgttttcttgtactgagtgtttgatagaatcttaccggggaacatcagactggaagaacagtgtcatcagtggctgcatcacgggaggagctattggtttcagagctggcttaaaggctggggccattggttgtggaggttttgctgctttctctgctgcgattgattattacctccggtgagagtaattgcctgcagggaaggatgatgccagccccggatccgggctgctctctggaggacagtttctgtaccacaccagggccttgcttcagggcctgaagacattcattttccctcatgtcgttggtattctragggagctgcctggcttctctgcctccagcctttggggtagccacactttgctgctcctggactccagccagccttcacagaggacgtcccgtgccagattctctcacagcagatcgggagacaggatgttgacatataggaattcagctccacaaagcttcaggcctgaccacagctggccctctaggttgtttggtgttgtgggcacagaggtgacagtgtctctgcaggcactcaggaagctgttctaccttggaactccatgcaactatccgtctcgaataccagggcagggcaaggcggactgatgccgtccaaccaattatctcacttgttttgtgttctgtcatccttgttttttttttaaaaatacactcccctcccccaccgccacacaccttacagttcaaaaggttggtttatttgtattttattttcaaattccctattccaaaaatagtgccgggtggcccaaagataacatctgaagggaaagaatgagaaagctcccagggaagcgggggatggggcgctgaggcagggttgttagaggactgtgtcatcctcaccaagctcattacatctgccagggcctgcctcaagaagcccagcccagccttttcctgggatgcagtgaaatcccatccatgaactcgatgggcccctcctgtgccggccgagaggcacacactgccttcacgacgtgactgctggacctggccgagcttgaggccacatgtgaagggtcctgctgtggtcatcttggtgactcggtcacagcagctactggccaagatcagacgtcgctgaggggctgttcaccaccatcctcgttctccagggtcaaggaagtgttttaacatgtcgtgttttcgacttgaccttgtggtatttttcttggcctagttgtgtgccatggatattaaaaaaaaaaaaaaaaatccgtttacaaaaaaaaaaaaaaaaaaaaccngggggggggccnggnaccaaattcccccnaa

SEQ ID NO: 1731 - DNA, 936 bp, Homo sapiens
  misc_feature (168)..(168): n equals a,t,g, or c
gaaataatgtcatgcataatacattcttcaacactatactaattactaagcacctaatatattgttattttgtttgttttttaaactgcatattttgtcagtgtggcatctcttgtctgtgaaatattcctttaacacatgtggtgtattttctcacctacgtatgtntcctcttcctaagtagtttaaaacacacacacgcgcgcgcgcgctgtgcacatgcttattcattgactaagttatccatgaacctgtcatttctgtcttctggagcaacatggaatctcatatttctatcttaatcacatatgtttaattttgcctttgttttgtggtctgtgggtacatttgttatttttagtatcaagtcatttggctaaatcatattaaattgcaatcacctaaaatcccctggttattttgacttaaatgactgtcatctttggtttcccttacttagaacgtcacacagttaattttttttttcaacctaatggcaagtgtgtgtgtgtgttcttggagtagttctgctggctatgaagagtatgtagtaatatgctaaagctttgtaaactcttcttttgttgttttggaagatggagtgttgctctgttgcccaggctggagtgcagtgatgtgattttggctcactagagtctccaccttctgggctcaagcagtcctctcacctcagcctccctggtttgtggaactacaggggcatgccagcatgcccggataatttttgtattttttttcttttgtagatacagagtctcactatgttgcccaggctagtctcaaactcctgagctcaagcagtcctcctgcctcagcttcctgaagtgttgggattacaggcatgagccattgcacctggccctaaattttaacagatacaaaactataagtttatacttaaaaaaaaaaaaaaaa

SEQ ID NO: 1732 - DNA, 698 bp, Homo sapiens
gcttctttaagattcgtctctgggaagagatttacccagtagagatcagagccggacattttattgttttccaagtttgaccttttcatttcaggagcatcaagcatgaagagccaatccagtttaagtgtgggcatcttgagagtaacactgtgtcttgttccttcttgtgttcctgctattgactgcaatgctcagtaaatgtttcaggcatccacgaatgaatgattgaacaaatcaacaattaatcaattaataaatgaaagctatcatcatcaggtggaaataatgcttttaagtaagactaagggcttttatcactacagagcataatagaaaggaaacaagccaattaataagaaataattttgcttaaaaaataatttttcaggcctggctcggtggcctcacatctgtaattccagcactttgggaggccaaggcaggaggatcacttgagcccaggagtctgagaccaccctgggcaacatggtgaaaccctatctctacmaaaaatwcaaaaaattagccgggtgtkgtggtgcgtgcctgtagtcccagctactcaggaggctgaggtgagaggatcacttgagcccgggaggtcgaggctgcaatgagccatagtcgccaccgcattccagcctgggtgacagagtgagaccttgcctcgaaaaaaaaaaaaaaagggcggccgc

SEQ ID NO: 1733 - DNA, 903 bp, Homo sapiens
ccgggtcgacccacgcgtccgctgcatccaaggaactagcttctaaaaaatccctgcctatgaattattacacagtattctaccatgttcaagaacaactacctagagactgtttcgtggtaagtgaaggagcaaatactatggacattggacggactgtgcttcagaactaccttcctcgtcacaggcttgatgctggtactttcggaacaatgggagttggtttgggatttgctattgcagctgccgtggtggctaaagatagaagccctgggcaatggatcatctgtgtggaaggagacagtgcatttgggttttctggcatggaggtagaaaccatctgcaggtacaacttgccaatcatactgttggtagtgaataacaatggaatttaccaaggttttgatacagatacttggaaagaaatgttaaaatttcaagatgctactgcagtggtccctccaatgtgtttgctgccaaattcacattatgagcaagtcatgactgcatttggaggcaaagggtattttgtacaaacaccagaagaactccaaaaatccctgaggcagagcctagcagacacaactaaaccttctcttatcaacatcatgattgagccacaagccacacggaaggcccaggattttcattggctgacccgctctaatatgtaaataaagacgccagttggtggtcttgagttttctctttcttgcaagatgaaattttattttccacagcaaaattactctactgttaaaattgtgcaaaataaaataaacatttaaaatgaaaaaaaaaaaaaaaaaaaaaaaaaaaaaaaaaaaaaaaaaaaaaaaaaaaaaaaaaaaaaaaaaaaaaaaaaaaaaaaaaaaaaaaaaaaaaaaaaaaaaaaaaaaaaaa

SEQ ID NO: 1734 - DNA, 1971 bp, Homo sapiens
  misc_feature (4)..(4): n equals a,t,g, or c
  misc_feature (1270)..(1270): n equals a,t,g, or c
taanccaagattgcatcattgcaatgccagcctgggaacagagcaagaccctgtctcaagggaggaaaaaataaaaaaataaataaaaatttaaaaaaagaacacttgaagttactcagatcaggactcatgcagagaaaagccaacaggagcaacaccccacattaggggaggaagacacctggggattcactgacttcagttgtgtgaattttaccctatgaccttgcttgctttatgagacagcagaggtggccaaggtcaatcctactgctctgtggtgaactctgcttttctctcgttaccataggtaaagggtcatgctcctatgtaagccttcctgttccccagtcatttgtgcacggggtaggccatcatctcctgcctattcaagggaatgactagtcctgtcttctgtatcctcagtcaccaacttctcagttagtgttgaaccaagcctatgttcaaaacatgactgagacagacctcaatccatagagatttatttagccaaggtccaaggacacatctaggaaaaaatacgggatcacaggagcatctgcgccttctamtttttccaaagagggttttgggaacttcagtatttaaaggggaaacagcaagcaggtgaggaaaaaaagcgaggaagtgtaggcagtgacagatgctcacattcttgtgaaactctgtttaccctagtaaatctgcattttacatgtgaaaagagggagtaaaggaaatagtcaataatgcattcctctcaggataggcccacgtggatttttaatcttgtccttgccctgtgaagataagctggtaactgacattgtcagggtgagattcagcagaactcagttttaggactaacttacagaggagctgtgtatcctgaagattcagcgactggcaaggaatttccttgggagcaatgtgtgagggaggccatctgaggagatctgtggctttcttttgttgtgggaatctggcttatggatgaatctacgacacaggattgtgaaattacagctctttgggaacaaaaggaaggcagtattgcatgacttagtttcccagcttcactttccctttggcatggtgagtttggggtcttgagagkctattttctttcacacccatcagcactgttaagtaagcaggaagacaacctgaggttggctctttactttgagktcctacataataaattgcagcctaatttagtacataaacccaaacctaatttaggagtaaattttttgtagcagatagncagatttcagccaatcacaggcttccagctaacaagactatgcccaaataaggcaaatgcctcatcacatgatgctcaaataaggcagccacctaggcgaggccaatcaggtaacttttctactttgcttaattgttcagcctgtacaaatttgctgcttatgactgctgagcagagctgtctaaacctcttctggtttggagtgctgccttatatatgaattgttctttggtcacataaaattggttaaatttaacttctctaaagttttgtattaaattgtatgtaaaacattggtagcacaatttggattcagatacccaaatattgactatgataatgtaaataatccttaagcagactgatttacaaaggcctgaacaagtttgatattctgaatattcacttcttctgatgaaaaaattgccaagaccttacaattggcaggaaaaaaatgtgtgttggttaaataagttatgttaacaacaagaacattaccacaattagaaaactcttactatgccaggcactattataaacacacctttgtaccttttttaatcctgaaaaatttctaataaatatgcatttaatattatttgtatttaatattaagtgtatttaatattgcccctgttttgtgaattaatgcagcaataaactggcttgcaatggaaaaaaaaaaaaaaaagggcgsccgc

SEQ ID NO: 1735 - DNA, 1086 bp, Homo sapiens
ccacgcgtccgcgagaaactggagagtgagaagctaaatgtggctgaggtcacccagtcagagattgctcagaagcaaaaactgcagactgtcctggagaagatcaatgaaaccctgaaacttcctcccaggagcatcaagtggaatgtggattctgttcatgccaagagcctggtggccatcttacacctgctcgttgctctgtctcagtatttccgtgcaccaattcgactcccagaccatgtttccatccaagtggttgtggtccagaaacgagaaggaatcctccagtctcggcaaatccaagaggaaataactggtaacacagaggctctttccgggaggcatgaacgtgatgcctttgacaccttgttcgaccatgccccagacaagctgaatgtggtgaaaaagacactcatcactttcgtgaacaagcacctgaataaactgaacctggaggtcacagaactggaaacccagtttgcagatggggtgtacctggtgctgttcatggggctcctggagggctactttgtgcccctgcacagcttcttcctgaccccggacagctttgaacagaaggtcttgaatgtctcctttgcctttgagctcatgcaagatggagggttggaaaagccaaaaccgcggccagaagacatagtcaactgtgacctgaaatctacactacgagtgttgtacaacctcttcaccaagtaccgtaacgtggagtgaggggctgccctgggcccaccactgcccaagagttcttgctgttggcgtactggaccctcctccgaactgccttaccctgcttattcctgtctcttgcactgtgctctcccacaagtccagctgcaacccagagatagtggaaactgaaattaggaaggaaatcatcaataactcagtgggctgacccatccctcccaggcgctggggaccaacctagcaatgaaggttgggaaggttgttcccttcccggtgccaggtccagatttccctcatgatttgggaaccagcttaggcaaaagagtccccacaagatgaaaataaagatcctagttaccattcaaaaaaaaaaaaaaa

SEQ ID NO: 1736 - DNA, 559 bp, Homo sapiens
ggcgagaagacgacagaagggatggtgatgaatccatttatatttaatgtaattactgatacagttcagtttaagtctagcatattgctacttacttttgcctcaatttttctctcttcttttcctgccttctcttattttaatcaaatagtcttgactatctcattacatcatgtattctagttattttatgtatctcaatattattggtttagtggctaacttagcaattacaacaaaactaactaatactaacatctcagacgctcaggaaatagaaaccgtctgaactatcctacccgccatcatcctagtcctcatcgccctcccatccctacgcatcctttacataacagacgmggtcaacgatycctcccttaccatcaaatcaattggccaccaatggtactgaacctacgagtacaccgactaaggcggactagtcttcaacttcctacatacttcccccattaatttcctagaaccaggcgactgcgactccttgacgttgacaatcgagtagtactcccggattgaagcccccattcgtataataatt

SEQ ID NO: 1737 - DNA, 1425 bp, Homo sapiens
gacggtgtgtcagaggtcaggtgaatatcgcagatgaggcaaaactttgtagcccaattcgttcaacttttgaagtgttggttgtgcgatgtgtggtcaggtgttgtcgtggagaagaattgggccccttctgttgaccaatgccagctgcaggtattgcagttttaggtgcatctcatcgatctgctgaacatacatctcagatgtaatggtttcgccaggattcagaaagctgtagtggagcagacctgcagcaaaccaccaaacactgaccataactctttttgggtgcaaatttggctttcggaagtgctttggagcttctcgatccaaccactgagctggtggtcgcccgttgtcacggttgtcatataaaatccacttttcattgcacgtcaaaatccgattgagaaatgcttcatcattgttcgatagaataaaagaaamcatttcaaaatgacttttttgatttttggtcagctcatgaggcacccacttatcgagctttttcacctttccaatttgcttgaaatgccaaacaaccatagaatggtcgatgttgagttcttgggcaacttctcgcatagttgtaagaggatcagcttcaatgattgctcacaattggttattgtcaacttctgatggccgacaactgtgcttctcatcttcaaagttcccatcccctttgtaaagcttcttgaaccaccactgccctgtacattcattagcagttcctgggaaaatgcattgttgttgttgcgaattgtctctgctgctttacgacccattttgaactcaaataagaaaatcgctcaaattycctttttgtctggcatcatttcaaaagtgtaaaataaatgtaaaataaacagcaagtaagaagtcattagcaaaaaagaataaagtgagaaacacacattgaaatgatgtataacataaccacatttatttaagaatgtattacaatatcaaatgacaaatttcaacaatgcaaaaacctcaattgcttttgcaccaacctaatatatgtatccctcaaacaactaactatacttagcatctctcaatgtgctcactgcccatttttatatcttccttgaagaagtctctctttaaatgtgttttttaaaggaattttcttgttaatattgaattacagttataggaatttttatatcttcaagatataagtgctttattagaaatatgacttgcaagtaatttctcccagtctatagtttatgttttcatgttcttaccagtaaaatattaattctttgtcatacaaacataaacaaattttattaatctagcaagtagaagtaacttggaagtcatacttgcaatattaaggagaacttactgtttcaacctagtccttcaagaactaaaatgtaaaaaaaaaaaaaaaaaatgatcctcgag

SEQ ID NO: 1738 - DNA, 2324 bp, Homo sapiens
ggcacgaggccaggccacttggaaaaactatggaattctttttgaatgagtctgcttgtaatgtcactctgctacttccttggtgagctatttgaactctctgcctttaacctcccctttgttcatagggctcgtcctccagtcactactgtagaggcaggaggggagctcttatatccatagctgcttgattccccctgtattttgtctttctgttaacgcacataagcacatcatagactacataacagcagtgtgaggagttcaatacatgcatgtagacatacatctcaaccaaacttagtgtcagaaaaagcaacttcaaaattcataattcagtgaaaagaagaagaacatggttggtccaaatgccacgacaagctcaacaatcacaccaggaatagaacctcataaaactcttgtgctaagaagcagttttgtgataatcaaagcatctctcttttcactcaggtctaggtactgaggttaagttagttatacaaggtcacaccaataattaggagtatacctaggagccaaactcaagtcttgtttacatttgtacatttcacaaaactttataaattctccatcattaaatatgtcctggattatctaatctacacacacactgtccagtaagaaagaattttctgcagaaagtctcaacttccagtgagcccactaatctctaaaagacatgtcttacttgatttaatgttaatttctccccacaatgcattctcttcctctttccacgcagttctattttgatggatcctgataagccttgtacctaggaaattcttccaggctagtttttccactacaggcgctggcgtttcccactgaccatcatcatagccggtgcataatgagcccaccaagctcttgaatatgtccagagccaaatgcagaagagaaaggactgacctgggccactgttcagtgttttactgtaacacaaaacaatagaaagtgctcttttattcactcaagtcctaaaggtgctgtactctggattaaagaggtagcttggggcaaacagaaaccccaaaagactcatgtttttctttggccttaggaagctcagacctgactttgtaggccaagtttggttatggtatgaggactttacacttaagcttttatcttaatcctcaattgcctaacataattacttttgtcttatacatatttctgtaagtcattgtttatttttcttgaagaacaaggtaaattactttcaccattttttttttattttgaaatagtcacccaaagttttcaagatatttaccagaggaaagttttagtgtgccctttacccagtttcactaaatggttacattttacataaataatcaaaatcaagaaattgacactggtgcaatatgtatatgtgtagttctaggtcatgttctcacatatgtagattcctgtaaccctggagcaccctgaatcaagatacacaactattccatccccacaaagatctttcctgctatctcttcatatcgtacccactcccttcaccccccgtgtattagtccattctcagaccactataaagaaatacccaggactgggtaatttttaaaggaaagagggctaattgacttacagttctgcatggctggggaagcctcaggaaacttataatcatggcggaaggaaaagcaggcgtgtcttacgtggccagctggtaagagagagagtgtgtaagagcaaggaaaactgctttataaaacccatcagatctcatgagaactcactcactatcatgagaacagcatggagaaactgcccccataattcaatcacttccctccctccacacatgaggattacaattcaagatgagatttgggtggggacacagacccagactacatcacctggcacccaccaacctgttctccattgccataattttgtcattttgagaatgcatataaatcagttcatgtagtatgtgaaggtaaatatatttttgaagtacatttattttttcactcatctttttttctctagatcattttcatttaccattttattaacatatccacttattcaagcagaagacttggctgggaaagccaccactggagagattcaaaatgttctaagaccactcttacttcactgtagcatataatttggtttagtaacttacacgtaaaaattttatagatgataggacagataactatatctttattctctgtggcagattcgataatggcttcccaaagatgttatccatgccttaatcccttgaacttgtgaatgtcaccctgtatggcaaaaaaaaaaaaaaaaaa

SEQ ID NO: 1739 - DNA, 2041 bp, Homo sapiens
  misc_feature (2017)..(2017): n equals a,t,g, or c
gggtgaggggaaaggtatgtgtttgcatcttctgttagcgatttctgggattctgaatcttcactgtcacttagttctgtgcagttgtgggagatatacccagaagacacaggcaaatacaacctgggtaactagctaggggtttgttcccaagtccctatcttatatgtcctggcgagctgccctaaactacgtgtgaggaataaagactgtgttctttcagctcagacctgtgattcttgagtgttttaagagtcttttaaaatctatgaaccctctttccagcaagtcgtaaatgtacagaatagttttgtgtaggttttcagggaattcatgaataccactaaagctgttccagtagactgtattgggagtcttataggataattactggcaggcttgggcaacctcttggccccattcccttagctgtgtgtcttgatkytagccctgtgaaagagtccttcactcttaagatttagagcccagatgacctttgccagccgtttaccttttttcctggggtgtcttgttgatcctgctgggtttctatgggtacaagaccctcttaaacatgaagcagctctatatttgtcgttttaaaatttattttattatttttaacaaattggccagagaccgcctttttaaaaattttctttcctttccttttcttcctttcccttctgtttccttcccttccccttttctttttcttcctttttttccttttctttcctttttcctttccttccttcctttcttgcctttcttcctttattgctttcctttcttttctttctttcacccaggctggagtgcagcmcactgtaacctcaagttcctgggcttccaagwagtgggactataggccacaccaccatggccccataatcttttttctttttttacttttttttttttttagagacgggggtctcattatgttgcccaaggatgatctcagactcctgggctcaagcagtcttcccaccttgatctcccaaagtgctgggattatagatgtgagccaccatgcccaatctttgtttttttaattggcaagtaaaaattgtgaagacttatggtgtacaacatgctgtgttgataatgtgtatacattttgtaatggttaaatcaagctctttaacatgtgtatcacctcacatacttatttttttgtggtgagaacacttgaaatctactctcagcaattttaaagtatataatatgttgttactaactgtagtcacatcactatgatgtgcaatcgatctcttgaacttactcctatctacctgacattttgcatgctttacatctccccagtctcccaacccccagcttctgagaaccaccattctacttyckgcttcwatgagtccaattttgtttgctttagaggtggtacctcactctgtcacccaggctagagtgcagtggcacaatcatggctccctgcaatctctaactcctgggctmaagtgatcctcccgcctcagtctcccaagtagctgagaccataggcgtcsgcmaccacgcccccagctaagktttaaattttttgtagagataaggtcttaycakgtgcccaggctggcctcaacctccaaagtgctgggawtgcagttgtgagccactgcactaagcctgagtcgacttttttggatccacacttaagtgagatcatgcagtatttgtctttgtatgcctggcttatttcatttaagataatattttccaggtttatctgtgttgtcttaaatgacaagatttattttgttgttgttaaggctgaatagattctgttgtatatatatgctacattatctttatctcctcatctgttgatggatacttaggttgattccctatcttggctattgtgaatagtcttgcaataatcatgagagttcagatatctcttcaacatattgacttcattttttggggatatatacctagtagttggttttatatccatctcattaataactacatgaaagacaaaaagagnaaagaagaataatccagctatcta

SEQ ID NO: 1740 - DNA, 2054 bp, Homo sapiens
gggtgaggggaaaggtatgtgtttgcatcttctgttagcgatttctgggattctgaatcttcactgtcacttagttctgtgcagttgtgggagatatacccagaagacacaggcaaatacaacctgggtaactagctaggggtttgttcccaagtccctatcttatatgtcctggcgagctgccctaaactacgtgtgaggaataaagactgtgttctttcagctcagacctgtgattcttgagtgttttaagagtcttttaaaatctatgaaccctctttccagcaagtcgtaaatgtacagaatagttttgtgtaggttttcagggaattcatgaataccactaaagctgttccagtagactgtattgggagtcttataggataattactggcaggcttgggcaacctcttggccccattcccttagctgtgtgtcttgatkytagccctgtgaaagagtccttcactcttaagatttagagcccagatgacctttgccagccgtttaccttttttcctggggtgtcttgttgatcctgctgggtttctatgggtacaagaccctcttaaacatgaagcagctctatatttgtcgttttaaaatttattttattatttttaacaaattggccagagaccgcctttttaaaaattttctttcctttccttttcttcctttcccttctgtttccttcccttccccttttctttttcttcctttttttccttttctttcctttttcctttccttccttcctttcttgcctttcttcctttattgctttcctttcttttctttctttcacccaggctggagtgcagcmcactgtaacctcaagttcctgggcttccaagwagtgggactataggccacaccaccatggccccataatcttttttctttttttacttttttttttttttagagacgggggtctcattatgttgcccaaggatgatctcagactcctgggctcaagcagtcttcccaccttgatctcccaaagtgctgggattatagatgtgagccaccatgcccaatctttgtttttttaattggcaagtaaaaattgtgaagacttatggtgtacaacatgctgtgttgataatgtgtatacattttgtaatggttaaatcaagctctttaacatgtgtatcacctcacatacttatttttttgtggtgagaacacttgaaatctactctcagcaattttaaagtatataatatgttgttactaactgtagtcacatcactatgatgtgcaatcgatctcttgaacttactcctatctacctgacattttgcatgctttacatctccccagtctcccaacccccagcttctgagaaccaccattctacttyckgcttcwatgagtccaattttgtttgctttagaggtggtacctcactctgtcacccaggctagagtgcagtggcacaatcatggctccctgcaatctctaactcctgggctmaagtgatcctcccgcctcagtctcccaagtagctgagaccataggcgtcsgcmaccacgcccccagctaagktttaaattttttgtagagataaggtcttaycakgtgcccaggctggcctcaacctccaaagtgctgggawtgcagttgtgagccactgcactaagcctgagtcgacttttttggattccacacttaagtgagatcatgcagtatttgtctttgtatgcctggcttatttcatttaagataatattttccaggtttatctgtgttgtcttaaatgacaagatttattttgttgttgttaaggctgaatagattctgttgtatatatatgctacattatctttatctcctcatctgttgatggatacttaggttgattccctatcttggctattgtgaatagtcttgcaataatcatgagagttcagatatctcttcaacatattgacttcattttttggggatatatacctagtagttggttttatatccatctcattaataactacatgaaagacaaaaagagaaaagaagaataatccagctatctaaagtcacgaaaa

SEQ ID NO: 1741 - DNA, 4038 bp, Homo sapiens
  misc_feature (1764)..(1764): n equals a,t,g, or c
  misc_feature (4030)..(4030): n equals a,t,g, or c
  misc_feature (4037)..(4037): n equals a,t,g, or c
caggaactkgcgctkaagaccctgggracagatggcctttttctcttttcctccttggacactgacggggatatgtacatcagccctgaggagttcaaacccattgctgagaagctaacagggtcaactcccgcggccagctacgaggaggaggagttgccccctgaccctagcgaggagacgctcaccatagaagcccgattccagcctctgctcccggagaccatgaccaagagcaaagatggcttcctaggggtctcccgcctcgccctgtccggcctccgaaactggacagccgccgcctcaccaagtgcagtgtttgccacccgccacttccagcccttccttcccccgccaggccaggagctgggtgagccctggtggatcatccccagtgagctgagcatgttcactggctacctgtccaacaaccgcttctatccaccgccgcccaagggcaaggaggtcatcatccaccggctcctgagcatgttccaccctcggccctttgtgaagacccgctttgcccctcagggagctgtggcctgcctgactgccatcagcgacttctactacactgtgatgttccggatccatgccgagttccagctcagtgagccgsccgacttccccttttggttctcccctgctcagttcaccggcsacatcatcctctccaaagacgccacccacgtccgcracttccggctcttcgtgcccaaccacaggtctctgaatgtggacatggagtggctttacggggccagtgaaagcagcaacatggaggtggacatcggctacataccccaratggagctggaggccacgggcccctctgtgccctccgtgatcctggatgaggatggcagcatgatcgacagccacctgccctcaggggagcccctgcagtttgtgtttgaggagatcaagtgggcagcaggagctgagctgggaggaggctgcccggcgcytggaggtggccatgtacccyttcaagaagtctcctacttgccgttcactgaggccttcgaccgagccaaggctgagaacaagctggtgcactcaatcctgctgtggggggccctggatgaccagtcctgctgaggttcagggcggactctccgggagactgtcctggaaagttcgcccatcctcaccctgctcaacgagagcttcatcagcacctggtccctggtgaaggagctggaggaactgcagaacaaacaggagaactcgtcccaccagaagctggctggcctgcacctggagaagtacagcttccccgtggagatgatgatctgcctgcccaatggcaccgtggtccatcacatcaatgccaactacttcttggacatcacctccgtgaagcccgaggaaatcgagagcaatctcttcagcttctcatccacctttgaagacccgtccacggccacctacatgcagttcctgaaggagggactccggcgtggcctgcccctcctccagccctagagtgcctggacgggatctgatgcacaggcccccacgcctcagagccagagtggtcctcagcccatttcagcactgcagatgccgcccactcccaccccactcctaggctgccttggagggtacaagatccactgagggtggccaccacagccttggctccatggtggcgggtagacaagggatgcctgggctgactgggcagaggaacctctagctctgactgtcactcggctctccctacccatttggctctggaagctgcttggccccccnagatcagggcctgggtgaactccctggacctttcctagccagccgcacagtctaggcccttgtggggtgaagaatggagggaggagcaggctaggaagacggggccaccaccctctccttgctttcagcccttcccacaggaaacatcaagaagccccagccaggaggggccaggctgccaaggcggctcccctgtttatctagagccttcgttcctggccataccccggactgccctcctgtgcctgatgtccccagctggggtcagtctcaacaggagccagtcttctggagcctctgggcagaaccctccatcagagtggaaatcagacgggaccccctgcagcttccctgaccacgccactgaccagctatctggggaagtttactgtgaaggggtttctgcctttagcaatggggttcactaagggggttcccgaggcccagggccaaggcactcccaccgcctaccttagcacagggtctctgcaggactgcgggagccagcgctcctgccgcccctcttgcccctcagaccttgcatccacagaagcacaacccagccaaacaccacagccttctccagagccggcactgtcccggcaaccaggggtgccccaggctagctcttctacctctggggcaccacggactccccttggccactcttgggactttggtccacgtcctgagccactgaccacggccagtctctctttttatatgtgcagaaaagtgtttttacacaaactttctcatggtttgtaggtatttttttataaccccagtgctgaggagaaaggaggggcagtggcttccccggcagcagccccatgatggctgaatccgaaatcctcgatgggtccagcttgatgtctttgcagctgcacctatgggaagaagtagtcctctcttccttctcctcttcagctttttaaaaacagtcctcagaggatccatgatccccagcactgtcccatcctccacaaaggcccacaggcatgcctgtactctctttcattaaggtcttgaagtcaggctgccccctccccagcccccagttctctccccaccccctcaccccacccggggctcactcagcctggcagaggaagaaggaaggcagacatctccgcagccactcctgggccttttatgtgccgagttaccccacttgccttgggcgtgtccactgagccttccccagccagtcttgttctcaattttgttttgttttgttttgagacggagtcttgctctgtcacccaggctggagtgctatggctcgatcttggctcactgcaacctccacctcccaggttcaagcaattctcttgcctcagcctcccgagtagctgggattacaggtgcatgccaccatggctggctaatttttgtatttttagtagagatggggtttcaccatattggtcaggctgatctggaacttctgacctcaggtgatccacctgcctcagcctcccaaagtgctgggattacaggcgtgagcaatcgtgcccagccttgttcttaattttgtatcatccagtcatcgctaatattacacgcaccttctcacttaatcctcacgacaagcctgtgaggcagatgctcattgttcccatcttgatgaaacttgagtctcagggaagtgaagtgacttgcccagggtcactcaggtagagttgagattcaaacccacatgtggctccaaagtctgcatctggatttgggggtgttttttggcatggcaccctcacctctctccctgcctgttttccccaaagtggaaaggaaggcctttcaaaccagagtgtctcactcccctctgacctccagaccagatggggcatgagccagccagctcagccaggctccctgtgtcctgggaggaagtgtccccatcccccatgccccttatggggagggagggcgtctgatgctctctctctgcctcccccccatcctgtcaggcacaggtgacgggggcagcccatgcgagcccttctcctgctgctctgggagggccagttccacattgagccagcctggtcccatggaaaatgatggcctgggctttctgaggccttatctgatgcctctgcagttcatgtcccccaccaggcctcgaggctcagggtgggagagggccccgggctgccctgtcactcctctaacacttccctcccctgtccccaacatgccctgtaataaaattagagaagactaaaaaaaaaaaaaaaaaaaaaaaaaaaaaaaaaaaaanaaaaaana

SEQ ID NO: 1742 - DNA, 1674 bp, Homo sapiens
  misc_feature (5)..(5): n equals a,t,g, or c
  misc_feature (8)..(8): n equals a,t,g, or c
  misc_feature (474)..(474): n equals a,t,g, or c
  misc_feature (505)..(505): n equals a,t,g, or c
  misc_feature (511)..(511): n equals a,t,g, or c
  misc_feature (606)..(606): n equals a,t,g, or c
ggcanagnatgacctttggtgaatatgtggcactaattttttttaccttaatcatattcttgtcaagtaggcaacccattgccccttggagaccacaccagccctgtaagttctcaccagcagcatggagattaggaagaggggctgctgtgaccaggagatacacacggctttaagtaactgagagcctaaagaaagtaacccagggagtccggtccagttttaatatttgtggatttgttgtcacacacattgtttagtcctgaaactaaaacctattttataaatagtagggttaattcctcgaaacaatttctttattaataaatgtcctgtgggtttagaaatatcaggtaaatatttgaatacagaatgatgattgcaattactgttacaagcgtgaaacacaaacttcagatcaaatctaaagttgctccatttaatgcatgctagcaacagccttaactttggatncagttatttgaaacactttcccggcatcttncccttnctaatgttgtggggtggaaaccggatggcaaatcactgtgagccggatacctcagcacagtccaccttgtgtgtgacttcacaaatgggggactncacaaatggggtaactgaatgttattactttcaaattttgacatggagcattatgatcaaggaaatggagctgccttatacattaaacccgtgatttaatcctattgacattttcatagccatgcctccagattttatctttttggcaaaattctgattccacagtttggtctgattgaaataaatattccctggacgtctggctaaaaattttgctaacaatcccagaggtgccattttcttattaataaatttcattggagccttatttcttactatattcaatttcgtttcaaacctgcaagtccctgggatggtcccacgactagggcctgcacatttcttacaatggcaaagcattttttaaaatttagggtcaggttgaaaaattctaggactaattctgtagagaggagggactgttaactaacgtgagtggggacagaggagtaggttaccacatttggagcagtaatagatgcaaacgatgtaaatttgaaatttgcccctttagttaaagaaggagcctgcaaagtccatttctctgttttcagccctgtcagtcacccatttaggatgttggcaaagtactgcttgagcagaatgtgtaagaaagtaataatgaaagcaaaagtatgtcagacagttacttcttccacatggttagaggcatgtgattttcagcactgtgtgttacagaaatgtcaggaatggtgtattataacgtgtgcaagataatgtcagtgtgcacagagggtcttttttccttatctgattagtactgttaatgttcaaagaataaaaatggttttacagtttagattctgagatagcaaaacctgatttttcaaccatgacctgcatgagagaagcatcctaggaagtcttagatcatacttttgagtttttaattttaatttatatagtgtttttttatgtcttaatatttttgtgaactggtgtaaattgttaatgcatataagcttgtgtatttttgtaaatagttttgtgatttatttcttgccccatatgtaaatatttagagtctcaaaaaaaaaaaaaaaaaaa

SEQ ID NO: 1743 - DNA, 878 bp, Homo sapiens
  misc_feature (5)..(5): n equals a,t,g, or c
  misc_feature (17)..(17): n equals a,t,g, or c
  misc_feature (28)..(28): n equals a,t,g, or c
  misc_feature (49)..(49): n equals a,t,g, or c
  misc_feature (60)..(60): n equals a,t,g, or c
  misc_feature (877)..(877): n equals a,t,g, or c
tcacncgggaaccgctntgaccatgatncgccargctsgaaattacccntcactaagggnacaaaagctggagctccaccgcggtggcggccgctctagaactagtgawcccccgggctgcaggaatycggcacgagctggcacacaccaccatgcacagttccttgttcaaaatgccaagaacctggatgactcatagtcaagaccctccaccagtaacatatattggcgagccagccaggagaccactacaggaaacactccatttattccacctgacttcccacttggctgcatcctcaaccattgaaatgaatttgaccctgataatctaaggaggaaacatttgatattcttttgcaataatacttggccccagtattgtttggaatctggagtttgctgttgaatgggaaagcgggatgacgttgcatgtatccaggctttggtgctgctgtcctaagaagggtcaggcctggtcagcatatggtgctctcctttggtgctatttggctccagtgtctttggagtctgaggaggtttggcctttaaaaatcaaactgccaccggaactgctttaaaaatgtttggttcacagccttcactggattacctattggagcaaacaaagtgtaaccatgtaaaacctgtgagcttgtattgatatctcatggctagagttccaaggtaaaagctattggatcttcgtttgtgtgtgtgtatacatgtctagatgtgtttatttgtatgtacacttattgttatatgttgtgtcaaccaaatcagcttataaataaaagagcactcataaattaaataaaaaaaaaaaaaaaaaaactccgggggggggcccggtaacccattccgccctaatagng

SEQ ID NO: 1744 - DNA, 1134 bp, Homo sapiens
ggcacgaggggcccagggcctcaacatgctccattctggtctactgttcccccacctcctttgcctccagcctccattgggagagctgttccccaacctaaaatggagtctaggggcactccagctggccctcctgaaaatgtacttcccttgtcgatggctcctcccctcagtcttgggctacctggccatggagctcctcagacagagcctaccaaggtggaggtcaagccagtgcctgcatctccccatccgaaacacaaggtgtctgccctggtgcaaagtccccagatgaaggctctagcatgtgtgtctgctgaaggtgtgactgttgaggagcctgcatcagagaggctaaagcctgagacccaagagaccaggcccagggagaagccccccttgcctgctaccaaggctgttcccacaccaaggcagagcactgtccccaagctgcctgctgtccacccagccccgtctaaggaagctgtccttcctgcctaccccacgtactcagggttctgaagatgtggtacaggctttcatcagtgagattgggaattgagggcatcggacctgtccagtctgctggagcagtttgagaaatcagaaggtgagggaacatgggtagttttgctccaactctttttttggtgatacttttttgggcccagccctgtagttgcttaaactagggtgagaggggacagccttagccactggagcagacccctaattgaagagagagacaagattgaactgtgacggtaatccaagccagggacggcagtgatacagtaaggaaggtattaaagagtagactgggaatccaggccaggcgtggtggctcatgcctgtaatcccagcactctgggaagctgaggcgggtggatcatgaggtccaggagtttgagaccagcctggccaacatggtgaaaccccgtatctactaaaaatacaaaaattagctgggcgaggtggcgggcacctgtaatcccagttactcgggaggctgaggcaggagaattgtttgaacccagcaggcagagattgcagtgagccgagatcgtgccattgcactctagcctgggccacagggtgagactctgtctcaaaaaaaaaaaaaaaaaaaaaaaa

SEQ ID NO: 1745 - DNA, 1260 bp, Homo sapiens
agcagacagtgcccccacctcccaccgccttgcctcactggcaatctggactcgatggagaacatccccccacctccatttggcactacccaagtggagtgtacccttgccctttccacctgtaccacccactccaacctcaccccagcttgcccaatgcttctggggaatttaatagctaccatgcaggccacagggaatttgtgaggcttcttttgtcatctttgtatctccagtttgtctttcttttctccatagccctgcctctactttccttccttggaatcaggggttcctttagcccatttgctttctctaccttggggaccccaggggccaagcagttctccatctagtcacaccaaaggcaaaaagcctggctacctcccccctagcacgtgagtccctactcccctcccctctgtttctgcccagctttgcttattttggggatttcaaggcagcagagggtagtgaggggagagcaggagaagcctctgtcctgtataggcaactgcctgactatgcggtgactgctgtaaccaagatcaggtccccagcccttttgtccattaacaccccttcttgatctttcaaaggcagctaattgctagcaaatccccccgattccggccttttccctctatttctttgttagaagttttctgtggagctgaaacccagcctctgtttgactgggtttcatttagcttagttgggttcttagagccccctgtttgttgttttgtgttgtttccaatgaaaagcaagtttaccctcagagttatgcttttccaaagaggctgatgtctttgtttttgttttttttaatgtttcaggttctaagtgaagtgagttggggaggggttgggagtgttagtaatcaaggtttagaacaccatgagatagttacccctgatctccagtccctagctgggggctggacagggggaagggagagaggatttctattcacctttaatatatttttacaaaaaaagcaaacaatttaaaaacaagcccaccgcttctgtacatgtctaaatatatttttagaagtgggtaggattgtgaatttctgatgcagggcctttttataaataggttagggtagcatcattcagacttctctgttgtttttgtccctgtctttttcttatgttgtgttactaatgtaatttatattttttttagatcctccctttcctatagagataaaagtgatttatcttggmaaaaaaaaaaaaaaaaaaactcgag

SEQ ID NO: 1746 - DNA, 1818 bp, Homo sapiens
  misc_feature (2)..(2): n equals a,t,g, or c
  misc_feature (16)..(16): n equals a,t,g, or c
gnaattcggcacgagnaaaagagtgattgtgagtgttagatatggcctttccctttcgtgcttctagccaccttgtcactgattttggaaacctcacttaacctctatgggtgggcctcaatttccatctaaaatagagaagtagggaggaattggatcaaaccagcccaagaaaatttaattaactatttcaaactctaatgaaaaatctctactttaaaaattgaaacacaaaaatgttctgggaggttctattcattgtctgctttcctacatttgccctgattacaagactgagttccttgataattgaaaccatgtctctttatctagtgccyagcatagtgccaagcacacagtgtatgcacagcctattggtatgaaagagaacacaacttcattaattctcatatctctccagttcacaccccttcatctcctgtaaaacaccccttcccctacaattatttctgttagtctctaggtgtttcttgtattcaagagtatgtccacagtttgggtgcctctgtgcattccttctatctgagcatctgccatcattggtgcctgccatgcactgctgggaacatttgacccctctgggagcatcttcctaatagatcccataaactgcaaagccttatggttaccaaaatgatggtgtatatatatacttggagccttgcaaagcccctaatgaaagtatttccttcaccagctagaagtactctcctttagcgatcagattaaaacacacacccaggtgtgtgttttaaagaaaaaggacccaagagggaaaaagtttccaaggcatgaatgaattaagagtggcaaatgctactgagatagaaagattaggacggagaaaacagcactcactctgacagtattctttccaactggatttggtaaataagagtgaagaggtacctckagtgagcactgggagaagtcatactggaagggataagcagtgattgacataagaaagtaaaataaattcaggttcatccagacacccccataatcttgccttgacccagaaacattgtgttcacaggactttcagcttcccacccccataagtaagcttcctaattatgatatcttggtcttgccaagcatttagagggccttactctgtggccctccagatagtgatttgaatgattaagtaaacctctttttagataagtgttctagtccagtctaacatcagcttgttggtctttttggcactgtcattgtccagtaccagcacattcttggctccttgccacatctctggcctcaatgtgggaggcaaagacagtgagcatttccagagtggtgagatgggtgcagcacataatgaggcgatgaccacacagcatctctgaacagcatgtccacacagggctcgaagtcattatgctgcatgtccacctcatgtccacaatagctgagcagttgagattggtggagtggaccttctcattactcatcatctarargaaggtcctcatcatctctacttctcaaaggggtagaattgaacctgaacctgcttgacagacaagagcccaagcctaaccaaggtggctgccatggtgacccttgccctgaaagccatttccattaatttaaaaattgtaggtatataggaactataataacaggcttaaaattaaaatttgctctgtttgttgggtcacacgtgtaatcccaatactttgggaggctaagccgggacgatcacttgagctcagaagtttgagactagcctgggcaacatagtgagatcccggtctctaccaaaaaaaaaaaaaaaaaactcga

SEQ ID NO: 1747 - DNA, 2154 bp, Homo sapiens
ggcacgagggcaggaatgtgggatcagcttagctggtggttctggctccaagttattcacacaaggctgcaatcaaggcgttgtctggggcttcggtctccgaagaccccaccggggctaaaggatccacttccaagctcactaatgtggctgttggcaggaggcgtcagttccttgctacatgcgcctctttgtattgctgctcatgacataacttccctggaaccagtgacccatgagagagagaaagcaaacccaagacagaagcagcagtctttgtataacctaaccacagaagtgacacgccatcacttctgccatatggttgttactggtcatacaagccaaccctggtacaatgtgggaggggcctatacaagggtataaataccgggagggagaatcattgaggactatcttagaggctgcctaccaaacaactcaagatattagcagcttaaacaagagaaaaatgtattttcctctaacgcagatatagtctatggaaacagtccaaagttgatatgatggttccatcttcatgtgagatccagacttcctccctcatctctttgccacttcatggtctaaggtggctactcaagctccagccatcacatctgcactccagccagtaggaagaaaaaagatctctttctttttacaaacacttcccagaacttgcacataccatgtctatttatattcccttggccagtaattcatcacaaggttacttccagcctgcaaaggaggctaaaaattttagtctttatttcacatgggttatgtgtccagaaagaattcagaggttctattactgagaagaaaggggggaaaatggaggtttggggataactagcaatctctgtttttgataacccaataaaggcaatgaactctttcacagaaaaaaaaaaaaaaaagaaatcatgtacatgcaaaagtgtgcatgcaacttcagagggtttacagatgcctgtgaagtcagtttatggatgtcacacaaagaacctctacacctctggccaggacctcagcctgttcctgtgtatgaacagtgttcacttagaccctttggacgaggtccctctgagagggcaaaggacacgcccagcacatttcctcaatggggcatgaaccacttcatctaatacctacgtggtaggctgtgtcaccccgggaagagtcgtcctggtgtctggcagattgtggacctcactttccttcagcgacttcatgcaaaacaagggctgataaggaagaaactgaaaggggttggtgtcacgggttatgctgcgggaccccccatttgtgttttcaagaatcagccaatagtgttcattggaattccagatcagcttttctctgctgacatttcaaatgccaggttacaagtacacaggcatggagccattctcaacactgttcaaattaaccatacttttcctagggctaaagataggtccaaggttaaaaccacaatgagataccactttacattgactagaacggctaaaataaaaaagaacaacaatgccaagtattaacgggagtgacaagcaagaggaactgtcgtctgttgctggaggtatgtaaaatagtccagccactttggaggacagtttgacagtttctttcaaagttatgcatgcacttaccataagacccacctatcccactcctgcaagagagaggaaagcatttgttcacaaaaagatttgaacatgagaccgggcgtggtggctcacacctgtaccagcactttgggaggctgaggcgggcagatcacctgaggtcaggagttcgagaccagcctggcctggtgaaatcctgtctctactaaaaatataggccgggcgcggtggctcactcctgcaaacccagtactttgggaggccgagacgggcagatcacgatgtcaggagatcgagaccatcctggctaacatggtgaaaccctgtctctactaaaaaatacaaaaaattagccgggcatggtgggtggcgcctgtagtcccagctactcgggaggctgaggcaggagaatggcgggaacccaggaggcggagcttgcagtgagccgagatcaccccactgcactccagcctgggcaacaaagcgagactccatctccaaaaaaaaaaaaaaaaaa

SEQ ID NO: 1748 - DNA, 947 bp, Homo sapiens
  misc_feature (423)..(423): n equals a,t,g, or c
gaattcggcacgagctttctagaggtaattactatgttcagattcctgggacctttccaggtatctgatgtataaatacctctctctctttccctctctttctaacacagatattagtattcctctgtgtcttactttatccccttaatagtatatcttggaaatcattgttttctttaaaaaaatgttttaattgaggtaagcattcattatacagtaaatgtcttgttccttttaactggctgcataccctgtcaacctatggctgtgccaacactggagagagtctgggttgagtatagtctttttgccattataaacagggttgcagtgaacattcatgtgtatacttctttgtacctatgtatgagtgtatcctggataaattcctaaaagtgacgccactggattggaggtcatttnttttttaaactttttattttgaaataattatagattcataagaagttgcaaaaacaggacagagaggccccagttgcccttcacctagtttctcccaatgatagcatcttacataacatgatacagcatggtatatcatatcaaaaccagcacattggtacaatctacaaaccttattcagatttcaccagttttacatgcccttgtgtgcatgtgtgtctgtgtctttgtggttttatgtgcttttatcaggagtagatttgtataacctcaaacaagatgcagaactgttctgtcagcacaaagatcccttgtgctacctcatagtcacaccaaacctcctctcctccttttgtcatcacggcattcctaactgttgacaagcagctaatctgttctccatctctgtaactttgttattttgagaatataattgaaatcgtatagcatgtaaccattgagatgggttttttcactcaccgtaattcccttgaagatcatccaagttgttgcatgtgtcaatg

SEQ ID NO: 1749 - DNA, 808 bp, Homo sapiens
agtccacgttctttaatagtggactcttgttccaaactggagcaacactcaaccctatctcggtcatattcttttgatttataagggattttgccgatttcggcctattggttaaaaaatgagctgatttaacaaaaatttaacgcgaattttagcaaaatattaacgcttacaatttgccattcgccattcaggctgcgcaactgttgggaagggcgatcggtgcgggcctcttcgctattacgccagctggcgaaagggggatgtgctgcaaggcgattaagttgggtaacgccagggttttcccagtcacgacgttgtaaaacgacggccagtgaattgtaatacgactcactatagggcgaattgggtaccgggccccccctcgtgtttttttttttttttttttccaggacaaaaaataaaatatttattgatctatcacagcgagacacaaaaagatgggcggggcaggaatgggaactgctctgaagttcagtggaccgagggagggatggggggtatacagtactgcatgtggggacaccccgggtggggaggagatgcctggcaccccagtctgcacagccccgcacgccctgggggagtgtaggatgggggtggaggcagggcacaggcggccatgacaggtcaaccaggttgatggtgggtgcacccagccagctagtggtgccgggcggtcaactggggacatggatggacggaccgatggatgaatggacggatgggcggatggattctacaagggcaaggtggctattcccagtgtggggtggtttctcgtgcc

SEQ ID NO: 1750 - DNA, 839 bp, Homo sapiens
  misc_feature (834)..(834): n equals a,t,g, or c
aagaagacattaaggaaatgtctgaagaaatggataagaacaaaaacttgttttcccaagmttttmcagagaatggtgataatcgaratgttattraagatactttgggttgtcttttgggcaggttatccttgctagastcagtagtgaatcaacgatgtcatcagatgaaagaaagacttcagcaaatactaaatttccaggtaagtaagatattatcaaaggatacgtgaccattctctaggtattcagtaatagtcagtcacgagtctgtgttacagacctggttgttgtttttctaaatgcgtaatgaagaacaagagcattgtagaaaatgaagggggttgaattaaaggattagaagctaaagattttttgctcctagaaatggaaggttgagaaaaccacccacttcaaactaaggactgaatagaattcaatcaataaaagtcaaatttatggatcattataattataatttttagttactaataccggagtttaaacacattgagaaagaatatgcmgaaaatggccgggcacagtgctcacgcctgtgatcccagcactttgggaggccacggcaggcaaatcatttgaggtcgggagtttgagaccagcttggccaacataatgcaacccatctctactaaaaatmcaaagattagcagggtgtggtggtgcaggcctgtaatcccagctacttggaggctgaggcaggaggatcgcttgaacccgggacgcagaggtagcagtgaactgagattgcaccactgcactccagcctaggtgacagagcaagactccgtctcaaaaaaaaaaaaaaaaaaaaantcgag

SEQ ID NO: 1751 - DNA, 971 bp, Homo sapiens
ggcacgagctcatgtttcctagtatatatgaagtgacatgtataaatgacatgaatgctttcaggcaaaatgtttagattgtgatttgaaaatgatgtgcatatgagaagtcgttaagatgttggccaaaacagtgtgtgtataaattgagctccattgtttatgcattttgctttgcttcctcttgcattgacccatccactttttcaagttcacaatgattcttttttgctgctgccattgaaggatgccactgatacctgtgagagggcactctttggcatttgcattctgaaagttttgcattttcttatttgtgtttactttttaagttcatccttgttctgcatgacagatatgccagggcctgcaggaatagcattaaaattctgttgttttttagataactttattagtttaagttttaaatgataaggaccgagagctacaattcctctgttttttattctgaagctgaaccacacaaatattgaaaaacaatgctttgactggagtgttatatatatttccacctaactagcttcacacaataaaatctctaaagtttaaattgcttgaacctgagaggcggaggttgcagtgagccgagattgccccactgcactctagcctgggggatagagtgaaactctacctccaaaaaaaaagaaaagaaaaataactgaggaagacagttttcacagtgggtcaggtgagcctagaattattgaatatcgtcctttaacctatagctatgactctaggttaaagctcctcctcagcttgctccagtcaagagtatctatgtatttgagccatttcctgaaaccagactctagtgtttctgatcaggaccagctcagtctttaagtttctgaagtttgtttgctattttataattatattcgtgaatactgtgcattgaagaaataataaatctattgttgctttaaaaaaaaaaaaaaaaaaaa

SEQ ID NO: 1752 - DNA, 2351 bp, Homo sapiens
  misc_feature (72)..(72): n equals a,t,g, or c
  misc_feature (141)..(141): n equals a,t,g, or c
  misc_feature (294)..(294): n equals a,t,g, or c
  misc_feature (303)..(303): n equals a,t,g, or c
attctacagcagaatatacttggaaaaactcaagtttttccacatacttggaaaaactctctagcatttgtnggaatttagtgtaattaagtgaaacctacctagcaactgtagtaattaaaagcgtggggtgtgcttttngttgagatccgtgaatgtttctgtaaacacaattttgattgtgttgcgcttcttaaaggttgtgatgacaacggtaattttaaccacttgaccgtatatcgttttcatccttgaagactgtcatatatttccaagtgtctttcctccctggtnattttaggntaaagatcgaggtccggaagccactaggagattttttaattggttttattggagcattaacctgggagcgatcctgtcgttaggtggcattgcctatattcagcagaacgtcagctttgtcactggttatgcgatccccactgtctgcgtcggccttgcttttgtggycttcctctgtggccagagcgttttcatcaccaagcctcctgatggcagtgccttcaccgacatgttcaagatactgacgtattcctgctgttcccagaagcgaagtggagagcgccagagtaatggatgcagacaacatatgttttacagagtcttcatttgaggattccagaaatttcaaatattacaaccactcctcacacgctccctgcagcctggctgaccatgtttgatgctgtgctcatcctcctgctcatccctctgaaggacaaactggtcgatcccattttgagaagacatggcctgctcccatcctccctgaagaggatcgccgtgggcatgttctttgtcatgtgctcrgcctttgctgcaggaattttggagagtaaaaggctgaaccttgttaaagagaaaaccattaatcagaccatcggcaacgtcgtctaccatgctgccgatctgtcgctgtggtggcaggtgccgcagtacttgctgattgggatcagcgagatctttgcaagtatcgcaggcctggaatttgcatactcagctgcccccaagtccatgcagagtgccataatgggcttgttctttttcttctctggcgtcgggtcgttcgtgggttctggactgctggcactggtgtctatcaaagccatcggatggatgagcagtcacacagactttggtaatattaacggctgctatttgaactattactttttccttctggctgctattcaaggagctaccctcctgcttttcctcattatttctgtgaaatatgaccatcatcgagaccatcagcgatcaagagccaatggcgtgcccaccagcaggagggcctgaccttcctgaggccatgtgcggtttctgaggctgacatgtcagtaactgactggggtgcactgagaacaggcaagactttaaattcccataaaatgtctgacttcactgaaacttgcatgttgcctggattgatttcttctttccctctatccaaaggagcttggtaagtgccttactgcagcgtgtctcctggcacgctgggccctccgggaggagagctgcagatttcgagtatgtcgcttgtcattcaaggtctctgtgaatcctctagctgggttcccttttttacagaaactcacaaatggagattgcaaagtcttggggaactccacgtgttagttggcatcccagtttcttaaacaaatagtatcacctgcttcccatagccatatctcactgtaaaaaaaaaaattaataaactgttacttatatttaagaaagtgaggatttttttttttttaaagataaaagcatggtcagatgctgcaaggattttacataaatgccatatttatggtttccttcctgagaacaatcttgctcttgccatgttctttgatttaggctggtagtaaacacatttcatctgctgcttcaaaaagtacttactttttaaaccatcaacattacttttctttcttaaggcaaggcatgcataagagtcatttgagaccatgtgtcccatctcaagccacagagcaactcacggggtacttcacaccttacctagtcagagtgcttatatatagctttattttggtacgattgagactaaagactgatcatggttgtatgtaaggaaaacattcttttgaacagaaatagtgtaattaaaaataattgaaagtgttaaatgtgaacttgagctgtttgaccagtcacatttttgtattgttactgtacgtgtatctggggcttctccgtttgttaatactttttctgtatttgttgctgtatttttggcataactttattataaaaagcatctcaaatgcgaaatmmaaaaaaaaaaaaaaaaaattggcggccgc

SEQ ID NO: 1753 - DNA, 2516 bp, Homo sapiens
  misc_feature (72)..(72): n equals a,t,g, or c
  misc_feature (141)..(141): n equals a,t,g, or c
  misc_feature (294)..(294): n equals a,t,g, or c
  misc_feature (303)..(303): n equals a,t,g, or c
attctacagcagaatatacttggaaaaactcaagtttttccacatacttggaaaaactctctagcatttgtnggaatttagtgtaattaagtgaaacctacctagcaactgtagtaattaaaagcgtggggtgtgcttttngttgagatccgtgaatgtttctgtaaacacaattttgattgtgttgcgcttcttaaaggttgtgatgacaacggtaattttaaccacttgaccgtatatcgttttcatccttgaagactgtcatatatttccaagtgtctttcctccctggtnattttaggntaaagatcgaggtccggaagccacctaggagattttttaattggttttattggagcattaacctgggagcgatcctgtcgttaggtggcattgcctatattcagcagaacgtcagctttgtcactggttatgcgatccccactgtctgcgtcggccttgcttttgtggycttcctctgtggccagagcgttttcatcaccaagcctcctgatggcagtgccttcaccgayatgttcaagatactgacgtattcctgctgttcccagaagcgaagtggagagcgccagagtaatggtgaaggcattggagtctttcagcaatcttctaaacaaagtctgtttgattcatgtaagatgtctcatggtgggccatttacagaagagaaagtggaagatgtgaaagctctggtcaagattgtccctgttttcttggctttgataccttactggacagtgtatttccaaatgcagacaacatatgttttacagagtcttcatttgaggattccagaaatttcaaatattacaaccactcctcacacgctccctgcagcctggctgaccatgtttgatgctgtgctcatcctcctgctcatccctctgaaggacaaactggtcgatcccattttgagaagacatggcctgctcccatcctccctgaagaggatcgccgtgggcatgttctttgtcatgtgctcrgcctttgctgcaggaattttggagagtaaaaggctgaaccttgttaaagagaaaaccattaatcagaccatcggcaacgtcgtctaccatgctgccgatctgtcgctgtggtggcaggtgccgcagtacttgctgattgggatcagcgagatctttgcaagtatcgcaggcctggaatttgcatactcagctgcccccaagtccatgcagagtgccataatgggcttgttctttttcttctctggcgtcgggtcgttcgtgggttctggactgctggcactggtgtctatcaaagccatcggatggatgagcagtcacacagactttggtaatattaacggctgctatttgaactattactttttccttctggctgctattcaaggagctaccctcctgcttttcctcattatttctgtgaaatatgaccatcatcgagaccatcagcgatcaagagccaatggcgtgcccaccagcaggagggcctgaccttcctgaggccatgtgcggtttctgaggctgacatgtcagtaactgactggggtgcactgagaacaggcaagactttaaattcccataaaatgtctgacttcactgaaacttgcatgttgcctggattgatttcttctttccctctatccaaaggagcttggtaagtgccttactgcagcgtgtctcctggcacgctgggccctccgggaggagagctgcagatttcgagtatgtcgcttgtcattcaaggtctctgtgaatcctctagctgggttcccttttttacagaaactcacaaatggagattgcaaagtcttggggaactccacgtgttagttggcatcccagtttcttaaacaaatagtatcacctgcttcccatagccatatctcactgtaaaaaaaaaaattaataaactgttacttatatttaagaaagtgaggatttttttttttttaaagataaaagcatggtcagatgctgcaaggattttacataaatgccatatttatggtttccttcctgagaacaatcttgctcttgccatgttctttgatttaggctggtagtaaacacatttcatctgctgcttcaaaaagtacttactttttaaaccatcaacattacttttctttcttaaggcaaggcatgcataagagtcatttgagaccatgtgtcccatctcaagccacagagcaactcacggggtacttcacaccttacctagtcagagtgcttatatatagctttattttggtacgattgagactaaagactgatcatggttgtatgtaaggaaaacattcttttgaacagaaatagtgtaattaaaaataattgaaagtgttaaatgtgaacttgagctgtttgaccagtcacatttttgtattgttactgtacgtgtatctggggcttctccgtttgttaatactttttctgtatttgttgctgtatttttggcataactttattataaaaagcatctcaaatgcgaaatccaaaaaaaaaaaaaaaaaaaaaaaa

SEQ ID NO: 1754 - DNA, 2556 bp, Homo sapiens
  misc_feature (72)..(72): n equals a,t,g, or c
  misc_feature (141)..(141): n equals a,t,g, or c
  misc_feature (294)..(294): n equals a,t,g, or c
  misc_feature (303)..(303): n equals a,t,g, or c
attctacagcagaatatacttggaaaaactcaagtttttccacatacttggaaaaactctctagcatttgtnggaatttagtgtaattaagtgaaacctacctagcaactgtagtaattaaaagcgtggggtgtgcttttngttgagatccgtgaatgtttctgtaaacacaattttgattgtgttgcgcttcttaaaggttgtgatgacaacggtaattttaaccacttgaccgtatatcgttttcatccttgaagactgtcatatatttccaagtgtctttcctccctggtnattttaggntaaagatcgaggtccggaagccacctaggagattttttaattggttttattggagcattaacctgggagcgatcctgtcgttaggtggcattgcctatattcagcagaacgtcagctttgtcactggttatgcgatccccactgtctgcgtcggccttgcttttgtggycttcctctgtggccagagcgttttcatcaccaagcctcctgatggcagtgccttcaccgayatgttcaagatactgacgtattcctgctgttcccagaagcgaagtggagagcgccagagtaatggtgaaggcattggagtctttcagcaatcttctaaacaaagtctgtttgattcatgtaagatgtctcatggtgggccatttacagaagagaaagtggaagatgtgaaagctctggtcaagattgtccctgttttcttggctttgataccttactggacagtgtatttccaaatgcagacaacatatgttttacagagtcttcatttgaggattccagaaatttcaaatattacaaccactcctcacacgctccctgcagcctggctgaccatgtttgatgctgtgctcatcctcctgctcatccctctgaaggacaaactggtcgatcccattttgagaagacatggcctgctcccatcctccctgaagaggatcgccgtgggcatgttctttgtcatgtgctcrgcctttgctgcaggaattttggagagtaaaaggctgaaccttgttaaagagaaaaccattaatcagaccatcggcaacgtcgtctaccatgctgccgatctgtcgctgtggtggcaggtgccgcagtacttgctgattgggatcagcgagatctttgcaagtatcgcaggcctggaatttgcatactcagctgcccccaagtccatgcagagtgccataatgggcttgttctttttcttctctggcgtcgggtcgttcgtgggttctggactgctggcactggtgtctatcaaagccatcggatggatgagcagtcacacagactttggtaatattaacggctgctatttgaactattactttttccttctggctgctattcaaggagctaccctcctgcttttcctcattatttctgtgaaatatgaccatcatcgagaccatcagcgatcaagagccaatggcgtgcccaccagcaggagggcctgaccttcctgaggccatgtgcggtttctgaggctgacatgtcagtaactgactggggtgcactgagaacaggcaagactttaaattcccataaaatgtctgacttcactgaaacttgcatgttgcctggattgatttcttctttccctctatccaaaggagcttggtaagtgccttactgcagcgtgtctcctggcacgctgggccctccgggaggagagctgcagatttcgagtatgtcgcttgtcattcaaggtctctgtgaatcctctagctgggttcccttttttacagaaactcacaaatggagattgcaaagtcttggggaactccacgtgttagttggcatcccagtttcttaaacaaatagtatcacctgcttcccatagccatatctcactgtaaaaaaaaaaattaataaactgttacttatatttaagaaagtgaggatttttttttttttaaagataaaagcatggtcagatgctgcaaggattttacataaatgccatatttatggtttccttcctgagaacaatcttgctcttgccatgttctttgatttaggctggtagtaaacacatttcatctgctgcttcaaaaagtacttactttttaaaccatcaacattacttttctttcttaaggcaaggcatgcataagagtcatttgagaccatgtgtcccatctcaagccacagagcaactcacggggtacttcacaccttacctagtcagagtgcttatatatagctttattttggtacgattgagactaaagactgatcatggttgtatgtaaggaaaacattcttttgaacagaaatagtgtaattaaaaataattgaaagtgttaaatgtgaacttgagctgtttgaccagtcacatttttgtattgttactgtacgtgtatctggggcttctccgtttgttaatactttttctgtatttgttgctgtatttttggcataactttattataaaaagcatctcaaatgcgaaatccaaaaaaaaaaaaaaaaaaaaaaaaaaaaaaaaaaaaaaaaaaaaaaaaaaaaaaaaaaactcga

SEQ ID NO: 1755 - DNA, 2127 bp, Homo sapiens
  misc_feature (72)..(72): n equals a,t,g, or c
  misc_feature (141)..(141): n equals a,t,g, or c
  misc_feature (294)..(294): n equals a,t,g, or c
  misc_feature (303)..(303): n equals a,t,g, or c
  misc_feature (1938)..(1938): n equals a,t,g, or c
  misc_feature (2045)..(2045): n equals a,t,g, or c
  misc_feature (2117)..(2117): n equals a,t,g, or c
  misc_feature (2121)..(2121): n equals a,t,g, or c
attctacagcagaatatacttggaaaaactcaagtttttccacatacttggaaaaactctctagcatttgtnggaatttagtgtaattaagtgaaacctacctagcaactgtagtaattaaaagcgtggggtgtgcttttngttgagatccgtgaatgtttctgtaaacacaattttgattgtgttgcgcttcttaaaggttgtgatgacaacggtaattttaaccacttgaccgtatatcgttttcatccttgaagactgtcatatatttccaagtgtctttcctccctggtnattttaggntaaagatcgaggtccggaagccacctaggagattttttaattggttttattggagcattaacctgggagcgatcctgtcgttaggtggcattgcctatattcagcagaacgtcagctttgtcactggttatgcgatccccactgtctgcgtcggccttgcttttgtggycttcctctgtggccagagcgttttcatcaccaagcctcctgatggcagtgccttcaccgayatgttcaagatactgacgtattcctgctgttcccagaagcgaagtggagagcgccagagtaatggtgaaggcattggagtctttcagcaatcttctaaacaaagtctgtttgattcatgtaagatgtctcatggtgggccatttacagaagagaaagtggaagatgtgaaagctctggtcaagattgtccctgttttcttggctttgataccttactggacagtgtatttccaaatgcagacaacatatgttttacagagtcttcatttgaggattccagaaatttcaaatattacaaccactcctcacacgctccctgcagcctggctgaccatgtttgatgctgtgctcatcctcctgctcatccctctgaaggacaaactggtcgatcccattttgagaagacatggcctgctcccatcctccctgaagaggatcgccgtgggcatgttctttgtcatgtgctcrgcctttgctgcaggaattttggagagtaaaaggctgaaccttgttaaagagaaaaccattaatcagaccatcggcaacgtcgtctaccatgctgccgatctgtcgctgtggtggcaggtgccgcagtacttgctgattgggatcagcgagatctttgcaagtatcgcaggcctggaatttgcatactcagctgcccccaagtccatgcagagtgccataatgggcttgttctttttcttctctggcgtcgggtcgttcgtgggttctggactgctggcactggtgtctatcaaagccatcggatggatgagcagtcacacagactttggtaatattaacggctgctatttgaactattactttttccttctggctgctattcaaggagctaccctcctgcttttcctcattatttctgtgaaatatgaccatcatcgagaccatcagcgatcaagagccaatggcgtgcccaccagcaggagggcctgaccttcctgaggccatgtgcggtttctgaggctgacatgtcagtaactgactggggtgcactgagaacaggcaagactttaaattcccataaaatgtctgacttcactgaaacttgcatgttgcctggattgatttcttctttccctctatccaaaggagcttggtaagtgccttactgcagcgtgtctcctggcacgctgggccctccgggaggagagctgcagatttcgagtatgtcgcttgtcattcaaggtctctgtgaatcctctagctgggttcccttttttacagaaactcacaaatggagattgcaaagtcttggggaactccacgtgttagttggcatcccagtttcttaaacaaatagtatcacctgcttcccatagccatatctcactgtaaaaaaaaaaattaataaactgttacttatatttaagaaagtgaggantttttttttttttaaagataaaagcatggtcagatgctgcaaggattttacataaatgccatatttatggtttccttcctgagaacaatcttgctcttgccatgaanttgaaaaggctggtagtaaacacatttcatctgctgcttcaaaaagtacggggctttttggcccaaaagccntccntacggg

SEQ ID NO: 1756 - DNA, 1105 bp, Homo sapiens
ggcacgaggaacagaaaccagagcacagaaaatctttaatgttcagactgcatcacagtgcttccgatacaagcgacaaaaatcgagttaaaagcagattaaagaagtttattacccgaagaccttccctgaaaactctgcaagaaaaaggacttattaaagatcaaatttttggctctcatctgcacaaagtgtgtgaacgtgaaaattccacagttccgtggtttgtaaagcaatgcattgaaggctgttgagaaaagaggtctagatgttgatggaatatatcgagtttagtgggcaatctggcaacaatacagaagtttaagatttattgtcaaccaagtcgtttctggaataccagcccttctatcagaactggatggagacctgtggacacccctaagtaagctgcagatttttcacagtggtcatttgacctccagagcaagccaataatttgtcacttcattaaactgaagagaagctgaatttggacgacagccagtgggaggacatccacgttgtcaccggagcactgaagatgtttttccgggagctgcctgagccgctcttcccttacagtttctttgagcagtttgtggaagcgatcaaaaagcaagacaacaacacaagaattgaagctgtaaaatctcttgtacaaaaactccctccgccaaatcgtgacaccatgaaagtcctctttggacatctaactaagatagtggccaaagcctccaagaacctcatgtccacgcaaagcttggggattgtatttggacctacccttctgcgagctgaaaatgaaccaggaaacatggcgatccacatggtctaccagaaccagatagctgagctcatgctgagtgagttcagtaagatcttcggctcagaggaagactgacagacaagacaagctactgaatacgttcacatctgtcttgatgcctaatatttttacatttctgtaaacatatttctgaaatattttttgcctttcaagcgacagatgcctcattttgtgaaaacttaatgatgattttgtgtttaagttccaaacatttgaataaaataattgacaataaaaaaaaaaaaaaaaaaaaaaaaa

SEQ ID NO: 1757 - DNA, 1274 bp, Homo sapiens
ggctgatctcaaactcctgarctcaagtgatctgcctgcctcagcctcccaaagtgctgggattacaggcatgagccaccgcgcccggcctgaaagcattttagaaggctcctgactgaaagaacgggataaagtaagggggtatgggaacagaagatgacagcctggtatatctgggtgacatgcgtaggcagtctgttgtagtggcaattgtcagggctctggagttagactgtcttctttcaaatcttgcaagctgtctgatctcgggcgatttacttaacctctctgagagttctgtaaagtggagaataagaataccaccctacagatgatgaggattcaatgagattgggctggatacaaatcagcttttgttggcatcagcttgagaggagggatggacttgggagtggagagggtggatttgggggagaggacgccacacagtggcaggaactcgcagcaggtgactgagagtggaaggcacaagagagcccagatgctgagccagctcagaatagaaacggtattgatagcagaatgcaaagcagtatcactcgaatgacggatgtttaattggatttctccagggctgactcttcattgtcacctaccctggcataccacacccattcctaatatttgtctcagctcccccttctctctragtgcctggaatcttttcctgacccctccaagttgtgccctcccctgtaagttgcatctcgatttgagcagccttctcccagactatcctgatctctgtcttccttgaactccagtcactggctggagctttcacagtcccagtcgagagcatgggctcagatcagactgcccgagttcaagttcctaccacttactctgtgacgttgaacaagttctttatcctgtctaagagataataataatagtccttacctcatagagttgctgcaagagttcactgagatgatttgtgtaaaatgcttaatccagagcctgacaccaatcatatgaaagcattcaataagtactagcaattatacttctgtattgkttgatgtttttatagtgagaccatatttatgtaatatttgtataattttttaaatagaccaagctgggtgtggtggtatatgcctgtgttcccagctacttgggaggctgaagcaggagaatcgcctgaacctgggaggtgaggttgcagtgagccaagatcccgccattgcactacagcctggacgacaagagcgaaactccatctcaaaaaaaaaaaaaaaaaactcgag

SEQ ID NO: 1758 - DNA, 1491 bp, Homo sapiens
ggcacgagattcagagcaacagcgggctatggcgccccggcgcttgcaccaacatcaccatgggtgtcgtctgcaagcttcctcgtgctgagcagagcagcttctccccatcagcgcttccagagaacccagcggccctggtggtggtgctgatggcggtgctgctgctcctggccttgctgaccgcagccctcatcctttaccggaggcgccagagcatcgagcgcggggcctttgagggtgcccgctacagccgcagcagctccagccccaccgaggccactgagaagaacatcctggtgtcagacatggaaatgaatgagcaacaagaatagagccaggcgcgtgggcagggccagggcgggaggagctggggagctggggccctgggtcagtctggccccccaccagctgcctgtccagttggcctatggaagggtgcccttgggagtcgctgttgggagccggagctgggcagagcctgggctggtggggtgccaccctcccacaagggctgggctgagacccagctgagtgcagcgtggcgtttccctttctgggggggcctgaggtcttgtcacctggtcctgtgcccccacaggaaccagaggtaggatgggagggggaacgagagcctctttctccccagagcccccggcccaggcctgttgatccgcgccccaggacccccttctttgcagagcccgaggagcctcccctgtcccctcgggcagatctgttgtgtctctcttcccacctggcagcctcagctctgtgcccctcaccctgctccctctcgccccttctctcccaccccttccttctgagccgggccctggggattggggagccctcttgttcctgatgagggtcagctgagggggctgagcatccatcactcctgtgcctgctggggtggctgtggggcgtggcaggaggggcctaggtgggttgggcctgagaaccagggcacgggtgtggtgtctgctgggctggagataagactggggagagacaccccaacctcccagggtgggagctgggccgggctgggatgtcatctcctgccgggcgggggagggctctgcccctggaagagtcccctgtggggaccaaaataagttccctaacatctccagctcctggctctggtttggagcaaggggaagggttgccagagtcctgggggccccagaggagcaggagtctgggagggcccagagttcaccctctagtggatccaggaggagcagcacccgagccctggagtggcccagtacccttccaagaggccacagtcccagccaggacaaagtatgcggcccatcctggtgcgacagcgtgggacaatgtgaacatggactcgaagacatggccctttctctgtagttgattttttaaatgtgccattattgtttttaaaaaaaaaggaaaaaagaaaagcaaacaaataaaacacctttaagaggcttgaaaaaaaaaaaaaaaaaa

SEQ ID NO: 1759 - DNA, 3045 bp, Homo sapiens
  misc_feature (128)..(128): n equals a,t,g, or c
  misc_feature (141)..(141): n equals a,t,g, or c
  misc_feature (739)..(739): n equals a,t,g, or c
  misc_feature (770)..(770): n equals a,t,g, or c
cccagaattgtccctccaaagcccccaccccataaaagccattgtcctcctcctccgacccttctggtatccttgttaagagagccttttccactgtgaggaagtgtggaaaaatagcctctgtgtgngtgtgtgtgtgtntgtgtgtgtgtgtgtaatctgttaggttggggataggttttctgctagccaatattaaaagagacctgcaataaaaaaattaccctgatctgatagaaagcaagtgtttttgtatgtgtgggtgaatgtgtgttcatgcccgtatatgtctacacacagatgacaaattatatttgaaatcgttggaaaataaattcagatcaaaatgcctttcaggcccattacctagaaatctatcttaaaacctgggtatgttcctaaggtcatttctttgcttatgctaaattaattacaattatgaatggaggatattctactgtacttttttaaaaagaaactatttttgtgtttgaaagtgaaaccaacatccagatctatagcagagtccttattcttctcataaatctttttactttggctacaaatagatgatggtatgattctattatatatttwatataaaatccatccaaattaagttttgggtaagtgtgttgtttaatctgaactatagtaacttaatactctaaacaatagttcactccatttggtcctttctccacagatgtaattatgttttcaactcaggaactatggncaaggaactttccccagatcaaattcyattnaacgctgagatacaagtcatccatgcacagccactatcataccctttattctcactgaaaggcagaactcagaacctgttattttatgtctgtaatcatgtactttggcatcttttggaggaaaggggcaggataactcactggaatgtacagtattttgctagtgcatttcaaggaatggaatcttctccagtaacaacccacaccgtcttccttcagggatttccaactggcactctgtgggtgctacacagaatgcaatttaatggatatttctcagcctggttcagaataaattgatcctttgatcccagaaagtatatactgaagtgtgggataaagattatgattaggggagggttggagacaaaagctgtaaattactatggctgatttatttctactatatacatatatattttttgcttttgtatatcctatataggaaactaagcattgtattttttttaacaaatctaaaaaagcactatgaactacaggtgtttgactttcaaaatatattttgtattgttaatatcttcacattgtgtgaatactggaagctgcagatctttgctaggacgcaataaatttatatactttttgaggggttcttctggggtgctaatcaggcccctgttatgcttagggggagccctggtgctacttgcttgaagttttcagtgtaagtaccctgatgccttttggaccttgggatcagatcaagagttttggagatcaggtaccaaggaaataaggacagtctagctgcctcaagtgaggggccctttgcatagctctccttccccctcactgaagctgggtagcctattggggttgagagggaaaatgtgaaatctcagaatttatctcccttagaagagagccagtaacttatgtacaaggatgaaagaaaggtcgcagcagtagctttggggaaagggaggaagatatggcacttctccaaccccggaaaacattgcttttgaaaactgctgataaaatatgagccggttattacttctgtttgggagactgtgctctctgtggtgcctctcttggctctactccacagataccagacctcttctaagaggatgagcagaccagctttgaggttgacctgtttctctttgtctgccttcccaaaacaccagcccccaggaagacattaagcagccttaagcttaaattcctactccctcttccaaatttggctcacttgccttagatccaaggcagggaaaggaaaagaaggggggtctctggctttattactcccctaagtctttactctgacttccccaaacccagaaagattttctccacagtgttcatttgaaagaggagtattttgtcccattttccccttcctcattatcaaacagccccagtcttccttgtctctgctaagaaagtagaggcatgatgatctgcctctcaactgccctaagtcctagctaagtatcaggggaaaaaaaaaaaaaaaaagcctaacaaatgggattagactagggctgcaagtagtgaggattttgttgatacctctgctgggatgtgtgctttcccatatcttgccttcaggaattacactgtgccttttccccagggatatgggctctgtctacccagtgctccagtttcccggtaactgctcttgaacattgtggacaagggcaggtcttcatatttttgatcatccctttctcccagtgaaatcccatagcccttacctagagtctagggcacaaagacttcggggaagatacactgagattgacctgaggagacatctacacacaccagtggcagctgccccagggcctgcttccccttcctaagtctgtcatcctctggaagggatgggtggtgctccaatctctggtgcctaaaaacccaagtttatttctctcttaacactggcaataaccagtccacaccactgttgccttttaaaacctcttaataatctcatgctgtgtttgttttgattccaatccaattatcaccagggctgtgtgggtaaatgcttttaaatgctctctcatcttgktcttccccctcaccccccactcttaggtatgtatgatgctaatcttgtccctaagtaagtttcttcctgctccttttgtatcttcctttcttgtctttcctcctaccttttgtctcttggtgttttgggacttttttttttttttttggccttttgtacaaagattagtttcaatgtagtctgtagcctcctttgtaaaccaattaaaaagttttttaataa

SEQ ID NO: 1760 - DNA, 880 bp, Homo sapiens
ggaaggagtcagatgggtatttaaggagtttgcaaccctcgtgtcctgctgtcctggacaatgctctgtaggtgcttcctctgccaaaaaggaactggtggccttgcctccctctcctggacacctggggtcaaaggtcactgccaaatagacagctagaactggggttcacctaagcatcccttgagatgtacaaccttctaggaggacattcctcctgcctgcccccctccccgcaagaggtcttttcaggaataactgaaaaacccatggggtttgtggtcctgctgctctgccaagtccctcttgggcagctgggctgaggactggaacattctgtggcaagcaggaggcctcagcagagatcaccaagacccagcacacctggtgcagacagccacggcatcctccttcctgcaggtcacccccacgagccacttaacctctcagagcctctgcttctcacctgtcaagtgtgtgaggtagggtaccagttagtcacggtacttgctgtctcacagaggagccgacaggtgagaacagtgtgcatgtgggtgtgaacactcagtgtggaaagcaggtgtgtgtgtattcaatcccccaatggtgtcaagggctcctcaaaatgccatgggtccccaggtcattgtgataaacactgtccccatcctgctgtggttgtggctggaaggtccctcaaggagtagactgtccctgagaacaagatggatgcagggtagtgacgagttcaagcatagctagagttactgttttttagcaactcaacctgattttttaagctgcctacttttactttttactgtgagcttctgtccatcaccatgtaatttgtaataataataaaaaaaaaaaaaaaaaa

SEQ ID NO: 1761 - DNA, 1154 bp, Homo sapiens
aagctgtctatagctgcttcctaaacgttttacctccacatcatgattctctgtgggctttctttcctggttctattactgcgtactgatggtggtgtggtacctatttcagattgtttcagcagtgagctgcatccataaagctggaatccttcatagagatataaagacattaaatatttttctgaccaaggcaaacctgataaaacttggagattatggcctagcaaagaaacttaattctgagtattccatggctgagacgcttgtgggaaccccatattacatgtctccagagctctgtcaaggagtaaagtacaatttcaagtctgatatctgggcagttggctgcgtcatttttgaactgcttaccttaaagaggacgtttgatgctacaaacccacttaacctgtgtgtgaagatcgtgcaaggaattcgggccatggaagttgactctagccagtactctttggaattgatccaaatggttcattcgtgccttgaccaggttcaagagccactgccctaactgaacaagtgaggaagatgcattataaacattctccttcatgtacaagtgttgattataatgaggatcctgagcagagacctactgcagatgaacttctagatcgccctcttctcaggaaacgcaggagagagatggaggaaaaagtcactctgcttaatgcacctacaaagagaccaaggtcaagcactgtgactgaagcacccattgctgtagtaacatcacgaaccagtgaagtctatgtttggggtggtggaaaatccaccccccagaaactggatgttatcaagagtggctgtagtgcccggcaggtctgtgcagggaatacccactttgctgtggtcacagtggagaaggaactgtacacttgggtgctctttttttctactgtttttcttcatatgaagttccattaaagatcagcttttggcatgaaaaattaaaacttcataagacctctcagccggggatggtggttcatgtctacaatcccagcactttgggaagccgaggcaggaggatcacttgagcccaggagttcaagaccagcttgggcaacatagcgagaacccatctctttaaaatttaagtttaataaaatgtaattaaaaaaaaaaaaaaaaaa

SEQ ID NO: 1762 - DNA, 1124 bp, Homo sapiens
agaccttattaaaagcttcaagatgttagcctttatctgttccatatctagcttacttggttgtttttgggggatcacatgtctgtcctccaaactggaaacgtctaactctccaggagatgcagtagcattatttgttggacagtggcacctactggtagtttgtaatgtttatagcctagtgtgaaaggcattgtaaatgtatacctagcaaaaaggggagtagagcaaaatttccagagttttacaaatgaaatgaaggatgatatgggggagagtcctttggggccaaggagagagagcacagactagaaagtaatacaagcagaaagaaggatgtcagcccatgtctgtgtggtagaggtcatctttccatctcactgggattgtccctgaaagtgtctcactgcttaggtctccttgcctgtctaaggcttggagaccttccagtatctcatgccttattctagatctgcttttttccccgaggtgaaaaaacctgttcaaatggtcactcacaacttttgtggccttactttttgtctccgaaaggacaaacatatcagaactaacatccacccagaagaagggctgatcagttcctttcaacacagcatggatgaaaacccaggttagcgttagtgcttcttgaattggaagtattctaacctctatgtacctaccaatgtaagaactgagggcccttttaagggaacttacattcctaaagttcaagtcaagttgtcatgaagagtacttaatgaggcatacttttaatctttgaatcgtagtgttgtagggctaaaagaaacctcaggccaggctgcatggtgctcacgcctgtaatcccagtactttgggagaccaaggcaggctgatcacctaaggccagtaatttgagaccagcccaaccaacctggtgaaaccctgtctccactaaaaatacaaaattagcctggtgtggtgatgcatgcgtgtaatcctaactactcgggaggctaaggcagaagaattgtttgaacccgggaggcggaggtttcagtgagccgagatcatgccattgcactccagcctgggtgacaggagccaaactccgtctcaaaaaaaaaaaaaaaaaaaaaaaa

SEQ ID NO: 1763 - DNA, 816 bp, Homo sapiens
  misc_feature (720)..(720): n equals a,t,g, or c
  misc_feature (735)..(735): n equals a,t,g, or c
gacacgaggtcactccaaaaagaaaccctgtacccactagcagtcacccatttcctccatccttccccatccccagccctaggcaaccatctgttttctgtctctacagatttgcctattcaagacatttcatataaatggaatcatacgatatgtggtcctttgtgactggtgtctctcacttaacatagcgtttttaagatccatccatgttgtagcatgtatcagtactacattccacttcattgtttaataataataataataatagttcattgtatgggaataccacgtttgtgactggcttctctcacttagcatagtgtttttaagatccatccatattgtagcattatcagtatacattccacttcattgtttgaataataataatacttcattgtgtgggtataccacatttatccatttatcagttgatggatatttgagctgtttccactttttagcaattatgaataatgcctcatctaacactttgattatactttttattatcatatgtgtggcttcaggtttttgtttggttggttggttttgcctgtgtctgtttttatcacttgattataaacttctggaaaaagatcattattttcactctgaaatttccatacagcaagtattcaataagtgtttggcagatggatgaatgggcagatattataggttcttaccatgttgattatgaagaagtacaaagtnttcagaataaaaacnctaagcacagtaataaaaaaaaaaaaaaaaaaaaaaaaaaaaaaaaaaaaaaaaaaaaaaaaaaaaaaaaaaaaaaaaaaa

SEQ ID NO: 1764 - DNA, 1232 bp, Homo sapiens
ggcagcctgatgggaggagctgtcaggtccgggacctttgcaatggcgtggaccatggctgtgagttccagtgtgtgagcgagggcctctcctaccgctgcctgtgccccgaggggcggcaacttcaggcagatggcaagagctgcaaccggtgccgggaaggccacgtggaccttgttctgctggttgatggctccaagagcgtgcgtccacaaaacttcgagctagtgaagcgcttcgtgaaccagattgtggacttcctagatgtgtcccccgagggcacgcgggtggggctggtgcagttctcgagccgcgtgcgcaccgagttccctctgggtcgctacggcaccgcagccgaggtgaagcaggcggtcctggccgtggagtacatggaacgcggcaccatgacagggctggcgttgcggcacatggtggagcacagcttctccaaggcgcagggtgcacggccccgtgcccttaacgtgcctcgtgttggcctggtcttcacggatggccgctcccaggatgacatctcggtgtgggcagcgcgcgccaaggaggaaggcatcgtcatgtacgccgtgggcgtgggcaaggcggtggaggcggagctgcgcgagatcgcctcggagccagcggaactgcacgtgtcctatgccccggacttcggcaccatgacgcacctgctggagaacctcagaagcagcatctgtccagaggagggcatcagcgcagggacagagcttcggagcccatgcgaatgcgaaagcctcgtggagttccagggccgcacgctgggggcgctcgagagcctgacgctgaacctggcccagctgacggcgcgcctggaggatctggagaaccagctggccaaccagaagtgagggtcacggacggcccagacccgggctggggcgcggcaccacggacggtgccccttgcgcgccatcggtgcgccggggccaggcagaacctgggcccgtccggcttgggctgtcggggcggaggcgctggcgggcttccggcattgagctgagttggcctcgcccggaccattaggcggactgcggcgtcagggggatagcgggtggtgagggaaggggcacgtgctagaccggcacgccctcgccgcgtgtgcgctcagttctttgttggatttcttgtttgtgttcttaaaaaaataaaaaaaactgatttccaaaaaaaaaaaaaaaaaaaaaaaaaaaaaaaaa

SEQ ID NO: 1765 - DNA, 854 bp, Homo sapiens
ggcacgagaagattagttggaatttttgagaaccaggagaggaagcacaggacgtatgtctatgtgctcattgtcactgaagtgctggaagactgggaagattcagttaacattggaaggaagagggaatggtttaaaatagaagacgccataaaagtgctgcagtatcacaaacccgtgcaggcatcatattttgaaacattgaggcaaggctactcagccaacaatggcaccccagtcgtggccaccacatactcggtttctgctcagagctcgatgtcaggcatcagatgactgaagacttcctgtaagagaaatggaaattggaaactagactgaagtgcaaatcttccctctcaccctggctctttccacttctcacaggcctcctctttcaaataaggcatggtgggcagcaaagaaagggtgtattgataatgttgctgtttggtgttaagtgatggggctttttcttctgtttttattgagggtgggggttgggtgtgtaatttgtaagtacttttgtgcatgatctgtccctccctctaaccacccctgcagtcctctgaagagaggccaacagccttcccctgccttggattctgaagtgttcctgtttgtcttatcctggccctggccagacgttttctttgatttttaattttttttttttattaaaagataccagtatgagatgaaaacttccaataatttgtcctataatgtgctgtacagttcagtagagtggtcactttcactgcagtatacatttatctacacattatatatcggacatataatatgtaaataaatgacttctagaaagagaaatttgaaaaaaaaaaaaaaaaaaa

SEQ ID NO: 1766 - DNA, 2092 bp, Homo sapiens
ggcacgaggcaatttgaagcaatatgtgggaattagtgacttaacaaaagactacacaaacatgaggatggcctttatttttaaaaggagctttaaacaaaaatgcctttctttaagcttaatttttataatatcttgcatatatctttattatcacattgttattgttacatgcactggtgttttctctctggattaagattgccatctttatataaaatggaatacatgattattccatcacaactagtgataataaaaacagctaatgtttgttggcacatctgtgccagcactattctaaatgcttaattttaatcatcacaacaaccctatgaggtagatattgttatccctgtttttcagatgaggaagccgaggcagagagaacttaagttgctggcccaaggacaaacagctagtagacagcagtcaaggcagcgtggctccatggtgatgtgcttggtcagagatctgaatatataggacttagatttgtagactattgagctgtagactcatttagacaaatggtaccaagatattttagtagataaaattctaggttagtagaacatagaccacatgttataagctgatatcagttgatggaagaaaaatggttttacaagttattttcaggatctctatcaaacctttacttctccctctaattacagatcccacttccagccgggcccctcatgtatccactggccgaccgcagagtgtccctacctcctctccagagcatcattcctttctatctgctgccagagccacggtgccatttactccaaggactcactttctaaaattccacacctggagtgacctctagtcgctcagcatccactttgtgtctccaaattgtgtaggactctgtaatcttttgattagtttctgagaaaacacaatgaagcacttcacttttttttattcaaagccatttaataaaacacagttggtcagcccagtgcaaagcttgtatctgccaccagtacataccattggttctcttcattccttgggccagcttctcaggtggctttagacctcaacaagccgtatcttcaccagtgttctatcttgttcccctaaattaataaaatgtttttctccaggattttggtgagggttggctgtggctgtcgttttgcacctcccagatttcaaagaattactggttttaccatgactcaaatcttaagatctgtttctactattcagttcctcaaactgaagcttattgaaaaaaaaatgtataatgttatttgttttattatagcaattattcctaattaaagcagtatttaatgcaatttccagttatttctttggagaattttatgtcattgttccattaccttgaatgttggaaagatatgatacgtgctgcttgttcatcacaaaaatcagtaagcacaataaagtggatgccaaaccatcagacacataaatgttcccgctgtgtccctggatatggaataagcaggtataaaaaatattttaattatagttttgttataaatataacttatgagaaaaaaatttgataggaataatactgtatattactaatttttaactatccctaaggcaaaccttatgacccacagaattttctcatatacagtattcagtgcacagaaatcttatgattggctcaagtacagtaagttacttctcagtaaaactctcaagtctgagtccatatttgtagctctgcttttggctgtacgttcctaggatcggggctgcttatgcctttcgtttatccttggggtttgagagcgctgtatttgggagagagtttaaaaatacattaggagagagaaaccattaaaagtttcactgtcagagatattgtaggtgctaatactggatttcgtctcagatttaatttcttttatgggtctgttagtcattcaacaaatcccataagtatgtgttaatattttaattgtgtaaaactcatttgttactttacagcctgtaatagtgtgtctgcattttcaacctgttgcaataactttgctgaaatattaacacattaataaaacttttcttaaacaaaaaaaaaaaaaaaaaa

SEQ ID NO: 1767 - DNA, 1352 bp, Homo sapiens
ggcagagaaatcattgagtgtaaatagtcagatgaagaatgtatattctgtttttaagctcagtgttaatcatgggtgcatttttaaaactaatttcttattttcccatttacatatgatgaaactcactgattttggcatacagctatatgagtattgacaaacagtcctagtcctgcaaccatcaccacagattaggaacatttccatcacccctagaaattccctcgtgcccctttgtagtcattccctgcatctgggcaactaccaatctgtttgctgtccctgtggtttctaggcattattggaaacctgttttgtttataaccccttttcacctcctcttctgtgttcctytctgagcctacagtctctgttttcctgctccacacacaagtcggcctgctttattatcccaacactcctcctcctggggtagaatttctcacatcctcaatgagatggagcttggctgaatgtgagggaaggaatctgttttaatgtttgcctttggttccttgctttgtatttagagaatctgtttagttccccagatgaatctctgtttttagggattgtgacagttttaacataggtggaaatgaaagatcactggtgcagggcgacgagcatgtttgacactgatacttttccaattcctgggtattttgaaggtccagagggagccaacctgttcatctaccacctgccaggagtttggtgatcaggacctgctgcagatgtttatgccctttgggaatgtcgtgtctgccaaggttttcatagacaagcagacaaacctgagcaagtgttttggtatgttggcttctctctggtgtcaggatgggattagtattttaccactgagaaagaaggagctcactgcagaaagatctgaatatgagtttgtggtgttgttttaacttggccatgggcaggtcattatgacctctttttgagccccagtttctcattgctgtagtggaggtaaggatttctacccacactgttgctccagagagaaaaataatatatggaaaatggtttgcaaaaaaacctttaaacagtccaggtttgtgcctgtaagtcccagtacttggggaggccaaggcaggaggatcgcttgagcctaggagttcgagaccagcctgagcaacagagtgagacctcatggctacaaaaaattagtcagacgtggtggcgtgtacctgtgttcccagctacttgaggctgaggtgagaggatcacctgagcccaggaggccaaggttgcagtgaaccatggtcacaccactgtactccaccctgggtgacagagcaagaccctgtctcaagaaaaaaaaaaaaaaaaaa

SEQ ID NO: 1768 - DNA, 1658 bp, Homo sapiens
attcggcagaggttgatcaatgttaggaagcttgctaatgacactctcatccagaacttttggagagtagggagaaactaacaaaataacagagagccgaggaattccacttttactaatcattcattttgaataatctcacttatttactcagtaaatatatgttgcttgcttaccatatatttatttcagtaagtatatgtcgcttgctgggtcctggtaatgacagtggtgagtttccttcccttgttagtgggatctacagccacctataacttaagattctcccccacacagcccagacatacacacaacgctaagatctgaatgcctgtgcccccaaaaattcataagttgaaatcctaacccccaaggtgatgtgaaaaatgtaccaaaccctgtccagaattttggaatcgcctcccagatactttatctagagactctttgtyctacttccccacaagtttttcattccagtatttaatcattgagtgtttctgcttgtgatacttgttgcaaagtcaatgatagtcaaagaagttcaaaaattggttactttggacttaacaagcaaatgcacttctaggtggcttttgaaaaccaaaagtacacctaagtagagagcttctgttttttatagtgattatatgaagagtaatgggtgaaaagcatcaaagctggaattggagctctggggtctacaccgtttccaatgaatcattcctaatgtgatgctttcatccatgctcttggctctgtctgggatgtctcctctccgccaggccctgatttcagtcatccaggccgagtttaattatgtataactgtcttcgtttatttggggcactaaaacaaaaataacaaaaatactatagactgggtgtcctaaacaccaaaagtttattactcacagttctgcaggccgggaataccaagattaggttatctgcagattctctggtgaggacctgcttcttagttcacagacagcatcttcttgctgtgcccttccatggtataaggggtaagagagctccctgagatctcttttagaagggcactaatcctattcatgagggctycactctcacagsctaatgacctyccaaagggcccagcttcaaacaccatcacgacaacatatgaatttgtgggagatataaacattcagcctatagccataaccagatgtttttgcaaccaagatggtgaattcttcctgagcacgtgccagtcagactccaggagagcagggatcccatgcacttatgtacttccatccatctcacagcctccatcgctttcagaaggttgagctgcccccaggtaccaaagcaaggactggaatatagctgagagatagaaatgttttgcaaaatgttgcttacagattcagaacttaaactgatttcgatctcttgggaaagaaatatgaattctaatctgatttcaatctctctggaacaaaaaaccttttgtatctatctttcttcaatgatgggaaaaagtaaaataccttccaagcctccactaatccttctactgatgtcttctatattcgtgattcagatgtgccttgtagacaagcacagatcttcactgctcacttctgccataaatgcttcacaaattaaaaaaaaaaaaaaaaaactcga

SEQ ID NO: 1769 - DNA, 774 bp, Homo sapiens
tttaagttacaggataattcctcccagtaaaactagcctccaaaggttttaatggcaaaatccaagtattcaaatctataatcagccttttaagcaggaacttaaaatgacatgacagttttaattatcttgttcttcgtccaagagtcaagtagtaggcatgagtacactttttacatggcttatggttttacgttatcttctaccaaacagctgttttgtacttaataggcctagtttctgtaacccatttggaacttcccccatcagctgtcgaaaggcttcaagttgagaaacactgcactgtggcttcttcaaatggcttttctttttttgagatagggtctcaatgtcacccaggctggagtgcagtggtgccatcatggctcactgcagcctcgacttcctgggctcaagccatccccctatctctcagcctcccaagtagctgggactacagctcgcgccactgcacctagctaaattttatattttttggagagacggggttttgccatgttgctcaggctgatctttaactcttgggctcaagcgatccacctgccttagcctcccaaagtgctaggattataggcgtgaaccaccacgccaacctcaaatggctttcctttaaaatttcttgagcctagtccgaagatagtgagttatctcagttgattgttcacagtcagttacagattgaactccttgttccactcttttccccattctcactactgcacttgactattctttaaaaaaaaaaaaaaaaaa

SEQ ID NO: 1770 - DNA, 411 bp, Homo sapiens
cccacgcgtccgacgtcttcctgcgcgatcaaccctggtacaaggcagctgtggcctgggccaaccagaaccgggcaccagtactcagcatagaccctcctgtgcatgaagtcgaacagggcattgatgccaaatggtcactggcactgggcctgcctctgccactgggggagcacgcaggccgtatctatttgtgcgacattggcattccccagcaggtcttccaggaggtgggcatcaactaccactcgccctttggctgcaagtttgttatcccactgcactctgcttagagggttcctgcgcaggcaggactctgctgtcccctgctgctcctgataacaaacgccttaaggatatgaagcttcatggaccttgttaaagttttttctctttaaaaaaaaaaaaaaa

SEQ ID NO: 1771 - DNA, 779 bp, Homo sapiens
  misc_feature (709)..(709): n equals a,t,g, or c
ccgaggagtccgcccggaaacaaacattccccagggcaatgtcacgacttggtcttcccgaggagccagtcagacagatacattgataactccatttgtgggtttaatagaccacaacttccaggcccagccgaatcctgctgaagttaaggatgtattcctggtgcctctggcctatttcctgcatccacaggtccatgaccagcattacgtcacacgtcttggtcaccgttttattaatcatatctttgagtacacaaaccctggagacggtgtcacttaccagatcaagggaatgacggcaaaccttgcagtgttggtggcctttatcattttggaaaaaaaacccacctttgaggttcaatttaatcttaatgatgtattagcatcctctgaagagttattcctgaaggttcataaaaaagctacaagcaggttatgatttactagagcaagagacaaagaactattcacgaggattctgtgtgtgcttattcgtagaacaacaacaatgccagctgttggaatttgacaggtgtgaatattttttctgcagtatgtagttagaatccttgcttcttttccagttgccttctattgtctgaaaaagtaaaagccattcaaaaatgaaaactatgttcatagtgttgcatattttcacccacaatatgttaataatatttttcttacacatataataaagaatatntggcacatactaggcccttaataaagattttttgaatataaaaaaaaaaaaaaaaaaaaagggcggccgc

SEQ ID NO: 1772 - DNA, 638 bp, Homo sapiens
  misc_feature (9)..(9): n equals a,t,g, or c
  misc_feature (38)..(38): n equals a,t,g, or c
  misc_feature (66)..(66): n equals a,t,g, or c
  misc_feature (625)..(625): n equals a,t,g, or c
  misc_feature (635)..(635): n equals a,t,g, or c
tgccagtgngcccttggaacatccccactgcatttcanccccggggggatacagtgagacccttgnctttaaaaaaaaaaatgcctgcaaaccccaaaaataaatagcccataatttgcccatctttggagagattatggagataatctcccttgtctattagcccactagcatggctaattgatcattgattggacctcattacataagggggctgtggacgtctttggaatttgttaggggaaggctatgtggtaagctctactaaatgtatctgtacaaggatgaagaaaaacaaaataactactacttttggaggaaacttggaacaagaagagtacatagtttgatccattcctacggtcgagtctaatcaattccatttcttagtgtatgcatctaatgaggcttacaacttgctaaccccaaaagaagcaataaatgttaagcaattttagtaaccagtatggcatgtatcttatttttgaatgcattcctccttatccccatcctcttaggaatatggacgttttactaagtaataaagatttcaaatgctaaaaaaaaaaaaaaaaaaaaaaaagggcggccgctctagaggatcccgsgaggggccccaggttantccaaagagntcc

SEQ ID NO: 1773 - DNA, 1055 bp, Homo sapiens
cgggtcgacccacgcgtccgagacttgtcattcagtaatattagcagatagctgcttcgataaaggaatttggagtttaaaaatcaacttgtgaaaacaaggttgtttttgtctttatcgtttgttagagttatagatttatgatttcataggcttgattctatgtgaaatatctttttacttttatgcattttaataagatttaaaaatatttagattaaagccccctttaatgagtacaagaaaaactcttggcttgttagaagaaagtatattctttctagaatttggtgcaggaatatgtgttcatatccaggcaaacgggtgtgtttttatcttcagacaatgaaaccttctcctctggggctttgttgccaggaagattagaactaaatttatttttttcatttctgtcatgaaatcattccagatacctcttttcttctttccaaatggttttcacatgtgtttgaaatatttgtacttcgaattgtcggattttccatgtcctcctttctcctttgtgcccagcctgagtcagcaccaatcccgcattcagaacctcccagtgaaagggcagccttcattttgagaaggtggaaggtgttagggtttgggagacagctcatccaatctcccaagtctcatggtggatttgtgactgtgagagtttccggtttaaaatctgaaaagccagatatgcctgtttccttttcccagcaccatgcctgtggaggggacagtcagacccagaggtcctttacgtgtggatggagttcacaggcgaatagaggagaggaccaggggacgtggcttgtcccttttgtccaacaaagcattatatttttaagaatggcagacctgtttgctgaagtgttcataagataacaataggcttgaatctccaattcaaatgaatgtcaaagcacatatctttaatatgctgaatgaatatttatttttgtatccattaaaacagtatattgatctcttttattctttattaaaataaaatgctcttttttaaaaaaaaaaaaaaaaaaaaaaaaaaaaaa

SEQ ID NO: 1774 - DNA, 1161 bp, Homo sapiens
ccacgcgtccggccttagcagctgcaccgccatccccatgctggttggtgctgccctgcctctcgtgccgggtgttgcttcagcccagagccagagggctgggtcccgggtcctccacaggtgaccccggtggacacacgcgttcccatcctggcctccgtctctgcttttccacttctacctgcgtgtgggtttgccgccttgtcatcggttgtgtgagtgtcgcagacctttccagagctccggttcactctttccaaacaggcctccctgtcggtggcactgcactcctagaaccttcagtttctacgatggtttgtttggtccttttgaaccaccccaaagaactcaacatggcaaagcaaatggtaaaagcttcccgactgttctactttgggtccgcgcgaagcccactcacgtgtgatctgtgttgcccctctcggtggtcccaggcgatccagccatgccccctgcccctctgccagatgcttcaggggcccggcttttcaggcttgccctcaccagcggccgtcagccgacactcaggatgtagctaacaccactccgccagtgctttcagtaggaagagctgaggctgcctggaaggcccggggcgaccggaaaagggctctctcaagttctgaaaagagaatctgccaccagatcgaatttcgacccctgagcttgttcggacgtatggtccaaattcagattaaggtggtcacccaacccgagatgtcaggaaaggccttctgcagagaaaatgtccccccacccgccatctgcagccaggtgtgtgccacacggcagccttcccgaaacatagtatggattttaaaaatgtgtttatttttgtttctcaaccactttataacgtattttttaatttattttgtaatgtcttgttttgaagtattgctgctatccttgttatccttcccactgtttttatcactgatttattttgtgaaagttgtacactaatgttctatgtcaaaatcaaaagtatttaatgaaatactagttctatttaatgtggttatggaaccagctggaaacacaaaacaaacagtgattgtacagcaggctgggcccaggaggtcaggttcattttgttacatatgcaataaactcacgactttaaaaaaaaaaaaaaaaaaa

SEQ ID NO: 1775 - DNA, 1681 bp, Homo sapiens
aattcccgggtcgacccacgcgtccgctcaacttctaccagttcctcggggtgcagcaggatgcatcatctgcagacatcagaaaagcatatcgtaagctttcactaactttacatccagacaagaataaagatgaaaatgcagaaactcagtttagacaattggtggccatttatgaagttttaaaggatgatgaacgaaggcagaggtatgatgatattctgatcaatggacttccagattggcgacagcctgtattctactacaggcgggtgagaaaaatgagcaatgctgagctggcattactcttgttcattattctcacagtgggtcattatgctgtggtttggtcaatctacctgggaaaaacaactggatgaactactaagtttgaaaaaagagagaaaagaaaaaaaagactggcagcaagagtgtggatgtatcaaaactcggtgcttcagaaaaaaatgaaagattgctgatgaaaccacagtggcatgatttgcttccatgcaaactggggatttggttttgccttacactaaaagcattacctcacctcatccaggatgctgggcagttttatgctaaatataaagaaacaagattgaaggaaaaggaagatgcactgactagaactgaacttgaaacacttcaaaaacagaagaaagttaaaaaaccaaaacctgaatttcctgtatacacacctttagaaactacatatattcagtcttatgatcatggaacttccatagaagaaattgaggaacaaatggatgattggttggaaaacaggaaccgaacacagaaaaaacaggcacctgaatggacagaagaggacctcagccaactgacaagaagtatggttaagttcccaggagggactccaggtcgatgggaaaagattgcccacgaattgggtcgatctgtgacagatgtgacaaccaaagccaagcaactgaaggattcagtgacctgctccccaggaatggttagactctccgaactcaaatcgacaggttcagaattccaggccatcaaaacggccaccaccttggcccgatgacatgatcacccagcgagaggacgcagagggggtggcagcggaggaggagcaggagggagactccggtgagcaggagaccggggccactgatgcccggcctcggaggcggaagccagccaggctgctggaggctacagcgaagccggagccagaggagaagtccagagccaagcggcagaaggactttgacatagcagaacaaaacgagtccagcgacgaggagagcctgagaaaagagagagctcggtctgcagaggagccgtggactcaaaatcaacagaaacttctggaactggcgttgcagcagtacccaaggggatcctctgaccgctgggacaaaatagccagatgtgtcccgtccaagagcaaggaagactgtatcgctaggtacaagttgctggttgaactggtccaaaagaaaaaacaagctaaaagctgaatattctgggagatgatgttcaccttcattttccaaaatgaatatcttaaaaatcttatgcagaaatttgcattttgtacctcaatatttctacgtcatgtgccttagtaaaaaaaaataataaataaataaaagataaaaaaaaaaaaaaaagggcggccgctctagaggatccc

SEQ ID NO: 1776 - DNA, 678 bp, Homo sapiens
cacgcgtccggatttttcactaattggtttgtttgaattatctagatactctttcataataattctatattgcttatgacttgagtctttgaacaagaatggtaagtggcctcataaaacatagcaattggctgtgtttcaccttagcactagtacatgccaaatgcagcatctctttttctttgttacattgtagctttgccatgctgttatgcagtggcttggatgtaatcttttagtcatagtggagtggtttggattaatttgttgcattttactaatggacacaaaagcatagtatcctgttaattaactggtcacaaacttataaagggacttcctttagagttaaagatttagagttaaaggttaaaggtttaggttgggtgccctggctcatgcctacagtcccagcactttgggaggccaaggcaggcagatcacttgaggccatgagttcgagaccagcctggccaacatggtgaaatcccgtctttacaaaaaatacaaaaaattactggtgtggtggtgggtgcttgtatcccagctacttgggaagctgaggcacaaaaattgcttgaacccaagaagcggaagttgcaattgaaatcatgccactgcactccaacccgatgacagaacaagacctatctcaaaaaaaaaaaaaaaaaaaaaaaa

SEQ ID NO: 1777 - DNA, 610 bp, Homo sapiens
aattcccgggtcgacccacgcctccgaaaaaaagaaaagaaaaaaagaaagagtgctttcctcttagaattgtgagatgggtataaaagtaaaataatttagcacagtgtcttgtacatagttaatgtgtgagacttattattaagttaaaaagcaaccacattttcacattttgcattttagaaagatattttaaacgtatttcacatttgcctgatgatacattattccttattatgtggtttctgtcactgctgttgtcattcatttgctttttaatatctgcagaatatgaaatatgtctcttttaagttcttattattagtgtgtgtgtgcacacctgtgtgtgttttttcatctgtctcagtaggagtaccgttcaatttggtttttcaaagaaagtaacttttgactttgttgactctgtctttttattatttctttcattaacttttattctaatctgtattacttccttccatctaatttatttttattttattttgttttattttttgagacagagtctcactccagcctggatgacagagtgagactccagtgagactcttatcaaaaaaaaaaaaaaaaaaaaaaaaaaaaaaaaaaa

SEQ ID NO: 1778 - DNA, 1264 bp, Homo sapiens
cggcacgagtcttttttttggcctgtcttacctacagttgtattttcctctttaatcataaggatttacatcaggaaaaataacctgagaatagatgtgttttgtttgaatgtcgtagttgtgccctttgtaaaattaccccagggcatgataagaaaaggagtaagcaattaaaatgcacagggctacggcaagggcaggcagatctgagtggaggctgctgtcctgtgaagtagacctggcaggggatggctgctccgggctggcctgggcctcgctctgcctctgttgttgctctgacctttgacaaatcattcccttgcctgtgtctcggttgccccatctgagcgagaggctggactaaaaggtcactaaggtcacttgtagcctgaccttccatggctctataattctctttgttatctttggccacttacatgtttgccatgatcattgccaatcaaactaggaatgtttagcagattttagacactcagactggaaaatacagacgaggccatagaagttagtgttgtcctagggatggctcctggttcacgcaggctcctcatagggtccctgccgctacacaccacgagcccaccgagactgctgcagcctcgctcatccagaacagaggcaccatggccaggaggcccttcctttgttgggtaggagctgcccccgtccatgttccagctcctcccaggcccccatggataaaatagggccacaggtgacaagtgagttctgtgaccctgaccggcagcagctgccagcgaaggaggaaggaaacacagacaggaggtctcagagcacagcacgccagacctctagtccacacagtcctgcacacattgccgtctttgtttaaagagaggcggaggcagaccccaggcattcaaatgatagaatgcttctgctgtgcctgcatccttccctcctccactaggagcctctggttccagcccagatgaacccactgggctgggaacgccacacaaaagcactctccaagccagccagaggtccctgagggccaagacagggctgaccagaggcagtgtctggacatcctactgggagctcgggaggaggcagtgacagctcaggccagtaatgggtattcttgagagcaatcccaggtcatcaagggaagaaaaggttatgcttcgtatactgtgttcaggggccagataagttttaatacgttccagaagtgtgctcaagcaaaaaaaaaaaaaaaaaactcgagggggggccc

SEQ ID NO: 1779 - DNA, 942 bp, Homo sapiens
  misc_feature (437)..(437): n equals a,t,g, or c
ctgcaggaattcgscacgagccagctcgaaaaaatccatgcttttgagaccgagaatctgggaggagttttgagtcatgggcgtgaatgcaaaaggagagtaagagaatgggacgagacggggcagagccgagaatattacaaagaagggctaagctatgggcttcctttctgtctggttcttgcttgcatcttgccatgctatcatttgctacttttcttgcctcggtggtttgtaaaaaataagagccccgggtgcatgtgtcccctcattcactctgtgtgggcaaaggaaaatgaagcccttatggtcacctggtgtttctaactttaaaacagcctcatatctcttatttaattcacacagaaatcctgtgtgcagagccaaggatattcccattttatagacaaggaaatggagaaaaaggttgagaaaankgatcttccagtcacatttacctmttcctgcctcccacaagtgcttcctgggtcctatcccagggtttttttgtactttactgattttaacaaatacagcctttgatcactctcagctacctgccacactggtgccatcactaggtgagttataaagactcatcatcatgatactctccatgattgggagcattctatgtgccaggaatttttctgggggcttttcacatcgtatttccttctgatccccacaactctcctttgagatacacagtgttatgatgcccattgtacagatgaggtgaggtgctttaggccacacagccccagccaacacatgcagacatcacatagctaggaaatgcgaatccagcatctgaatgtgttagcacagagggtcccctccctggataaaccttctggaactcccggtcatgtaagacaatgtccaaattcctcagtgtggtgtgcatgcacccctgcagccactgccctgcccctcgag

SEQ ID NO: 1780 - DNA, 1522 bp, Homo sapiens
  misc_feature (1)..(1): n equals a,t,g, or c
  misc_feature (357)..(357): n equals a,t,g, or c
nccccgggctgcaggaattcggcacgagagagagaacgcatgcaaactccatctcaaaaaaaatgtattgtttatctgcaattctgatttaattgggcatcctggattttccctggcaattgtattcctggagcaacaagaggactctcaacaccaaacaggccatcccgttcctccatcaggtccctacagcatttgaagtaaaatccaaaagtcctggcttcgcctgcaaggccctgcatggctgaaaggaaacagcagccagccccacagactttgaggagttcccagggtggatcaggcaggcaagtggattttgtggtcctggtccctcacggttgtctgttcccccacatnctcctagaaccccttgttcgtggaggctgaggagaaagtctcctacaactgctgccgccarggcactgtctgtttgcaaatccagatggaaaggaacaccttcacgccaggagagaaggtcgtcttcacaacagagrtcaacwwccakaccagcaaatgcatcaagacggtcgtattcgccctgtatgcccacatacagtacgagggcttcacgcccagtgcagagcggcggtctcggctggacagcagcgagcttctgaggcaggaggccaacacccccgtgacccgcttcaacaccaccaaggttgtcagcaccttcaacctgccgttgctgctgtccgtgagcagcagcacgcaggacggtgagatcatgcacactcgctacgagctggtcaccaccgtgcacctgccytggtccctgaccagcytcaaggccaaagttcccatcatcatcaccagcgcctcagtggactctgccatctgccagctgtcagaggacggagtgttacccgtgaacccagatcaccagaattaagtgcccgaacttttaaatattaaaagctttattagtctctaccaggaggaagccctctctcttgcacaggtgactctcagaggagtcgaggagtgggcaacaggttgtctgcaacctccccaagctctagcggtttaggtatctgtgtctcccctccctagaactatcactgaatgcctggaatggacaaaggaaaccgggaagktctcccaggacccaaacccggcataacctgccttttccaccctgaktctgccccagcctactggggtctcacagtgccaagaccaggggtcctacttggggagaattctcccctctgctaatgtctggtttattggctgtcacaactgcaggggatcgggggagaagagtcttattggcgtggagagggtggaggccagggacgctgttcagcaccctgcagtgtccaggacggcccccacaatcaggaattgtttatcctgaatgtcaacagtaccaagggggctgagcatggtggctcattcctgtaatcccaggactttgggaggccatggctggaggatcacttgagaccaggagtttgagacaagcctgggcaacactgtgagacccccatctctacaaaaaaaaaaaaaaaaaactcga

SEQ ID NO: 1781 - DNA, 1446 bp, Homo sapiens
ggcacgaggtagctgccagcaccattgttgttaacttggctctggtgtggtcgcacaggtacagcacctggtgcacaggaggctctgaaaccacaggcccttccccattgccctttcccccctgttctgggcttgacccttcctgtgagggcctggacctcctgcttccgctatctcccagtggctggctcagcatggctctttctcatttgctccttcattctcgcccactccttgaggtctgtctatctcacgtcctgctgtcccctcatgaacgcccccttcttctctttccctgcctcctttctggtctctctggggctgtcctcagagtccttcttgggtagtttcagggctgctgccaagtccacccwgwgcgcccctgcgctctgccccaagcagtctggagcaggcacttttcccagaacactggggtttggaaaacagaacgtccctttaggcctctgtgacctgctcccaacttttagatgagtttactcaacctttggcttccgggtgcaggctctgcctcctctggggccgtctcacctgtgcagggacagcagctgattctgatactggattccaartgggctccctggggccttccttgtgggcaccctgagctctttcaaggccattccccacctcacttccacaagtgagctgggctggctgcagggaaagggcgcatgtgtctcttgagagaagctggcasgcggccagcattcctgcctctggatggagagccagaaggctgagctctgaaaggcccaggagattgggcaatggtgggtggatctccccacctgaatctgatgtgggtgcagcaatgcctggaatgacttggtgactgctgactgtgtttgtccttgcctgggtcatgcagggcaccacccatccaggatatgggtcaggggaggtctctgactcacagtgcttctgggcgaattcaaaagcagaggctccttgggtgtcagaagtggaaaacgggagggagtgttttaaaaacccacctcccatcctccagaagggaaaccaggacccagaagagcaaagtctcatgcatctcaactacctgcttagcatcttagaggcagcagtagtgtgtcgccattaagaacacagagggccgggcgcagtagctcacgcctgtaatcccagcactttgggagaccgaggarggtggatcatgaggtcagaagatcgargccatcctggctaacacagtgaaacccccccatctctactaaaaatataaaaaaattagccaggtgtggtggcacacgcttgtaatcccagctactcgggaggctgaggcaggagaatcacttgaacccaggaggcggaggttgcagtgagctgaggtggcaccgctgcactccagccwgggggacagagcgagactctgtctcaaaaaaaaaaaaaaaaaaaaaaaaaaaaaaa

SEQ ID NO: 1782 - DNA, 1193 bp, Homo sapiens
ggctgtcgcccagcctggagtacaatggcgcgatcccagctcactgcagcctccccctgcctgggttcaaacaattctcctgcctcagcctcccatggtgtgccgccacacctggctattttttgtatttttagtagagacgcggtttcaccacgttgaccaggctggtctggaaatgcagtttttgcactgtctgcctgcttacctttatagagcatattttgccctcttccatcagaattacccatttaatggtcaggaaaagctgctgggaatatgactcatagctgggacattctctgcactgtgcatagttcctctctgccaccaccatggaggagattgatgggtttgaaacccaggggaagtcattgccctgcgagggtctccctcattgagaatctggatcccctcatgtgcacatggtgaggtcagagtcccctcctcacagtgtccccttccacctcccgtgaactgttctttccttccaggaggccagcaagcgcatctccagccacatccctttgatcatccagttcttcatgctccagacgtacggccagcagcttcagaagggccatgctgcagctcctgcaggacaaggacacctacagctggctcctgaaggagcggagcgacaccagcgacaagcggaagttcctgaaggagcggcttgcacggctgacgcaggctcggcgccggcttgcccagttccccggttaaccacactctgtccagccccgtagacgtgcacgcacactgtctgcccccgttcccgggtagccactggactgacgacttgagtgctcagtagtcagactggatagtccgtctctgcttatccgttagccgtggtgatttagcaggaagctgtgagagcagtttggtttctagcatgaagacagagccccaccctcagatgcacatgagctggcgggattgaaggatgctgtcttcgtactgggaaagggattttcagccctcagaatcgctccaccttgcagctctccccttctctgtattcctagaaactgacacatgctgaacatcacagcttatttcctcatttttataatgtcccttcacaaacccagtgttttaggagcatgagtgccgtgtgtgtgcgtcctgtcggagccctgtctcctctctctgtaataaactcatttctagcaaaaaaaaaaaaaaaaaaa

SEQ ID NO: 1783 - DNA, 921 bp, Homo sapiens
  misc_feature (773)..(773): n equals a,t,g, or c
  misc_feature (813)..(813): n equals a,t,g, or c
  misc_feature (851)..(851): n equals a,t,g, or c
  misc_feature (885)..(885): n equals a,t,g, or c
agatgctagtactttaaaaggaaataagggaaaagccggtcttaactatatagatttttttttaacataaatggctgctatttggcactttgctttttgcacttacctagatgtcctggacatctctccacgtccacttatagacaactgcccaggtgttttcctggctgcagagatgatgtggactgaattcatttggccaatccccaggcaatggccacttaggttatttcccaagttttgacaccacaaacaaagctgcagcgagtgaatcagcttgtctgggctcgtgtgtctgtgaaaactatgtggcaacactgaaacagattgcacacccaaagcctgacttctggctcctcttgggaatcagaagctctgcctccctggcccacacgccatacttttagaagccccactgccccagagccctatttgtccatgaattcctgactcattgtctggagcctgcttgagggaggctgggcagggtgtgagccaccaggattaaaggttgtttgtagcctctgcctccaaatagttacctgcaaaaggggacaagtgaagccacaaagattctactttaaaaaaaraaaaaraaractcattaaagttcccttaggtgtctccagagagagcccagaggggcccaggagaccagagttctggtcctgtctgtcaaagaattggtctgtcagagaattgggccactctctgaagggccccatccttggtttaatgcatccagccctgactgtttgaccttggtgaggggnctcagtgacgtcatctgtgaaatgggtacagactccttgngggagtctgtaagctcagctgtggttggcaatatagangcataaacaaagttgaaaagctcctggccagtgnggtggctcacacctgtaatcccagcactttgggagg

SEQ ID NO: 1784 - DNA, 1059 bp, Homo sapiens
ggcacgagcaccccaggtccatgagggcggggacttttgattggtttgctgttgcctgtcaagagctttatttactccgtgcacaaatgactgaatcagtccagccctcagtgattcatctgttttccctcttccttttcccatatcgggtgtgcgaacctctgctcaccaagtaccagtcgggtccttctcctgcccacgtgaaggaagaaggcgcagtggggctgaggcctcactagggcacccacacggagcgctgcgctcagcctttggacccggtacctccccaggctctgaggacagcagcagccccaggacggacgggtacgccaagtcctggggaccctctcccaagctctgtcagggcggcggggtggcgcgcgctcctccctcgggcgctagctctggaaatcgcgctaggcagaggtgggcttgtgtccgcacccgcagcctccgcgtcaacaccctaggggagagggacgcgggcaggggtgccgggcccaggctccccagccattctcaggccagaaccccctttttaacaagacatggccttggtgtgtcgcggactctgccggggacagtctggcagaactgggctccttgcgctccccagtataccggctaattccgtgccctttgcaaacttcatattttgatttcaaatttaaaaataatcaataggccgggtgcggtagctagctcctgtaatctcagcctcccaaagtgttggcattacaggtgtgtgctatcacgctggccttatttttattttttgaaatggagtcttgctctgttgcccaggcaggagcgtagtggctcgatcatggctcactgtagcctccgcctcaccctcccgaatagctgggactataggtgcgtgccacggtgcctggcccgaatggctttgttatacccacgtgaacagtactacgttttactaacagaaaagcatcaaatgagacttttcttccgaaactatgttcagagagtgactgcagtattgccttggcaatctagtgaatgtatcctcaccgcattaaaaaaaaaaaaaaaaaa

SEQ ID NO: 1785 - DNA, 590 bp, Homo sapiens
ggcacgagggtggatgcctgtagtcccagctactagggaggccaaggcaggagaatcgcttgaatctgggaggtggaggttgcagtgagccgagatcacaccactgcaccccagcctgggcaacgagtgaaacttcctctcaaaaaaaaaacactgcactgagaggcagaagacctaatctcctgaacctctgtgtatctcagtgtcatcatggacatgatgagactggataagcctcagagcctctggggaaggctgtttgcaaacatgaccacagtttctcccatccctataagttgcctctttgcagcttgacattgctgcttctcttgtcaagaagtggagatttttttcccctctccttgaatctgggctagctctgtaacttgctttgaccaatagacagaagtgacctgatgtgacttttgagtctaagccttaattgcctccactgtcaccgtcttggagcgatagtgtagccctgtgaagaagcctgggctggcttccttgaggataaaagaccaggtgccacagaaaggcagtcatgtgagtcagccccaggcaaaaccagcaaaaaaaaaaaaaaaaaa

SEQ ID NO: 1786 - DNA, 965 bp, Homo sapiens
  misc_feature (193)..(193): n equals a,t,g, or c
  misc_feature (643)..(643): n equals a,t,g, or c
gcagctctagaaatctttccttctggtgctctgatttgcctgcctctgggaggaagggaagggaagaccctgcaggactgaggtttgtcctggctgacaggcctgccaggcttgttccgggctgcagagaagagaggctatttttgttgtgggagctgaattgttggtctctctccaggagcacatgcttgtnggtgtggttgatgtrtcttgcctgctgtggccatctctaccactgcttccagaaaacacttgagaatacgtttgtcccaagaggttaaacctgagatcaggatcaggcatctgtgctcttgtcttgtgttccactcccttctggccattggaagggcagtagcagaacaggatatggctaacatgaacttggagagacttttctcctagagctgtgcttgaaaggggccctctctctgtaactgcggttgcagtgaactcagtccawtayctgggctttcttgtccttcagtaggctgatggagctgcccttgccctcaccagcctggtggggtttgcacagtgctgcagttcatctcacctactgtccaaatctccttttatcagcccagtccaggaacagtggtgtccttcttggtgtagggcttaacgtgagccttgcatgcacctngatccatatccagcattgcaggcaattctagtattccatgtcaagaaggctggcaagaaggctggtggggcaggtgccccagtccatcggcccttagtatatgcagagggtagctccaagtggggccactgtgatatgaaggaggattgtttgaattcaggagattgaggctgcagcgagcagtggtgcagtcatagctcattgcagcctccaactcttgggctcaagtgatcctcctatctcaacctcttgctgagtagctaggagtactggtgcatgccaccacatccagctaattaaaaaaaaaaaaaaaaaactcgag

SEQ ID NO: 1787 - DNA, 1175 bp, Homo sapiens
ttttttttttttttttttttttttttttttggccgagtcaatattttattaaaaaacacacaaacacatgcacactggtaacaaaggcagagatggagaggagacacaagatctccttggggacaggctgaccacatagtgtttctacaggcacgcctcacttcaggaaagagggtatctctaagaccggactgacaagctagataaattaggacagggctttgtttcttaaggcacttcactcccctgaggagtgaagtagaagggatttaggcgggagtattcacaaaccccttcagctgtgctaagtggggttcatcagtacctgaggtggttctagaagcaggaaggcagaaaacatttccctggaggctgctttcctttcccagaatgggagggatgttctccccggaaggctggaggaagagtttccggctggctcaggagctcagggagctggcttcctgggagagcaggaagagggtgcaggcctttcctggtgcccaccagcctgacaggactttggcacaggaacacaggtccagaggcctcgcctggagtacacgtcctcctctctgcaaagctcctgaggggcctaggggttgtggcctcatcagacggctgcatctgtggactgggttacacacgagatcttataggacagccatatgcttgccatgcagaggaaggtggccatgaaaccaaagatcgctccggctaccagtccgctctggttgtaactcttggaagctgccacaatggaggcgatgaggaggagcagggtaccgattaaatagtgcagaagttccgacaggggccagctgatacaggtgagcacgcggtagaagcggaagaggtggaccaggtaaaaggcgaggatcattatcaagtcgcaaatggtgaccacttcaaagtagctgtaggcgctgtagttggtccacagggagctccgcacacagatgaaggcaatcagcagggtgaccatttgcgccactttcagcagggccgcgtgggtgcgggggtagctgaggtccagcagcccctccaaggggctcgcgctgggctgggccgcgccggccccgggtccgagcgcgctgccgctgctgcacgtggtgcggacgagcccggctccgtgcgacattgcgcggccccagctcgccggacgcgtgggtcga

SEQ ID NO: 1788 - DNA, 1340 bp, Homo sapiens
ggcacgagcccactcttgacctcaaggtggggaaggcagcgcgtgggggctgccgtcaggaagttttcataactgggcacgaggaggcaggaggagctgcccgtcaagcttggtgtgggcagtaccgaggcccaggctggatgcagagccgggaaccgcctcctgtgtgcttcatggccatggtcctttctgcctgtgttttttctttttttctcaaccgtctcttttctggctcccttatttctctgtctgcctcccggtccctcttttgccttgggtgtttctctcctgccgtcccgtccacacgcttcccgggttcctgcccgcccagggcattgccacagggaagtaccacgccgcggtgctcaccaacagcgctgagtgggaggccgcctgtgtgaaggcgggcaggaagtgtggggacctggtgcacccgctggtctactgccccgagctgcacttcagcgagttcacctcagctgtggcggacatgaagaactcagtggcggaccgagacaacagccccagctcctgtgctggcctcttcatcgcctcacacatcggcttcgactggcccggagtctgggtccacctggacattgctgcaccggtgcatgctggtgagcgagccacaggcttcggtgtggccctcctgctggcgctcttcggccgtgcctctgaggaccctctgctgaacctggtgtccccactgggctgtgaggtggatgtcgaggagggggacgtggggagggactccaagagacgcaggcttgtgtgagcctcctgcctcggccctgacaaacggggatcttttacctcactttgcactgattaattttaagcaattgaaagattgcccttcatatgggttttggtttgtctttctggtcgtcagcgtggtggtggaaacagctgaagttttaggagacagcttagggtttggtgcgggccacggggaggggaccgggaagcgctggggcttgtttctgtttgttacttacaggactgagacatcttctgtaaactgctacccctggggccttctgcaccccggggtgaggcctcctgcctgcctggtgccctgtcccagccccaggtcccgtgcagggcacctgcgtggctgacagccaggctcttactccagccggggctgccagcgcatccagccagcccagccctgtgaaagatggagctgacttgctgcaggggacctgatttatagggcaagagaagtcacactctggcctctcagaattcacttgaggttcaattaaatacagtcacaccgccccctcaaaaaaaaaaaaaaaaaaaaaaaaaaaaaaaaaaaaaaaaaaaaa

SEQ ID NO: 1789 - DNA, 656 bp, Homo sapiens
ggcacgagcttaattagaaaatgcttcattgctttaaaaaaaaaaaaatgctaatgatcgtgctgggattacaagcgtgaccactacacccggcctgagtcacattgttcttaatagcatctagaatggtgaatccttcccaggaggttttcagtgtactttgcccaaatccatcagaggaatggctgtctatggcagctatagccttataaagtgtatttcttaaataataaaactagaaagtcaaaattactccttgatttgcaagaattactgcctggctgcaagaatggatgttgtgttagcaggcatgaacacaacattcatctccttatacatcttcatcagagctctgggtgacttaggtgcattgtcagtgagcagatttttgggtttttttgtttgtttgtttgttttgagacagtctccctctgttgcccaggctggagcacagtggtgcaatctcagctcaccacaacctctgcctcccaggttcaagcaattctcctgcctcagctacttgggaagctgaggtgggaggatcacttgagccgaggaggcagagattacagtgagccaagatcatgccactgcactgtagcctgggtgacagaaccagaccctgtctcaaaaaaaaaaaaaaaaaaaaaaaaaaa

SEQ ID NO: 1790 - DNA, 927 bp, Homo sapiens
ggcacgagcagtttttctccttttgcctattaatgtaatgactattgaaatagatttcccagtgggaagacgtttcacgctgaaggaccagtgtgtgcagaggtgaaggcaagagctgcggcagatgggcgaaatgggtgtcatgtgtttgatatcatctatgcagaaatcattagagttggctgcagctgcttggtctttttctgtaaacagccatcttgctgtcctcagatgctggacagtgttaggtctgggaaggtgggcagaggcatgatgcttgcccttttcattgtgctacttcttatccctcccagacaaaatgaaaatcaaatgccgtttccagaaggcctatcggagggctttggaccatgaggaggaggccctgtcatcgggcagtgtgcaaggtatgggaagggatgagcacaccattttaatgtgaagccctctttttccttctgatctctaagtgcatagttcccatgctttggcttacttccaaaacctctcttggaatgctgggaatgaggaactgtgggattcagcccagtccactgagggccagagaggttgattggcttacccaagcctgaccactgtgtcagctgaatgtgagttgaaggggtgggttaagcattcttttggggctggggggagatggaatggtgttttgctcttggtgtaccacctgttcttgcccccagaggcagaagccatgttagatgagcctcaggaacaagcggagggctccctgactgtgtacgtgatatctgaacactcctcacttcttccccaggtaaggtaacagagaagctgcgactttgccttatcccttcagctcgtggactcctgggtcacctccttcttgcatcattgctacccatttcttccatttgctacagaaaactctccaaaaaaaaaaaaaaaaaa

SEQ ID NO: 1791 - DNA, 1635 bp, Homo sapiens
ggcacgagctcgtgccgtggacttttaaactcagtgccctggacacgtgttgctcttctgcagtcagtggtgtggggacctgtgcctgcatcccatgatgctgtctgccactgcccaaaatgtatgggtctacaagtcacacctcccttgtcattcactgggctctggttcgtggtgatggcaaacatgggatggcagcgaaccatactgacaaaggttgaggcccttcagcatggtgtgcagcctctcagcatggacagtgggccctgaagccactgcagctcactgttcctctcccaccctacaggaggtagattgggaagtggagctggccgtggtcattggaaagaaaggcaagcacatcaaggtgaggtggaaagggtgggctcccagtccagagtgcagcagaggccccagctcctgcctctcctagttctgacctcactcaccaacacacggtgccagctgtccctgacactaggaagcagtcagcctccttgctccctgacactgcctttcccttcacccacctttggctggctctggctactaacatgggataacagcttagagatcccttgccataggtgttggtgtcacccatgatctaacctcctgtatggccaaatcccctgcccccataggccacagatgctatggcccacgtggccggcttcactgtggctcatgacgtgagtgctcgtgactggcaaatgagacgtaatgggaaacaatggctgctgggaaaaaccttcgacaccttctgccctctgggccctgccttggtgaccaaggacagtgtagcaggtaggtccctggtccctgcccccttatacctaccattgcacagatgaacagcgcttcagggaggagcatgggttcaggtacatgtggcacctgccctccctggccgccctttcactgctgactccatacagggcaagtctcttatcctcagccacgagttctcccatgggcttccttcccaagccccctagagggaacacaactgcagaggatgtgaaactgcatgcgtgaagtaaattacaaagaacactgagctgatgggtggatcgggcttcctgcggctgccacctctgaaacaatctaagttgagcatcatggagcatagttatcccaaggccaaggcattttccacactacaggagatgaaagccagtgtgactcacccagccactgtggaaatagaacagcactgaccacacacagtcaggatacagcgccaggatgggggcagtgccccagagggcagagcgcagcctcttacacagccacccacaactgtggtggaggtggggggtgtccacatgggccagccatgccaggataccaaagaccccagtgcctcagcaccccatgcagagtcctcagcaaagttaaattgtgtttcagctgctctacttaaggggggtagaacactaggaccaccaccaacagtaaaaagtgctggttagccaggatgttcttacagtaatccatcccctgccagcatccagtacacgaggcttctctgtcccggctagaaccattgcctcactgctttatagatgctgagtcttttttttgcctgggtgacagagcaagattccgtctcaaaaaaaaaaaaaaaaaaaa

SEQ ID NO: 1792 - DNA, 1246 bp, Homo sapiens
  misc_feature (1038)..(1038): n equals a,t,g, or c
aggaaggaaccagggattaggctgtaggggggtgagaaggagagaagggaccaccccattcttctcaagcaaggattgccagcgcgcgctgacacagtgatgggctgcccagggctggaggggacgctgttcctcccgccgccactgcccaacctttcctgataatcgtggcatgcgccctttcctcttccctgccccaccccctggccgcagcaggccagcactgcagagtttgggtgctggtggtgtggctgtaggggaggggagaccacacccaaggtgggggctgtggccatgtgtggccgtgatgtcgatgatactcgttttccctgatccgtggtgttgcagtccgttgtcaccagccttgtttctagtggtgtatatatgtcgcccccgtgatgcatatatacacaggtattaaatatatcgctctatataatattatatatgtgtgtggtatccaaggaatcacttttatgagggctaaagataaagaatttggccagaaaatgcagccatccttgtgtgattaggaggtttcaggggccactggactatttgcaaggtgacagggactggagccatggctcagaggtgattcgggcagccagggacaggagccaccctccccaggcccaactctgctagcttcccagaccacccccatcgagtgcggagagagtgggagtgctcagggaaagaaggtgatttgtatttgtctccccgctgaaaagaacaggattcaagtccagagttttcatcttcagcctgtgatctgtccagggacccttgggatctggggcttcctggcctggccagagctggagcccccacagggtaaggaagagagagtgggaggcagagtgtgatggggaggagggacaggaagacccttttaatgatgagggtaactatttcagttgtgagccttctagggccccaggctgggaggctcagaggactgaatctgggacctgtgttccccccggcaggcagggacaagatggcatggcaagcatgggggcggggtgggtgggnagggatgctgcatttctcagctgggcagtaatcaatttaatggtcctttaaaatgtctgtgtattaaaaatttaagaataccacactttaatattaaatattcataaggtctagtatcttgataataatgtagatgttttaataacaatttttgtccttcttaaaataaaatgaaagaaacttgcaaaaaaaaaaaaaaaaaaaaaaa

SEQ ID NO: 1793 - DNA, 358 bp, Homo sapiens
ggcacgagaagaactgcccttttctctttgaaaaaaaatgaacactaaaggcagagattttcatttggctgtctttgtattcccacaaccaagcatggtacgtggttcaagaaatggctgtttaatcacagcagtaactcccagtaggaaagattctcaaaggaattgttctttaaaaaaaaaaaaaattcacaaagtaggctgtaccctcaaagtgctaaggagagcttctgtcctcgaaaatctccctgaaatactgaaagcatacaaaaaaggagaaagctcaaaactaaattttgactctcatggctggggtttgtatctctttctttaaaaaaaaaaaaaaaaaaaaaaaaaa

SEQ ID NO: 1794 - DNA, 779 bp, Homo sapiens
tgtagtccggggacagccagccgacgtgttcccaaggctgttcaaggtaagcgtgcagagccccagagaagacagtgagattctgtccctgagggtttccccacarcctgagtgatatgatattccgactgagggaatggaaacatcagggctggtctggctgttgctgctagagaagttgggagcaaaggcagccagttagcttgctcttggaatggaaactgtgttaaggaaaaaaattctgggaaaccagtgtcttgttggaaagctctcagctcagtccagacataggatgtggtaagtcattccactctggatgccactggcttccttcaatgttttcttggctcaagccagccagatttattagggttccttctaggccaagactttgagggtggggtttcatgtctagcaaggtacatttcccatcttgctttgctctgcttattgggaaaagtcagccttttctgccgggcgaggtggctcacgcctgtaatcccagcactttgggaggccgaggcaggcagatcacgaggtcaggagatccaggccatcctggctaacatggtgaaaccccgtctctactaaaaatacaaaaaattagctgggcatgttggctggcgcctgtagtcccagctactcgagaggctgaggcaggagaatggtgtgaacccgggaggcggagctttcagtgagccgagattgtgccactgcactccagcctgggcaacagagcgagactccgtctcaaaaaaaaaaaaaaaaaaaaaaaaaaa

SEQ ID NO: 1795 - DNA, 446 bp, Homo sapiens
  misc_feature (12)..(12): n equals a,t,g, or c
  misc_feature (26)..(26): n equals a,t,g, or c
  misc_feature (441)..(441): n equals a,t,g, or c
  misc_feature (446)..(446): n equals a,t,g, or c
gctgtttcccangctaaagttccgtngcacaatcacggctcactgcatcctcaacctcatccttccaagtagctcagactataagcacacgccccgttactttgatgctcaaagtttcccaggtgtggccatgggaggcgtcagtggcttctctgttgcgtagggccattggtttgggttgctcctgagtttctgttgctagatactctgtgctcgtcttgtatgttctcaaccctggaagcagccatttctccaaggagcccttgttccctttagtggagggtggtctggatcttggttagaagccaagatcaagattctgggtgtgctcacagctctaggttgttagcagacagagctggaaagtgtgtatgtgaatacaagtgcacagttgtgggtgcgtctgtgtatgtgcgaatacatgcgtctttgtatatgatnaaaan

SEQ ID NO: 1796 - DNA, 445 bp, Homo sapiens
ggtaccgggtccggaattcccgggtcgacccacgcgtccgggaactgtgacttccccaccccaaattctatggccggctaatgttttgctatggtgactatcacccatctacctggaagcaccagaatggcttagtacagctagggagctcagccagatctcggtgtctgctgtttgagattgtgtggaaggactattgctaagaagcaggagacagactgaacccagtgttggccacaagtgaggactgagacccaggtcacctcttggctgaacatgttagcttgttggtaaatggctctgcagtggttctgcattttagtggggaatttgttttggttcattttggcattcccgcaaccatcttgttggttttttggtaaaatgtggcaccccytccagacctyttagctgtggaamtgagrtattttagcagggtcccgtt

SEQ ID NO: 1797 - DNA, 1006 bp, Homo sapiens
aggtttaggggcaggtgcagtgtcaggagtcccccagccaggccctggcactagaggccatgcggccagacttggatgtggcagtggtcttggggcaggtgctgcaggctctaccactcttcaactgtgtcttcctgttctcctcttctcccatcagcaagctcaccccctggcttttgatgccagcctcctttgtggtgtggcaggaatgtcctgggaagagacaaggcttgaccacgtggatggagtgggaagacaggaggcactggggacagcatgtggctggggtgagctagtgggcggtggtactttccccaaagtccagagcactgggtgggagcagcgctcagctgtagggatgtctggtgtgaggttcttctgggcacctggcagagatcccaggtggcaactggcagaaggtccccagctcagagtgggccctgcatggcgttgtatgctggttttcttttgtgggcaggacacctgcaagagggctacagctggagaaatgggtggggargagtggctgttgacagctccctgggcccagagagaattgagtcagaattggggaaattgcagagcgagctcaaaagcagaaacccagttgggggaaagtactgagcccagggctctaaatgactaatgcagaaatgatgttaagtttacctccagtcagagtgaaactttgggcagcccccgctccctacacgcagctgcccttcaggggaagtgagaattggcccaagccacaggtgaccatgacaggaccttgcactagctgagacccgagggtttaggaaattatatgagaaatgaagcaagagatgattatcttttgacagccaagtccccagatggaatttagatatttgaactaggcctaaggaatgtctgtctattaagtgtctgtagaaatttctgtcatctgcttgcacttgctgttttactctgctaccattcttttctctctccatctcgtaaaaaaaaaaaaaaaaaactcgag

SEQ ID NO: 1798 - DNA, 1369 bp, Homo sapiens
ggcacgagggttcacacaactggaacccatctccaggaacaaacagctggaacccatctcccgttgaagggaaactgccagatttttgtaagattcttcctcctgggcacctctaagatactgatggctctgcagaggacccattcattgcttctgcttttgctgctgaccctgctggggctggggctggtccagccctcctatggccaggatggcatgtaccagcgattcctgcggcaacacgtgcaccctgaggagacaggtggcagtgatcgctactgcaacttgatgatgcaaagacggaagatgactttgtatcactgcaagcgcttcaacaccttcatccatgaagatatctggaacattcgtagtatctgcagcaccaccaatatccaatgcaagaacggcaagatgaactgccatgagggtgtagtgaaggtcacagattgcagggacacaggaagttccagggcacccaactgcagatatcgggccatagcgagcactagacgtgttgtcattgcctgtgagggtaacccacaggtgcctgtgcactttgacggttagatgccaccatgtagggattatcgcgagtggttgaccttacacttactccttaaatagcagtgagtaatgcatttgagctgtcccaggctctgtctcctcagctcatttcctactctttttctctatataactcattctattaaatacattgcaccaaagagatatggagacataaacctgtaatgaatgaggctgggcttttctgtaataagcttccttttataatactggtcagcttagctctctcagatcctatcctgtggaatttagttattatgtgtatttatgtagtatttcaaacatttcaaaatgctttcatctatgtttatcacattttaataccacagcacttataatgatgtcactacatatagaagctcaaagttaagggatttgctgaagactgtaaagttaatggaagaattgagacaaaaatccagtgtagctggccacttatccagggctttttctacttcatcacaaggaatgttttgaaagtgtctgctttttttatccttaaaattcacctgtcagggaggcattaaaaatttggaaatgtatgccagcaaaatgtgagctctgtattttttggcattcttatgtttgggtttaataagattaagaaaatgatactgggaattttctttttcctgaaactttgaatcaccctagtaagtcaaagtactaaaaaatgtactagatcattaagacttatgtgctcttactgattgaaagattttttgttttccttgtaataaaggacctaaaccgaaggtacctgaaaaaaaaaaaaaaaaaaaaa

SEQ ID NO: 1799 - DNA, 676 bp, Homo sapiens
ggcacgagtgagacccatgatcaggggatgtggcggggggtggctagagggagaaaaaggaaatgtcttgtgttgttttgttcccctgccctcctttctcagcagctttttgttattgttgttgttgttcttagacaagtgcctcctggtgcctgcggcatccttctgcctgtttctgtaagcaaatgccacaggccacctatagctacatactcctggcattgcactttttaaccttgctgacatccaaatagaagataggactatctaagccctaggtttctttttaaattaagaaataataacaattaaagggcaaaaaacactgtatcagcatagcctttctgtatttaagaaacttaagcagccgggcatggtgctcacgcctgtaatcccagcactttgggaggccgaggcggatcataaggtcaggagatcaagaccatcctggctaacacggtgaaaccccgtctctactaaaagtacaaaaaattagctgggtgtggtggtgggcgcctgtagtcccagctactcgggaggctgaggcaggagaatcgcttgaacctgagaggcggaggttgcagtgagccaaaattgcaccactgcacactgcactccatcctgggcgacagtctgagactctgtctcaaaaaaaaaaaaaaaaaaaaaaaaaaaa

SEQ ID NO: 1800 - DNA, 1061 bp, Homo sapiens
gctgggaactgcttgccacttccttggggcctctgattttaggttctattatatcttgtttaaattcctgaggtattgtgagtcagctaaaatgttataaaccaaatcctattttcccatttacattttcaccttaagatatttcgtcttcattccaaccctctctctcaaattggtaagccttaaacacttcagcggtctgggacagtttctatttaaagaagctctttgccatctatgtatagagagcgttgaatagccattgttatgtttcagtctgtctctctcacatatttacattttaaatatgggctttaaaaaatggggtgcagttttgtttcattcttctgcctttctaaatcctctccaaaattgggtggcccttcttaggttgaaagctgttttctcttgttcctttttttctcatctggattgcagatacatttcactagcaccatttctccttacttgggccttacgagggccttagccaaattccagcccgtgcctccctctaccagtggtgggcacaccatctgcgacattctcctccatcttccttttgtgagataagaaggtagaattccatatgacataagaattccacggctttcacctcctaaatgctcatctgtctttcctcctccctgcaaatgttgactttcaatggctttcaatcttcttttctcagtcactacttttttttttttttttgagacgaagtccagcctgggtggcagagtgaggctccatctcaaaaaaaaaaaaaaaaaaaaaaaaaagcactttgggaggccgaggtgggcgaatcacggggtcgggagatcgagaccatcctggctaacacggtgaaaccccatctctactaaagatacagaaggttggccgggcgtggtggcgggcgcctgtggtcccagctgtttgggaggctgaggcaggggaatggcgtggacccggggggcggagcttgcagtgagccgagatcctgccmctgcmctccagcctgggtgacagggtgacagagcgggactccatctcaaaaaaaaaaaaaaaaaactcga

SEQ ID NO: 1801 - DNA, 2046 bp, Homo sapiens
  misc_feature (63)..(63): n equals a,t,g, or c
  misc_feature (1670)..(1670): n equals a,t,g, or c
catgtgaccctctgactcaggttttgtgttcttctagtggaagragcctgggagagccaggcntcccsggactgctagcctgcttttcctggggtccctggagccggagaagaaccaggatgttgctgcctgcagaagctcagctcaggaagacttccaggaacctgaggaggagctgccactaacagccatatttcccaatggagactgtgatgaccttggaagggggtcaaaagcctgtgatggagtcgtacacactcctgctgagcccaccggagactcaagatgaaggctggacccttgcgctgtccctggctctaacctacagactggggcctggctccgtcttactggcccccaggtctccatggagactgcagaaacccccgcctgctggaggcctgccacactcacagttaccagctagacagtggggcttactaagacaagcaggacctaaaacagtgtctcccctgggaacctactccccacccagcatttgctaagtctgatcacagggaggttattttgtctctctgtctcggtttctctgagccactgagacagatggctgtccgctttgaggctctgcagagytgtggcaccccatggtgtgtctgcagtgttctgggcacatgcatgggcacccatcgttgagagtgcagctgggaagaactctgaaccagaagtcatcagagctgaggcatggccttgaacatgtcactcagtctctggggcttctgtttcacaaatgcatgagggggccaccagcccagtggctttaaaccaggggcaggttgtccctccaggcagcattggaaatgtgtgtgtgttgagggggtcacagtgactgtgggggcaccctggcatctagtgggcatcccacaatgtgcagaacagtctctgacagcaaagaattggtccattcaatgccaattgtagtacctttgagacattctggctgagcaatgccttctccctgtcagagtcccccagagcagagagggtcaggcttccctggaccttggctcccagagcaagccaaaataaagactacactgttgccttgggggcttgtcgggccagggccaagacggtctgcgtgctgcagggccaggacagaaatagccacacatgccggtgagaacaaagagcctctttctttctcatgttgacatcgactttctgtgccaagtcctttgggtataaggatgctagggaattcctataggcaccaaacagaaggaaagctaggggcttggactactgggtataggacttgctctagctctcaggtcctagcccaagctcaatgcaaacacagcccctccggctctctgtttctgtgaggttctggaatcccttcctctgtgtccgtgagtctgacagaatcgatgatgttcccttagagctgggaaatccatgtgtttattcacggagggaactcaccattacctcccttgtcttctttgcctgccttggagaaatccagagtcttcggaatggcaaaggcagctcctggatttccctggaggggaggcactagctgagggaagtagctcccttcattcatgatgcacagtttacgcagcagacacacaactgtgcctactatttgctcggtgccctgcaaggtgctgcctaactttgatttgttatttcaasctmtnctcccataatagggagtctaatccctattccttccctgcctgatgaggatgktgtgaggatgaggaggacggcatctcatttggggctttttggcagtgggcctcattttaatcctgcagggctgcctgccagtggatctatccagctgcttccttgtagccaagaatgagttcaatgaattgtgattcactgattttattgattttgttttaaaacagggagactggtatttttgaagctgctatcattttctatttctttattaatttctttgtaatcatcttattaaagttttcttatttagtgggagagggaaaaaaaaaaaaaaaaaaaaaaaaaaaaaaaaaaaaaaaaaaaaaaaaaaaaaaaactcga

SEQ ID NO: 1802 - DNA, 577 bp, Homo sapiens
aggttatgcctctatcccttttttttccttagtttttatgttgaagaacccagggagagttaaccaaagtttgaattttactgattgtacactcatgttgcatctttcttcattccttgtatattttgcaaattggttactgaactcagagacttggtcagactctggttcggtctctttagcaatactgtaggcagtgttgtgttctttcatggggaggcagaagtctggttttctcttttttttaaatcatgtccgcagttgttgggctcagtgcccagatccattaatttatcaatggtttaaaaatagtgacattctaattgtgtgggtttttttaaaattttttgttggaatacttttattaagagatgcttctgcttacctgctgttcagttatccagtggcacagttatataggaaaggtaggatatatacttgattctttgcctttatttattcttttttcaaaatagtgacttagttccctattattctctaagagaaccagctatttaatttaatttaattaattaatttttttgagaccctgactcttaaaaaaaaaaaaaaaaaa

SEQ ID NO: 1803 - DNA, 2108 bp, Homo sapiens
  misc_feature (5)..(5): n equals a,t,g, or c
  misc_feature (34)..(34): n equals a,t,g, or c
  misc_feature (41)..(41): n equals a,t,g, or c
  misc_feature (2045)..(2045): n equals a,t,g, or c
  misc_feature (2075)..(2075): n equals a,t,g, or c
atccntaatccggcacttgtagaagtcctccatngagttgnccaagttcctagattagatttggttagcacctttgcagacttcaggcctgatgtgtgtttttcttagtacaccatatcaggaggcacagatatggatcagttctattactggttatgttaacttcagcttggttaagatggtgtctgccaggtgtctccattgtaagttattcattttccctttacaattaataagatcttgtrgggwagaaagtaatctttctttaaataaagcagcaatagaatgagagatttttaaacatataaaaagcagaaaaatataaatgaatcaggagtaaagtaacattaaaaattggaatacatttaaagaaccatctactaatttctaaccatatattatttttaataatggtcttaaaatttctttttctatagacaccaaatctggctgaatgaaataaattggtgataagtggaaaaaagagaaaaaccaatgattcataacaatgtatgtgaaagtgtaaaatagaatgttactttggaatgactataaacattaaaagaagactggaagcatacaactttgtacatttgtgggggaaaactattaattttttgcaaatggaaagatcaacagactatataatgatacatgactgacacttgtacactaggtaataaaactgattcatacagtctaatgatatcaccgctgttagggttttataaaactgcatttaaaaaaagatctatgaccagatattctcctgggtgctcctcaaaggaacactattaaggttcattgaaatgttttcaatcattgccttcccattgatccttctaacatgctgttgacatcacacctaatattcagagggaatgggcaaggtatgagggaaggaaataaaaaataaaataaataaaatagaatgacacaaatttgagttttgtgaacccctgaacagatggtcttaaggaygttatctggaactggagaaaagcagagttgagagacaattctatagattaaatcctggtaaggacaaacattgccattagaagaaaagcttcaaaatagacctgtggcagatgtcacatgagtagaatttctgcccagccttaactgcattcagaggataatatcaatgaactaaacttgaactaaaaattttttaaacaaaaagttataaatgaagacacatggttgtgaatacaatgatgtatttctttattttcacatacactctagctaaaagagcaagagtacacatcaacaaaaatggaaacaaggctttggctgaaaaaaacatgcatttgacaaatcatgttaatagctagacaagaagaaagttagctttgtaaacttctacttcatttgattcagagaaacagagcatgagttttcttaaaagtaacaagaaaaggaacaaaaaaaatgaggtttgaaatcttttaccatggcaaaacattaacatctttctcaaaaacatagagaaatctggaaaaatcaagaagataaaattctggaccagttagtgacattctttcaagcatacttgtaaaatgtttccttaaagtgttcttgggatgaaaatgattgtcatgtctccaacaacagtgaactgatgttgttccttggaataaaagtcaatccccaccttaaaaaatgtatggcttctttgaggaattcttatgtcttaaagactttttacattctagacaattaaattgattgaggtcataaattaagaagtgaatagttaccactacacggtaaggtaagcagcctgaaagcatttgtatcatatatgtgtgtgtgtgtgtgtgtgtgtgtgtgtgtgtgtgtgatatataaaataaaaaamtycttctacttgtactttggcattcaatttttagaaattcagtctcaaatgccattatggtatttttcaaatgatacctttaagtcaatggtttctttcgactgcaatagagaagatatggcaagaaaaatgttgcagtaccatcttctgggagaacattcatgaaatccttcagttntagttccacagcaacaattgacaatgtttnttttaatgatgacaggtagagttgatacttctc

SEQ ID NO: 1804 - DNA, 1026 bp, Homo sapiens
  misc_feature (971)..(971): n equals a,t,g, or c
  misc_feature (1003)..(1004): n equals a,t,g, or c
  misc_feature (1007)..(1007): n equals a,t,g, or c
ttccccactttctcatcctctttcctgtgcaccataacttccccagcagtagtctccagtgggaatttgggagggcaggacagaagccaaatccaggccctgagcaaacagaacgctagatgatatcgtcagggagcagcaggtatgcagagacctgggacctactcctgtttctgcgactgacatgctgtgcacactgtgcatggaccccatggcacgatgcaggacggggctgcagaacccacacaagctttgaggtcagacagtccacgaatcccagctctaccacccacagcttttcctcttctcagctgtgtggccttgggcaaattgcataacctctctgaaactactgtcatatctttaaaatgagtaggaaatgagacctcctttgcaaggtaattgtgaggattaagttgtgagggttaattgttctaggtgctttcacccagaacaatacaccagcatataaaactgacctccaacaaatatgaagtcactttatccttgtctggcctgttctgcctcttcaattctatgcaatgaggcataaaaactcggatgtcctgggcctccacgttttacatgtataaaactggggtatcctgtaatcccagcactttggggggccaaggtgggcagatcacctgaggtcaggagttcgagaccagcttggctaacatagcaaaaccctgtttctactaaaaatacaaaaataattcgccgggcctggtggcatgcacctgtggtcccagctactcaggctcctgagtaacttggattgcaggcacatgccaccaggcccagctgattttttcaaattgtctcactatgttgcccaggctggtctcaacttctgggctcaagtgatacttccaccttagcctcctattagtttttcccttacagcaattcctgcaatatataaaaggtctttacttcaagtgagctgtgaatgcaccactgcaatntccagcttggcagaggatgacagagaccctgnnttncaaaaaaaaaaaaaaaaaa

SEQ ID NO: 1805 - DNA, 1103 bp, Homo sapiens
ggcacgagtgaatttttttaaaacaatctagccatcatcaaggtgctataagagttgtataaaagatatttttggcatttctaggcaagtatcagccaataagtatgttagtgatatcacagattgtaccaactattaactatgttaaataagtattcagtttcatgtgatctctgggaaaaaaatatgctgccttggtgctaatattgtatgtatttaaatgatcatccgactcagaaatataaacacttttaatgaaagggaggaacggaaggacaatttccagtgcacagaatcacttggatgaaataagaccagctctttacccttatttttggatatgccttttttggaagagacttagactttatccttattgttgttagtgttgttaatattcgttgcttcagcccacggtgccttggtctctccacaatcaaatggaggatcccccaagcagcttcattacagagtgatattgggaaagtgagatcctctcaccattttgccaagatactctaaaatgacatccaagtttaccagtagaaagacacaggatgcacagaatgggcatgaccttcagctcacgagcacacctggagaaattcagaaccaggttctgaatcatcacgattgccttttgcatgaaaacatcggctggtgatgtgacttctcttcaggccatgagcctaacaccctgccggttttcatgcccgctgcagtaatggacgtttgtgtgaagaaatgaactgtggagtacaaaatgctttgagtctttccgattgctcattaattcacttttttgttacttctttccaaaatggaagtgctgaagccatggtctttctgcccctccaagctgatgaagggaagcctttgccaatggcccatggaagacacttggtttgagaaaccctgcccacttccaaagaccaaagagattaggaaaagcctggcagtattctccaactccaaacaagctctagagtgctccaggaaaagttatattcagtatatgaataagtgttattctccattattaatgtgttctgaaaatatattatgaataaatacatcaccacacccaaaaaaaaaaaaaaaaa

SEQ ID NO: 1806 - DNA, 1421 bp, Homo sapiens
  misc_feature (1267)..(1267): n equals a,t,g, or c
  misc_feature (1297)..(1297): n equals a,t,g, or c
gcacctgactgcccacacagatggaaaggtggcaatgaggaaggcagaagttgggcctcatcaggtgtgtccaccatatgggcacaggaagcacaagagagggcaggccctcctaccacccaactgcaaagaagcaaggaagtggggggaaggggatgggatacaatgactgactagcctgttgaggtgtagtgatcctgccccagagtgaggaaaggacacagagattctccttccacaggtaggggtgtcttccagtcctgggtgaagaaaacatttatgcatagcaccctgctcatagcaggggttccacagttccagcagtaatgtttgagataaggactgctctgtcgttgaggcttatccccctctttgtgtctacatgtggagttacccagaaataagaacatctgggttcttaaaaagtagcatcccaacacaccaactttgatgcccactccctccttcgatgctcaactttgccctcagctataggagatccgagaacagtgactattccaagactaaaacctgactccctccttggtacattctaattctcctcaacagcaccactgagtaacaaggacactgcctaaggtaagtaagggtcctcaattccccccaagtttactagcacatgcataaaatattattaacaccatgaatggaagaggatgacgggataaaagaaattaggcttaataaagtgaatgtctataaaggaagaccagatcctgaaatgaaaaggcaaaacttatttgtgagctttggttaaatttatcatgaaaattacacttattaatgttttattgytattaacagcatccgaacaatcctcatcttttgaagatgccaggagcaattcggaatactatctgattgaatgtgaacctgcctggttaatttattacctgatttgatgaaccaaggaaagccatgcktttaaacaaatatttacatttaatatgggaacataaaagagctttaaatattatagactttgtacctgttatatatatgaatattccctatgttaaataataataataactagtgtttatgaatagaatcatatcatctttagaaattgtttaaaattagttctgggaagttgaaagtggggaatgaagagataataaataaaactagattggccatatgtttataattttttwagattgggtaatgaatacatggagtttcattatacttttctctccacttttgtctatgttgaaaattttctgggagctaaatgatgagnacacatgggacacmtgrtgggggacaacanacactaaggcctgttgaggcagggagtcggcagagagagagcatcaggaagaatagctaatggatgctgggcttcatacctgggtgatgagatgatctgtgcagcaaagcaccatggtacatgt

SEQ ID NO: 1807 - DNA, 845 bp, Homo sapiens
gctgttttgggttccccagctacagtcggaaagacatcagagtgttcaaggcggagtccaggcctgagatctcagcaggccagacaggcagcagatgcttgttgcttttcttgtgttatatttttcgttcccttacttagcatttgtgggaccaaagccaacaaacaacaggttgttaaaagaatgagagtaatttgacttccgacagtgattggggctcggggttgttgggtgttttgttttctgatttgaaactagctgtatggtaaccactaactctcgccttattctttaatggaattttggaaaggcctcactccagtgactctttggatctttcttcyctaagtagatgggaagcctgtaagaagagacttggaggcaaagcaaagggaatcagcacttaaccctcacccaaagggcccaagagaatctttagtaactggaggcagagcagactggagcctctayggggcatctccccatattggagaattcagtctttgttttggaaatcttataatgtctttggagaggctttaaataattttgtttttcttagcaatgttatgctctattttgagacatggattttttttttcttctagtgtttctctcctgaggcaaagcccaacacacctgtcttttgtccacttctccagcaaattagatttgtctctgggaatgtgtttgtaacataccaacctactgcagaccagcagagggagctcccatgttgaatttgtttgttagctattttcccccctttcacaaaaactatttcttgacgacctttgagagatttcaataaaaattttaatcagagcaaaaatgaaaaaaaaaaa

SEQ ID NO: 1808 - DNA, 1781 bp, Homo sapiens
  misc_feature (1363)..(1363): n equals a,t,g, or c
  misc_feature (1377)..(1377): n equals a,t,g, or c
gttttaatggataaatttgtgtgttgattttggaggaataaactcagaatactccctaaagatagtgaattttggtctgggtaatgaaaagtaggaatataattgattggaataatgttgtcatatgttgttttaatgtttatcttaaaattagtaacttttccaaggaaaattttatttgatagcataacttctctggatattattttaaatcagtctggtaaagagaaaaaatacagaaagtattataatttgtgttttcatcataaaatattttgcatcagtatcttattgcagtacggtaggagactatgagaaatattttgaatcttaaaagtaccagataaagacacaataactaatgattttgtctttaggagggccagaactaattgatcctgctggtctgccattacctcagccagctcagtcctgggtatggcttgtggatctagaaagamcaattgctctccttattgggcggtgtcttggtggcatgcttcagggctcccctgtgtctccagaggaacaggacactgcatattggatgaaaacgccactgttcagtgacggtgtagaaatggacactcctcaattgggtaatgtgcttctctgcagcatttaaaatacatgcctgtttgtacctcagttggagatttctctattctgatttgctaaatagagaactgacaggcaccaattgcaacattagcagtgtagggaatctggggctatgacttggagccctaagaaaaatggttaaatcgtgcagcacaatatggtgaaaagagcccccagaggaaatagaaattgtaggtctggtcctactctgtcatatttatcactcattttgagcaagtcatctaactcaatgcttcatcacttattttccgaggcttggaggttatgaaactgcttcccagaatgtaaagcactgtaagagtacttmaccatgacttatcagtgcmgcacccctgagatgtgagtggcagcctcttttcctcccagcctgtcttgctttcatgctgacattatattatgtcctaattttttcttcgccacttaaagtgcctttagaatttcccttctgcagcatctcccatttgtatatattgstggcaggctagwwcctagactgarcatgaagacttatctggtaccccagataatccagttgktttatctagaattggtcctttaatctctctaggcttctaawtttgattctataaaataatgatttggattagacaggctacatgatattattagatctaaaatttattatttctctgataagacaaagagactcaacatgtccctgaaggaaagtctaagagagactgagaggaaagaaggagancggaaaagaaaagnaaaaacaaaacaaaatgagaaagattatactttgggatttggagggttggagagtgggagtgagggaagcagttgaggattttcctccatttccaaatatgagtgtacattcatcatttcatttatgaaccagaaagtgattttggccatggctggtgaatgttggactggtgtttatgaaacattttgttaaagaaagtaaaatcatggtttttcaaggggtytttaacatgataaagataattccactgctgtcagtgtttaaccttgtgacagtcctaaaggacctcctgagaacaaaagtatctctatctctaccctcttcatatttctgttatatttattcaattaaactggcctttaatatgaagaaaaaaaaaaaaaaaaaaaaaaaaaaactcgag

SEQ ID NO: 1809 - DNA, 919 bp, Homo sapiens
  misc_feature (11)..(11): n equals a,t,g, or c
ttacttaattntactgtcataccatgctattacctacactcctgtgtgcagtgggcattcagtaaatgtgtgttgaaggactgggacgtacgtggaggctgctggacctggtcagagactgatgtgccttagcggcaatggttagagcttttcagtgcatcccacctccctgtcgcccccatgctcggcttcctcacattcaggagcctgacttggatcagacttggggctgcacagtggagcaggtgggttcccgtgtcattagtaataaggagagggttgggggtgggcagggctccagaaagtcagcagtgtgcctgggcacccaccccatcctctacctgccacacctcagagggttcctacagctgcacacaagcagttgagagttgatgaccaggcccatagggctcccacagctggttcccaggccagtgagtgctgtgagaatacagtagcacaagtccttgttctctgaagagtgggaaggagaggagtgagtgaagtagcctgtcccctgcaggtcctctgcgatggcattgtctcggttcccgcagtgctgcagtgtggaagggagtgccccatcctcattacagatgacacactggagtgtggaggggtcgatgacttgtgcagggtcatatggtacctaaggggcagatctcagacttaaacacaattgatgtctaacccctagacagtctttttagtgccctctgctctcagtcttgttgccctagtatcaagcaatcttagacaaacatcctgaattcttacaaacttacctctaaactctgaggataaagttgccagtccttttaatggtcagcctaatcattctgtcagcctaatcgggtaattgctttttttaataaatacacataaaaaccaaaaaaaaaaaaaaaaaatccaagggggg

SEQ ID NO: 1810 - DNA, 495 bp, Homo sapiens
ccacgcgtccggtagatcttaactgtactcacccctccaatacacaccatacatgcacaaaatggtaactgtgtgtggtaatggctgtgtaatctgtggtaatcacaaattaatgtatatcaaatcaccatgttgtgcatgtttaatatatgtaatttttatttgtcaattatgcctcaccaaagcttgtgggtggggggaataatgaactctgatgtaaggtatggcctctgggttatgatgtgtaaatgcaggctcatcagtcccacaaatgtcccactctgggggaatgtgagaatggagactgtgcatgtgtgggggcatggggtatatgggaactgtaacttcccttccattttctgtgaagttaaaactgcttttttaaaagtctgtttaaaaaataaaaataaaatgaagaatgatgaccgtgctgaaaaaaaaaaaaaaaaaaaaaaaaaaaaaaaaaaaaaaaaaaaaaaaaaaaaaaaaaaaaaa

SEQ ID NO: 1811 - DNA, 1483 bp, Homo sapiens
  misc_feature (508)..(508): n equals a,t,g, or c
  misc_feature (711)..(711): n equals a,t,g, or c
  misc_feature (1021)..(1021): n equals a,t,g, or c
gaattcggcacgagcaaacacagtttcacactgattcttaacattttgttcaacttttactcagagggcaggctgagccagggagcaaaaaggcaaaggactcctactcacatacccacttagcaaaaccaaagcaccttgggctttgaacccacccttcttagaaggcaggtttgggggttgaggccccttgagaagctcacttcaccctctccccatgccatcccattcctacccatcccaagatgcttctcttgtatttctttcagcacatccagccatctccctggggagcgtttcatatctgactctttatacttccagtgatgttttggcatccctaatagactggctcccaaggcagtctttaatcaggagtcttcccctaatctagctcctcaagaacccaagggaagaggcacaaagagaagtatgaataggaagatagaagggtaacccagtcagagagggagtggcagatgacactgctgaaaaggagtttccaganagttgcacaccatgagccacgctgtctgtccctgaccacaacctccactggccaccacctcctgggcttcccctccctccacccacagaaaccattgctcaatctcaactggactcttgmaggcctatytctmcctccaaacagagaytcctggacacagagctgcagacctctaaccactcctggaacataaaaaaaaccanggtggttctacagcatttacacctccagtttccctcagacagaatccagaagagaagaacctcgctgatctctgagcggagcatgtctccaagctcaggccagccccaaaactccaatggcctcaactggagtggaaatccctcaaaggcacaaacccagttcctaccatctccctcagtgcctggcaatgtttgtggttggttgagtgagttaacaggagaccatcttttggccttttttctacctctgttttctcttactatacttgcctacatctcatcttctggtcaacaccaggtactcaccccntgagcttcttgtgaacttgtctggggcccaccggcctaaacatcatcttttttgtttggaattaagctttgttgaacttttcacaggtttcatttatgcaaatgcctgtgatgggacaaaaaggtctgcaaacatggaaacctggtctaaagatgtccaaagtaaactgtctgtggagtcgaatgacatttgagccctggacctaaactccaaatccaagctctttcccactgtgaccttgggcctctcaaggctcagtttcctcacctataaactgtagagaagccaatwacagactcatccacactatgaggctgtgcataaggtcatgtatgtaaaactacttgctttgttgatcattctgtcccagataagtatgaattattatgcatcatttcattaaacaagaaagcttcactgtgttaatatgcacaagtaaaaaaaaaaaaaaaaaaaactcga

SEQ ID NO: 1812 - DNA, 1332 bp, Homo sapiens
ggcacgagaaaaaacattaagacagaacttaaaaacaatagattgactataatccaaagacgagtgtacctctaaccacaattttcatttatttttaaatgtttccttcatggcctttcttgtggctcaccctatgcagtttgtgtatttgttgacaactttatgtgtttttaatatggtttttgccaaacttggtttttccgagaccgtcttttctcagaggctcagttttaccgtcctatctgcagtcggctactttcagtgggcagaagaggccacatctgcttcctgtaggccctctgggcagaagcatgcgctggtgtctcctcctgatctgggcccaggggctgaggcaggctcccctcgcctcaggaatgatgacaggcacaatagaaacaacggggaacatttctgcagagaaaggtggctctatcatcttacaatgtcacctctcctccaccacggcacaagtgacccaggtcaactgggagcagcaggaccagcttctggccatttgtaatgctgacttggggtggcacatctccccatccttcaaggatcgagtggccccaggtcctggcctgggcctcaccctccagtcgctgaccgtgaacgatacaggggagtacttctgcatctatcacacctaccctgatgggacgtacactgggagaatcttcctggaggtcctagaaagctcagtggctgagcacggtgccaggttccagattccattgcttggagccatggccgcgacgctggtggtcatctgcacagcagtcatcgtggtggtcgcgttgactagaaagaagaaagccctcagaatccattctgtggaaggtgacctcaggagaaaatcagctggacaggaggaatggagccccagtgctccctcacccccaggaagctgtgtccaggcagaagctgcacctgctgggctctgtggagagcagcggggagaggactgtgccgagctgcatgactacttcaatgtcctgagttacagaagcctgggtaactgcagcttcttcacagagactggttagcaaccagaggcatcttctggaagatacacttttgtctttgctattatagatgaatatataagcagctgtactctccatcagtgctgcgtgtgtgtgtgtgtgtgtatgtgtgtgtgtgttcagttgagtgaataaatgtcatcctcttctccatcttcatttccttggccttttcgttctattccattttgcattatggcaggcctagggtgagtaacgtggatcttgatcataaatgcaaaattaaaaaatatcttgacctggttttaaaaaaaaaaaaaaaaaa

SEQ ID NO: 1813 - DNA, 1676 bp, Homo sapiens
  misc_feature (1669)..(1669): n equals a,t,g, or c
tattaagattgacaggtttttscacatttttggaaatgtttaatttgtacactgatttactactctraccaataattgttgatgagtgtatgagcatcatgaatgcgtgcattgaactactgtctgtgtctttatgttttaacttctttcaagatgtagccatcagttactgcactgctattactgacttaaatggacctttttscttttacaaactatacttatctatggttctttgttgaagaactcaggagttcgacattaatagaaattagaaaattttataatgtattataaaatccattactaagttgaaagtatgcttttaactctgtgtatcaggggatgtatgtttgtgtggagatgtttttttctgtctgtaggcacatgtatatatcccagtaagttcttattttcatttcatttctacatttttatgaacttgttttataagggtactgtttagttgtgataattaaatatatataaaagctttctgagagattatttactatatgaatatattttcagctggctgatcaaaagtatttttaaaattttgyttttagccattcaaaatgtatttgtattttcagaattgaatgcaagtcatacttagagctcaattaaaatactcttgcaagaaaaagcattaaattctctttgagaattccgtgaaatgcaaattaagggaaaaataggttttaagcagtagcaaaaacacaccgctaaaaatggcctttgaattctcagagctatggaaaaatgtgagaaactaaattgtctcgagatgtcaagatttttctatctccagttgctattggcctgtcctactgttgtctttgaatatttcctgtattccaccccaaaagatttcaacttttagtttttctatcactgggcaaggtcagactgggtttataaaacaatatattggcatattgtgattctttgtaattgactataaattggttttgaaatgtccaaacatacgttgtgtgtctttatattgtactgtgtgttttaagtaactggcagaaaaagaattggaaatgaaatttccaatcagacaatgtagtattaaagaaaactttgttttaaatatgcggtaccatgtaaaattactcgtgttaggaataaagtccactgttgaagttgaatgtcactaagcttattatgttaaaaggaaccagtgtgattaggaaaacctaccagaagccagatacagtgtggtacgtgcaacatttcatgcacattttgattttgtttgtcattcaaaattgtgcttgtaaaaatgtatacaatttctgagttttataatttctaggtacttgttttttcttgctggtaaatagcttttttttaaaaaaaaatctaatataaaagaaaccatgtttatattttgttagtgatcaatgactttgtttatatggaaatttgtatattgttggcacacattttgttgaggtttacgtgcatgaaggcctgcaataattagcacaatgaaaactgctttttcttacatgttcatttttttgaaagattgtggtgcaaaggcttactctaataagtaaccttctggactatggaatgaatataaatgaatggcactttgagtgttaataaagctaatatttatttccacaaaaaaaaaaaaaaaaaaaaaaanaaaaaaa

SEQ ID NO: 1814 - DNA, 947 bp, Homo sapiens
ctgcaggaattcggcacgaggaagctttgataacataaattgcttgcctgccatttaacaatttttgaaatgaattattgtctaaatagtttcaatatatgttttattttatgaatttaacaaaattcttttttcttgatttagctaattttaatagagtgttttcttatcaaacatttacttatcttctaaaactccattcttgcaaactgtttggagggatttgtttttatttttattttgtagtatagctcatgtatctagaataacttgttatgtttattatttcatcatcataaattggcttatatttcatatgcttgcagacatatagaataatcgaaaacaacaaaattatatgtatatacatatgcatacacacatatgtaaaatgtgaatgttttttatgttttgccttttattacacgttctgccttttattacatgttttgccttttattaaatctcactttgctcttcctcattcttttcggggagacatactttttcttttaaattctactactggctccttacaaaattaactatcctttaaagtttatttattaaatttatagagtcaagtttgaaaaattgttttatttcatcctttatgcaacaaggtatttattatacttttatttttcatcatctgtgaatatttagagccaaatttttatggtctttgtggttttattcttgctatattatctctgtctggaatatttatttatgtatatatttattaaataagatttacataaaaggttgagccatttattttagaattaattcaaagctctttggatgtaattttattctaaggctttgttattcttaagttcttaattttaattcctatcactgtgatttagaataaagtgatatttcttcaataattgaaaaaaaaaaaaaaaaaaaaaaaaaaaaaaaaaaaaaaactcgag

SEQ ID NO: 1815 - DNA, 1744 bp, Homo sapiens
ggcacgaggtcagagaggctaccagagtgtgattcattctgcctctgtcctccccatccctgctccttgacctctcccagacaccttggtgttggtcttgtgccagggtattcccagggctgaatgatggcctgtgttggtttttttgtttgtttggttggtttgtatgtttgttttggcacagtgtgaaggggtcgcagactttcacttattatttgctgagttgtccatgactgatgtccatttctactgggtgatccacccccaaccctttctaaaaggctaactgatcttttcttgcttctgtacgctctctttccctctcctccctctcttttcttaatttcagggactccttccacagatctagtttcaggaaatgtgaaacccagttgtcacagggcagctaagaaaagccatcttcattcgtggagactgtggccctgcaaccctggagaaggacttgctggtacttaaaaaatgggacatttgccacccaggactgactgtacactccctgatcagccagcactctggaagctttgggatcccaggaaccatggaattattcccaaatggactctgaccagatttttgccatactggggggtggcgggatggaggatgggtactcaggcatgactgcgtatttattaaagtgtgtttttccacaatgtaccaaacaaggcataagcagcttctcctgctgactggccaatcactgcccatctgagagatgatttcctctggcccatatttgaatttattggagtaactcaaattgcctgaggaaaaatggaaaaattatccaccagtcgattcaaactgaatttcactctttataggaaggcagggcaaacttgtaggagtacgaaacattttcaataaatctacaaagggaagccttactacaattccaaaaatcatcatggttggaaatttgggaggagattatttgtgaacttgttacccttttggtaatggtggactaattgctgtatagttatttttgttttattattactgttacattaatttaacatgcatttatagaagaatacattcaaagcactgatgtaggagatacacggtacttggagcagtcagccaraaatcacagatactgctttcacttaaatggaaacaattctccgataatgctttgctttttttcttatgtcactcttgtgtactatctatttttctcctctctgggaccaagtttctttttataaagcaataatatctctgttttcatttcagaacattgtgctgtctgtcagcatatgtatatcagctacaaaatatattcaactttgacttcttttgacaaaggactttaggaaaaagaggaacaaagacattatttgagaattaaattatatatttttaatatgactgtgaccttgactgataataaagatgtaataagaattgcaagctaaatgtttccctttgcaactcatgctttgtgttttgttttgatgacctactcgctcgtaatgttttgtaaggcacttcagagagaagacagatgcatcatcctggcctccatcaaataacactawccaaggtggcacctcttctgcaatgtttaaccctgctagtaatgaacgatgacttagttcggatatwwcagaactttttgtttataccatcaggtatgcatgaatttataatctgaaagaggacttaaaataataattaaaasttaccagcttaaaaaaaaaaaaaaaaaactcga

SEQ ID NO: 1816 - DNA, 1744 bp, Homo sapiens
ggcacgaggtcagagaggctaccagagtgtgattcattctgcctctgtcctccccatccctgctccttgacctctcccagacaccttggtgttggtcttgtgccagggtattcccagggctgaatgatggcctgtgttggtttttttgtttgtttggttggtttgtatgtttgttttggcacagtgtgaaggggtcgcagactttcacttattatttgctgagttgtccatgactgatgtccatttctactgggtgatccacccccaaccctttctaaaaggctaactgatcttttcttgcttctgtacgctctctttccctctcctccctctcttttcttaatttcagggactccttccacagatctagtttcaggaaatgtgaaacccagttgtcacagggcagctaagaaaagccatcttcattcgtggagactgtggccctgcaaccctggagaaggacttgctggtacttaaaaaatgggacatttgccacccaggactgactgtacactccctgatcagccagcactctggaagctttgggatcccaggaaccatggaattattcccaaatggactctgaccagatttttgccatactggggggtggcgggatggaggatgggtactcaggcatgactgcgtatttattaaagtgtgtttttccacaatgtaccaaacaaggcataagcagcttctcctgctgactggccaatcactgcccatctgagagatgatttcctctggcccatatttgaatttattggagtaactcaaattgcctgaggaaaaatggaaaaattatccaccagtcgattcaaactgaatttcactctttataggaaggcagggcaaacttgtaggagtacgaaacattttcaataaatctacaaagggaagccttactacaattccaaaaatcatcatggttggaaatttgggaggagattatttgtgaacttgttacccttttggtaatggtggactaattgctgtatagttatttttgttttattattactgttacattaatttaacatgcatttatagaagaatacattcaaagcactgatgtaggagatacacggtacttggagcagtcagccaaaaatcacagatactgctttcacttaaatggaaacaattctccgataatgctttgctttttttcttatgtcactcttgtgtactatctatttttctcctctctgggaccaagtttctttttataaagcaataatatctctgttttcatttcagaacattgtgctgtctgtcagcatatgtatatcagctacaaaatatattcaactttgacttcttttgacaaaggactttaggaaaaagaggaacaaagacattatttgagaattaaattatatatttttaatatgactgtgaccttgactgataataaagatgtaataagaattgcaagctaaatgtttccctttgcaactcatgctttgtgttttgttttgatgacctactcgctcgtaatgttttgtaaggcacttcagagagaagacagatgcatcatcctggcctccatcaaataacactawccaaggtggcacctcttctgcaatgtttaaccctgctagtaatgaacgatgacttagttcggatatwwcagaactttttgtttataccatcaggtatgcatgaatttataatctgaaagaggacttaaaataataattaaaasttaccagcttaaaaaaaaaaaaaaaaaactcga

SEQ ID NO: 1817 - DNA, 1982 bp, Homo sapiens
ggcacgagccgaggagcgcttccgccctcagtggagcctgagagacactctcgtaagtacatgcaaactaaagaaagtgaaattcttcctgaaatggcatctcagttcccagaagcgatactgctcgccagctgtgtctcagtgtggaaaacagctgctgtgctgaaatggaatcgagaaatgagatagaattatttcctcagctatctttggatgactttggagagaagactcctctctcctcgtctgcggcgtggacttgatcatggactggtgcctttgcattcagaaggagagctgtcagcgtagaccgaattcaagaccaaggcgtgctacctgagctgacagctttttgaaagccgagctgtttctgaaccatgtacatacatgttctgaaactttctcatcattttatgagtactgttcattgagagatgacaatgaagattagatgaaattggaaataaaccaacattgtttacattccaggagacttgtagctcagccacacacgcagtaatgacctgtgcccgttcgcctctggcactgcccacccctctttttttttttcttctaattctgtactcacaaaagagaatctcattttcttctttcttccattcccttaaattctgagtactgtacatatatttctgggttcccacgatgatgtgaaaaactaccagactgttttttgtcttctcacaaagacaagaaaaatcagggcattttgtgagtgccttaagatcaaactaacaagatctgaccctctcccctcacagtgagccactgccccacttcagagggtaagagccaaaagcctcattgtgaaaggcactggacttggaccagggacaccatcagggccttggttttctcacgcataaaatggagagtggattaatcgccaaagattcttctgatctgacattttgaaattatgagagaaactagatgactgtaaacttggtcacaggcctggttctggcagttctttgcggacttttttctagcattatgccaaataaacatgcagtctcagtgtgctctcgcatgtatgaatatctagtcctttctgtggttctcagccaagacataaaaactaggactcagagcacatacaaaaccagttatgtttcggaaagagggaaaagagtccccgagcccggatcttgtgctgcttttctcactgacgtgttgccttttttctttacaaaatctgctttgatacttaggacctctctggactaatttctcttcctagacagctcagcacagctattgatatgttagaggcagtatccttaatattcattctaaatgagttaacgacttaacttgaaattgggcctaaggagtgagaactacaaaaatacaaaatgcttgtccaggactcagccatgtacaccttgagcagcgccggcaggaggcacggaaggaactgtgctccgttctcctcactgtcatggtgccaccagtgtctgatgaagggcagagtgacccagactgcaggcagtaactgacttcacacagtccctggcatttagtcatctgtgattgttttatcactctggactgtgcagagccacctgccaccgagatctgcattccgactgcctatgaacgggtgtgggggccgggggctggcttgctgaagtcttcaacttgcactcggagctcctttgatacctcagagctggctgtcaggtggcagctcacacccagactcactggccacacctcagcagggggggagtcgagtgtcagtctctttctgtgaaggctttttttttcctttggcctgggaatttttcccatttttatgaaggggttttaaattgtttcattttgtgtgctgtgcttcaaagccttaactgtcaaatcttgcattatcttgtttgtacagaaatatactggcctagcagaggcaaaaaaaaaaaaaaaaaaaaaaaaaaaaaaaaaaaaaaaaaaaaaaaaaaaaa

SEQ ID NO: 1818 - DNA, 2689 bp, Homo sapiens
  misc_feature (2316)..(2316): n equals a,t,g, or c
aaaatgtcactagttccgaagctgagaaatagttacatatgtgtcatttctcactgagtgctctcaagagttttgtctttaattctctgaaatttggatttgatattctagacatggatttcattgcatttattctatttgggtttcattcatcttcttgaatgtgtaggtttacatcttttgccaaagttgggtagttttaaggccttctttcttcaaatatatttttagctctgctccttttctgtttctgggactctgatatgaatgttggatcttttgttattatccctatggcccatgggcttccattctttttttcccccaattggattgtatgtctggtctagaatggataatttctattgatgaatgttcaagtttattatttcctctgccatctccattctgttattgagccaatccagtaatttttaaaaatttacttgttgaatttttcatctccatttttttctatttggttctttgttatatcttctatttctttacttagtgccccctcctttaatttgatttaagagtgtttgcaattgcttggtgcattttaatgataggtctcttaaactcattgtcagtgaattattaatggcaaaaactgaaattacttttgcaccaaccaaatacagtatcagtgtaatcttggtgttggtatctgttctctttttctattaggtttagatttgcctggttttggtataatgaatatttttaattgtatccttgatattttgagtattaggttatgaggcccaggtttctattcattttgtgtttaactttttaagaaactgccacactgtttcccaaaagtaattgtaccattttaatttccaccagcagtatgagcttcacctgcttcttatcttcactaacacttgctatacttagctttttaagtgctagccattatattaggcacatagtgttaacttattgtgttttaatttgcatttcacttgtgactaatcatatgtttatttgacatctgtatatcttctttgggttgttgaattttaaggtctttttatattcaagtctttgtcagatatatataagattagaaaatattttctcccagtctgtggctaatcttttccttctcttccccaaagtccggttaagagcaaaagcttttcaattttgatgactaattaatttatttgttaaggacttgcagtttcagtaacatatataagaaatttttgcctactccaaggttctgaaagttttatagttttaagcatatgatacatttttagttaactttttttttttttaagacagaatctcactctgtcacccaggctggagtgcagtggcgcgacctctgctcactgcaacctctgccttccaggttcaagagattctcctgcctcggcctcccaagtagcggggactacaagcttgcaccaccatgtccagctaatttttctttttttgtattttcagtagagatgaagtttcaccatgttggccaggctggtcacaaaccagccagcctcagctgatctgccagcctcagccccccaaaatgctggaattacaggtgtgtaccaccattcccagcatttagttaacgttttttgtaggtgctttgagctataaatcaatgtaaatttttaaacatatatataacaagttcttctagcattgtttgttaaaaagattacctcttctttaataaatttcctttgcaccactgtcacaaatcagttgtccatgtatgtgtgtttctcaactctctattttattccatgaataccacacagtcttgattactgtagctttataataagtcttaaattcaggtaacatatgttctccaactttttctttttttttttgagtcggagtctccctctgtcatccagactagagtgcaatggcgtgatctcggctcacttcaacctccgactcccaggttcaagcaattctccctgcctcagcttcccaagtagctggaatttcaggtgcctgccagcagacctggctatttttgtattttttagtagagatgggttttgccatgttggctggtcttgaactcctgacctcaggtgatctgtccaccgcagcctaccaaagtgctgggattacaggcatgagccatcgcgcccagcctattttccaactttcagaattatttttaaaagttggtttcactaatctaggtcctttgcatgtccatatgtattttagaattgagttcccaatttgtacaaaacaaaaagcctcctgaatattcaaaatgggatttcactgaaggcctaggtcaggttggaaagaattgacatnattaaatggtattgagtcttgtagtctctgaacatagtatatctctatttaggtcttttttaaagttctcccagaagtgtttttaatttttatactatacatcttgcacttcttttgccagatgcatcactatgtatttcatattgtttatggtgttataaatggcatttaaggttttaaggttcagattgttcatggctagttcatgcaaaatcatctgctttatatatattgatctttattttgccagtctcactaagctcatttagttctaatagtgttgtagataccttcagattttttttatatagacaatcatataatctgttaataaagatgattttacttcctttccaaaaaaaaaaaaaaaaaa

SEQ ID NO: 1819 - DNA, 1573 bp, Homo sapiens
tcacggctgcggaagacgaggttcttcgggacacccgtggatggacacggcaaggaaacaccaggccaaccacagctggggataaaatagcacaaccacaccctgccgtccagcgcctcccagcctgtgccccttcctagtaccaccagcaaccatcaatcccgtctcctcctgcctcctctcctgcaatccaccccgccamgamtatcgccatggcagccytgatcgcagagaacttccgcttcctgtcacttttcttcaagagcaaggatgtgatgattttcaacggcctggtggcactgggcacggtgggcagccaggagctgttctctgtggtggccttccactgcccckgytcgccggcccggaaytacctgtamgggctggcggccatcggcgtgcccgccctggtgctcttcatcattggcatcatcctcaacaaccacacctggaacctcgtggccgagtgccagcaccggaggaccaagaactgytcsgccggccccaaccttcctccttctaagctccatcctgggacgtgcggctgtggcccctgtcacctggtctgtcatctccctgctgcgtggtgaggcttatgtctgtgctctcagtgagttcgtggacccttcctcactcacggccagggaagagcacttcccatcagcccacgccactgaaatcctggccaggttcccctgcaaggagaaccctgacaacctgtcagacttccgggaggaggtcagccgcagtcaggtatgagtcccagctctttggatggctgctcatcggcgtggtggccatcctggtgttcctgaccaagtgcctcaagcattactgctcaccactcagctaccgccaggaggcctactgggcgcagtaccgcgccaatgaggaccagctgttccagcgcacggccgaggtgcactctcgggtgctcgctgccaacaatgtgcgccgcttctttggctttgtggcgctcaacaaggatgatgaggaactgattgccaacttcccagtggaaggcacgcagccacggccacagtggaatgccatcaccggcgtctacttgtaccgtgagaaccagggcctcccactctacagccgcctgcacaagtgggcccagggtctggcaggcaacggcgcggcccctgacaacgtggagatggccctgctcccctcctaaggaggtgcttcccatgctctttgtaaatggcactrcttggtcccaaactgaaccccactgcttgctcacatccatatcagaaggggatttttaaaaaactgttatcttcttggccaggggaaaggaccacaaggcaatctggggtgtggacagacccagtagacaatggaagccccagccagcagggccaggtgacagtgaagctcaccagtgggctcctttatggtactctatgcagttaacatgtatctagctgcatagggacacccagcgcagcagtgcaccactgggaagtggcctccagtgcasctctggccttattttatatatttaaatttttgataaagtttttcttactaaaaggacaaaaaaaaaaaaaaaaaaactcga

SEQ ID NO: 1820 - DNA, 1986 bp, Homo sapiens
cggcacgagcggagatacaactcgtcaacgaatcaaattcagtgatgacagagtatgcaagagtcaccttctcaactgttgtcctcatgatgtcctttctggaactagaatggatcttggagaatgtctgaaagtccatgacctggctttaagagcggattatgaaattgcatccaaagaacaagattttttctttgaacttgatgccatggatcatctgcagtcattcattgcagattgtgatcgtagaacagaagtggccaagaaaagattagcagaaactcaagaagagattagtgctgaagtagcagcaaaggcagaacgtgttcatgagttaaatgaagaaattggtaaattgttagccaaggtggaacaactaggagctgaagggaatgtggaggaatcccagaaagtaatggatgaagtagagaaagcacgggcaaagaaaagagaagcagaggaagtttatcggaattctatgccagcttccagttttcagcagcagaaacttcgagtctgtgaagtctgctctgcctatttaggacttcatgataatgacagacgactggctgatcattttgggggtaaactgcacctgggatttattgaaataagagagaagcttgaagaattaaagagagtcgtagctgagaagcaggagaaaagaaaccaggaacggctgaaacgaagagaagagagagagagagaagaaagggagaagctgaggaggtcccgatcacacagcaagaatccaaaaagatccaggtccagagagcatcgcagacatcgatctcgctccatgtcacgtgaacgcaagaggagaactcgatccaaatctcgggagaaacgccatcgccacaggtcccgctccagcagccgtagccgcagccgtagccaccagagaagtcggcacagttctagagataggagcagagaacgatccaagaggagatcctcaaaagaaagattcagagaccaagacttagcatcatgtgacagagacaggagttcaagagacagatcacctcgtgacagagatcggaaagataagaagcggtcctatgagagtgctaatggcagatcagaagacaggaggagctctgaagagcgcgaagcaggggagatctaactagctgtgtacatttcttcagtccttaagcttcctacggagttacgtactattgtttagttcacagctgttcagggtgacagtgagcagatccagacaccagatctagctaggctagatgtacagtatctaacttgatctgaactgaacctgttttccttgatgatgcctaaaactacatccatagtttctggtgaacctgtaatacagttctgaaagtacagttttatataataagatgctgatctctttattctttcaagtaagagtgctagtgaacaaattgtgttacttgccttgggattttttgaacgtttgtaaaatgctgtcttcctagtccaaacagctgcagctttgggcatttttctttttaattattcttcctctgactttgtatcccttaatacctacactctccaattgtaagagaaagggggcagggaagcaatatagcttccattctaaggctgtattcgtgttatgaattactagctgattacagttcagagcattgatcctggaatgtgtgctggagaaatttaaaatactggggttttttgtttatggtgcctatttagagttggaagttgaacagctgttgcattacatacttttgcttttttattgaaattttgaaatcaaacgtcttgaattttctgttctgttgaattgctatgttcaggatgttctagggggtgggggcagggactcttttcgtaataagcacttgttttattttgtgtgtgtggagtataaaggctacacccttattgtaaaaaaataataataataaaatgaaagaaacaatcaccaccaccaaaaaaaaaaaaaaaaaaaaaaaaaaaaaaaaaaaaaaa

SEQ ID NO: 1821 - DNA, 1993 bp, Homo sapiens
ggcacgagcttctttagaagcattcctgcgtaaatactgctgtaatactgtcatgcaaagtgtatcctttcttgtcgtatcctttttggggcagtgtttttttgtttttttcctagaaatgtttgtccttcccccacctgttgatccaggttaaggaatacttttttacactttattcaaatgaaatatttctaaaatatttgtatagactgaacagatcttttatgtgtttttagatttgttgttgaattttctgtgctgtcctttatataattttttgagggaaagttagtgaatcaggtcaacttacttagagaatgtgttcatttactttaacccagaatacagtcttgtttcttctatttgtatgtttcctaaacctaattcaataacatatgctttctgttgtgtaatatatctggtttaggtatttataatgtgtttaaaatttgggcaaaggaaatgtttttcttttaaaaagtacttacattgaaaattaagatgtctggattactatgtaaattctagagagtagcagacctctcatctgaagtcttagtgaatctcttttgacatagatagcaatagaagtatctttcttctttcccctttctttttctaaacaagagaagaaaagcgtaatagaggggagaacacataatgcccactaagggtagtgcattaaggaaaaacagtcttggcaggtatataggaatagtggtttccagactggttgatgaccgtaatcaccaagaacagtggttctcagtcttggctgcacattgcagtgatctggaacttaaatactaattttaaaagggtgcagtggctcatacctgtaatcccagcactttgcaagtccgagatgggagaatcacttgagcccaggagtttgagaccagccggggcaatgtagggagaccctgtccctacaaaaaatacaaaaattagccagtgtggtggcttgcacctctggtctcagctacttgggatgctaggcaggagattacttgagccccaaagttgaggttgcagtgaaccatgatcacaccactgcattctatcctgggtgacagatgagaccctctccctcctaaaaaaatccttaagaaatatattgatgcttggttcctttggtcagaattttgatttaaggtgttgggagtgtagcacagatgttggaataaacctctcaaactgattttaatatacaaacaaggtcgagaaccaccaaggaagagtttttatgcataaagattcctgtactctaccctagaactaatacatctgaatctctgggaatggagtataacaatcagatttgaaaaggtttctttagtaattttaaggactgaccagtttagacactgctttgttagagtaaaatgattaggtacctagtatcaacctagccatccaaccttatattaataactaggaaaataaagggttggagcctctgtgtttctttgttgaaaaatctgctactattattagatctgtgaaaacaattgaaaattcggttattatcaccttaaaagtacaaaacctatagattttgaaaatgtaattatttttctgtaggcatagttaaaaagattttgtaaatgttataaatcagtttctttataagcggtttatttagataaattttgttatactgacatgattcactaattttctaaatataaatggttcagctcttagttatttttaaactaatgacctgtgttatacttcctatttttaatgggcttttatgatgttttaggtttttttgaatcccgtgtccttcaagtgctttctaactttgagaggaagaaattgaccacctggactatggaactgtgcgtaacagctttgaaagtgtatttaaaaattaaatctatatgcctttaaatcagtgaattggaaacatattacatgtattttaatgattttcctcaaatataataaattgtttcctttccaataaaaaaaaaaaaaaaaaaaa

SEQ ID NO: 1822 - DNA, 1469 bp, Homo sapiens
  misc_feature (1419)..(1419): n equals a,t,g, or c
ggcacgagcttcggagaagtgaaatataacattactcagtggacggagaagtctgttttgttacagagacatgcctctcagaaggtcaggaggttttgagtacctatccttgccacccatacaggaaatccaaagtttggtgtctctctctctctctgtctctttctttctctttctccccccaaacccctctcactccctccctccctctctccttcccctatttgcaatcatattctccctctgcttcttttctcttctgccctccttgtgggcagtcatgaaaatcaattcagactgtgttcattagcagatttattattctattgagaaagcactggaatgttttgtgagattatttttatatgaaggaatagcctgaactcaaacagatggtaagaatagtacaaacaccttagcacatcactgcacacacagtattctgaaaggagatttgacacttaattcccattttcttaaaataacagttttgttgacttaaaaatatgagatacataggatgtgaaaaaaaatgtttgcagtactcagcaaaaaatagggtacataaagcagggtggctgtccatccactgattctggggtgagaagcgatttctacctcgcaagagtgactagaaagtttctaggagcacctccaggcttgcaaagaaagtgaggcctcttggtatcctatcctcagtgtgtatatgacagccagtataatcaataccctaggttatgcgtctatatgatactcatctgtgaatattattggttttgtaatctttgttatataagaaggatgtttaggctgtatatactggggtagattattgcctgccccttatacataggaatatgctgcataattgcgcataacttccatctcccttactggcttgtaggcagaggaaactgtatatgttactgccttgtacttttctcatacaccaaaaacacaccaaaaaaatcaataaaataagcaatcttctattctcattccttttcccacagcagcatattttagaggcacatacaaaacctacattctctagttgggagtggatttttaaagttttccttttatcttttattttttttttgtatgatgcactgagatgtgtactttctaacaggggattggtacctaagaaatgtggtagcattattcagaaaactattatactttcaaatgacacatagtaaggagaatggaataatacatgttgcatatttgttaccagttgtaatttgtctgtattatgaaagatgtaatggtttgtcagctgtcactgttgttttcttgtaacatgatatggaataaagtatagcagaatctccagaaaaaaaaaaaaaaaaaaaaaaaaaaaaaaaaaaaaaaaaaaaaaaaaaaaaaaaaaaaaaaaaaaaaaaaaaaamnaaaaaaaaaaaaacaaaaaaaaaaaaaaaaaaaaaaaaaaaaaaaaaaaa

SEQ ID NO: 1823 - DNA, 1254 bp, Homo sapiens
  misc_feature (441)..(441): n equals a,t,g, or c
gaattcggcacgaggttcctgagctgtgcaaccaatcagagtccagtggagaagatttcttcctgaagtccaggctccaagaacaagatgtctggagaagatccacttctttctatacccacatgtgcaacccctgggtctccctgttgggggctgttgggtcccttctcatcatgtttgtgatacagtgggtgtataccctggttaacatgggtgttgctgccatcgtgtatttctacattggccgggccagtccagggcttcaccttggatcagcctccaacttcagctttttccggtggatgargtctctcttgctyccctcctgcaggagcttgcagtccccccaggagcagatcatcttggcgccgtccctggctaaggttgacatggagatgactcagctcamccaggagaatgcagacttcgccactcgggatngctaccamcactyctccctcgtgaaccgggagcagctgatgcctcactactagatgcagtgctgggaccttcctcttttggagctgtcccatgtacagtggacccaagcycaggaccttcgtggagctgcttctccaacctgagaaactcaagacccatcckcccgytgtcactttggacaatggamatctacattttcttttcccttttttttttttttgagacagagtctcgccttgtcacccaggctggagtccagtggcacaatcttggctcactgcaacctctgcttcccgagttcaagcaattctcctgcctcagcctcctgagtagctgggattataggcatgcaccaccacacccagctattttttgtatttttactggagacagggtttcaccatgttggccaggctggtctcgaactcctgacctcgtgatccacccgtctcagcctcccaaagtactgggattacaggcgtgagccaccatgcctggccagaaatctatgttttcttagaacatgtggaagaaggaaaaagacaaaaaaggaagtctggattctgaggaccacgtctcacccagggtgacatcaggaatggtgctagcctctgcaacacgacacccagtctgaagagctctatacaggtactaagactagcaggggacaccaagactctgcacaaccagattgcttgtgcagagggccacaataagtgtatgttttatattttattgtattatttattcaaaaataaataatacactcacatgtttccacacccaaaaaaaaaaaaaaaaaaaaaaactcga

SEQ ID NO: 1824 - DNA, 1827 bp, Homo sapiens
ggcacgagggaaactggtattaggaaaaaaaggatgataatcaataagcaaatgattaaagtagaactattaaccttacataaggttattgtaaatatgtaaagaaaagagaattttgaagtttaaatttagtagtagcaatagacctgcaatgtaaagtctaataattattgtagaaaaataattctctgaggtttttctttctccagatataatttttttatcatcttatatcctgttggagttgctggtgaacttcttacaatatacgctgccttgccgtatgtgcaagaaaacaggaatgttttcaataagacttcctaacaaatacaatgtctcttttgactactattattttctcttataaccatggcatcatatatacctttgtttccacaactctaattttcaataagttacgtcaaaggaagaaaggtgcttccatggagagtggattgtagaaaaggatgattaaatgatctctgcaaacaaggtgctttttccagaataaccaagattacctgagtccaagttttaataacaagaataaacaactttgtgaaatatcatggattgtatggtttcttaaaatataacttgagacacgtggtatttgccagtatttgtgttcctcttgtgccagatctattttttacaagaactgtgcaaatatcagtaacttttgggtaggtattgattattaggaaaataattaggtgtattatctgggggaaaaaaaaacttttgctaagttttttttgaaacatgctcaaagctttttaaatcaatatttagaaattagtttaacgatttactattatacctgctagtgatatttatgtgatatttataaatgaaaataaatgcaaaattataacaacttgttaataatgtattggtatttttgaacccacaatctattttttcaggaaataaggcagcattatgactaataacagtgtttggaagcgtggatataatttgctaaagtaagacttttgatgtagataaagtagcagcataaaaacacacaaatattcaagtagatgtcacagttggaaaatattctttggaaatatttctaggcagctgaaattacttatactgctaaggaaatctgctttttatttaaattagccacttaaggacaaggttttcaactgtgaaggttttaaggggttaggaagagcataagtatttgccccactattaaaaaaaaaaacatgacatctgactataatgttgtattcaggctgggagtggtagctcatgcctgtaatcccagcactttggaagactgaggcaggaggatcgtttgagcccagaagttcaaggccagtctgggcaacatagcaagaccccatccctaaaaaaattacaaacaaaaaaaattaaccaggcatggtgacacatgcctgtagttccagctgcttgggaggctgaggtgggaggatcacttgagcccaggaattcaaggttacaatgagctatgatggtaccactgtacttaagcctgggtgacagagcaagaccctgtctctgaaaaatagtgatgatgatgatgatgatgataacgatgatgaggaaggtgatcatgctgtactcagaactttggttgagaaagtcttctctatactgtagaattatcttgtaacaattgttatgataatccctttgtggtacttaggtaactaaacattttggggtatgatctttggacagactcctttcattctgaattccattgaatagcaaaaggtcttgtaataaagttcctgtccttgtgtttaataaaaaaaatacaccagaaaaaaaaaaaaaaaaaaa

SEQ ID NO: 1825 - DNA, 1514 bp, Homo sapiens
aattcggcacgagcactgctctgcctcagtggacagtcgtttcttttttgaggtgtgaccttttgttttcatgccttccccttgaagtcatcctgtgttttgtaatcagctgtcaggccaaatgtctgacccgaaagagaatgtatttacactcatgctgcgttgttcagcagcccctctgtgttctgtgtgatttgttttatttttccttttttttacatatatatgcagggaagtaatggtactggtagtgtatgttttctatgtggttcaaatatgaatttcgaacacaccaagccgctaatgagatagcagcttttttctgggacccagagtcacaaccaaattgatttaagaccggacccaagacacctttaacaataggactgaaaggaaaaaggatagggaaaaagcttattaaagaaatgtgtcaacaccaaatgtagaggggaagaaccacaaccaggcataataccaaaccggttccagggggaaacaaggctttggtattccgctggctccagcgctttttctgaaacccgaggctggccagggtgctgtcaccgtgtggtctttgattgcagccattcaatgcccacatgcttttccttcttgtttcagaacagcacatggtcacaacaagatattttctttccctccaaagccttttgtctccttgtgcctctttttatccttaggaaaagatccaggtgcttgtgaaaagaatcatgaatgcaacaagggaggctggtcctgttgctgtcgccgattaagttttaaacttttatttattatttatgtctgccgtattttaaataaacattctcgttccttccagttccagtcatagtgtgtctgtggcattccagtccaaccatgtgacttatttattctaatttgagggctgcactgtacaccatggtgtcctgtgacaccgtgttccagacatttatggaaggaaaacatcccatataaatgaaactgtcatgctgtgtcctccccggcagcagaagatgtgtccttccattgagtgagggtaaccttatgtccaccaaggatactttgagaaagcccctaaggaacaagcctcagtcccacggtttcagactatttattctctgaacacaagagtattggttaattatgttctcagctctccctgctgttgtatgtgtgcattcactgcaagtaacttatatctttttatttgaatgtattttaaagcagtagatagaataacaaaggaatatgaaaaccatggactgaatggaccattttatgtattcagagagagaagccactcatcattgccagaaataccatgtaaaaattggcagttcagaggttgcaatacttagtatagtaaataaataaacggtcaacattgtgcaaccactaccaaaaagtgtgttgtaatgcatcaaaaatcaacacaattttattcactaatgagtatcaataaaataagttcaaatgatggaaaccacaaaaaaaaaaaaaaaaactcgaggggg

SEQ ID NO: 1826 - DNA, 1535 bp, Homo sapiens
  misc_feature (574)..(574): n equals a,t,g, or c
ggcacaggcaaaattgccttcaaaggctaagtctcttgtattctgcccttactgagagtctgtactctcctaaggttaattggcttatcatattctgcttttgtgctccctagtttaccatgatgcttggggtttttgcccctacgcttttcactttgtcttcctgtaatttattacaaccaacccttgtgtttttttttttttaacagttttggatctgcattaattttttagtccccagaggaacactatgttcccaaacattatgttctgcactctcatgctcatatcactttgtgtagtgccagacacctcctgggatctcaagaaatgttgtttctttttaaaagatgggtgattactctaggaggctcataaaagatctttctcagttgagttactttcactgtttatgtatcccaagtggcttaggtcaaaatattggttaatagaaagactccaagtctttggagaagctttactagtgtctcctcatctctgtaaaagcaaagatgagtattgaatggtcttacaggagtgttggagagaaatgatgaaaagcattagaaatganaaggcctttgttgaaaatatgaaatgccagagtgaagacagtatcattattcccaagcaggcctcagtgtaagcggagctctctccaccaattgaagctgttcatcactacaaagaatggctgtcctgcaggatcctttctgctgctggctcctactgcagagaatagaaacttctttctaaatactgtatccaaaatgtttcctcttctctcaacttctcagctctatccaggacacttcactgctttcctccaaggcaaacttgaaccttcctctaaattccttccctgaaggctgttttgaggcagagggataggaccatggacagaggcttagcctaccaatcactcacacagcaggaaagtcaattctcttcctaccaggaatccctgggagagggtgtttacatgaatagactcttctttaactataggtcacttttcccttstctaamttcctttggagtgatgctgtgtcttctagaaacactgactccttccagcaactctctgctccttagacatataagaaatactcattcttgcaaatgcagttcttaaaatatttcaaaacatcttcattataaaatatttcaggcaaacagaaaactatgaaaaatagtttaacaaacatctatgtgtaaaacagctaccttagctgggcgcagtgctcacgcctgtaatcccagcactttgggaggccgaggagggtggatcacctgaggttgggagttcgagaccagcctgaccaacatggagaaaccccatctctactaaaaatacaaaattggccgggcatgatggtgcatgcctgtagtcccagctactcctgaggctgaggcaggagaattgctggaacccgggaggcggaggttgcggtgagccgagatcgcaccattgtactccagcctgggcaacaagagcaaaactccgtctcaaaaaaaaaaaaaaaaaactcgag

SEQ ID NO: 1827 - DNA, 3051 bp, Homo sapiens
ggcacgagctgtctcagcctcccaagtatctgggattacaggcatgcaccaccatgcctggctaattttgtatttttagtagagacggggtttcttcatgttggtcaggctggtatcaaactcccaacctcaggtgatccgcctgccttggcctccaaagtgttgggattataggcgtgagcactgcgcccgctatccacatccttctagagtcagaatggtagggtccgttgacttcagcttttgattttgcaggatggccctgtgtcctcctctgccccattccctggttcattaaccagtttgaagtgtatgtagattgttgccccgtctttcccaggtcacatgtgtgagatgcctgggtgctgcttcagaaatcaagatgatctcctttaattgcatgaaactacaccatgctgcgttccccaggcagacagttctgctttgacacaccaaagaatcccgtaggctagcagagccgccagcacaaaccaagggcgctgggtgtcgagactcagaggggtcagctgtgtccctcggcatcagcgtctaccaaggtgctgctaggtacagagccagccagtgttgggcagcaggctcacagcctcaatagggagaaaagacaaaggcctcaaaatgacaggcagcctgacagaggaaggagtctgacacctcagcttgatgcgtctttggaattcctagctcatctcagaattatatcttagagtgataatatgggtggtagccagtggccaaacagcaagaactaagagtggcccttgcaaaaaaaggttgggaaagctgggcccatattgcctgtaaacccttgagcctgatgctcatacagctgtcccttgttttagccaggtcttgacagaagggttaccagcactgtcactgctctacagaatgctctccccgtgcctctctgttgatttataacagttgggtaaccagatagcaatatagtggcaattgagtagccatatagtaatacaggggcagttggttaaacatatagcaatatcacataatgatatgtttaatttaacctcagttttttaaaccagaatgcttctaccataaaagaattgtgatttcagttrtacttccatcaaggaatatgtgggaagatatacatattgtcaaaatggttgggatgggatagttacaaaggacacttttgtatgttgtatgggatcacttgcctgatagtataaggaacattgtatgaaaagatgaaaagatacttcatttttagaaactgatcagagatgtcactggtctttaagtgatgtcttgaaaatccagtatgtatttgcccaaaagttttagcctacatctagctagcttacacttagcagccaaaccatcattgtgtaggttctgttttggaggaagctcatgggggatctgtgtatttcttaggtttctccctgttctccaatgttttatccatttcgtagcttttttactgtctccagaaagtagtgtgggacctgcacttaggggaataccagaatcatagcgtggttctgccttcttgatgagtgattgtgaaaamcacctgcataagggtgctaattggttgtgyattttttcatttatttgaaatcaaactgagamcacctcttttcggtttacagcataacatggcttgaagtaaaaggcagtatccaagtccttcacctggtcttgccctgtctactttctgatcattctgatggtctgatgtggctgttgatgtggaactgcagaagagttcagagaagagtatgcaacaaagccataggaaaacacacaggagcttttccctccccttcaggtccccgccctctttccaagctggacaattttttattaagttgtttattccctgccttaaaactgaaacaggaaattttctggtagaaggagggtcatttagtcacgaacactgaagtgggtcaaaattctattctgggtcaaatccttgaattcaaacagatgtccataatcagtactgatggaatagagcaagtttttctatgtaagacaaataaatcaaacatcatgtgcatctcctcataagggtctgcaagggtctgatggtttaaagttcctaacagatctggttgcagcatctgccggagcttgcaccccatcatcggacggtcatcttcctgctgcagaagttaggtaacataagacttagatttcttcctgttctagcaatctgcaagaccaccaggcttaactttttagctgccagaagacaaacccccttttctgtttcggcaatttgtcctggcacgtgttttggacttcctccgatttacacgaaaagctctgatattcattggagtactttattttttttcctcagttttgtttcttttctcatgtaaaaacaaacaaaaaggtcaacaaaaaaaaattgaggtttttcttgtttctatctagttcatgctttctttgcggtgtttgaacagtagtctgttaacttagtaggtggtacctggaaaggtattttaagtatagtgactgtttaataaatacttaattggatgatggaggaggagaaattgttttcttcccaggattctctttgggggtcattttgtgtgacagatatattttagacatttggagaaacagtttcagatcctgccaggatatttttgtaaaaaaggaaaatggaagattccaataaactagaaacagtacgtatctaagatgctgacacagaagctaatgtgacttttcagcttatcaagaggatggccaataaaacttaaaggtgtggttagatgttttctcacttttgtgacattaatttatcactgagtctcattcaaccaagtaatctaaaatactgtgcaaattctagcagtatgtcttcgataacttggatgttaggatagccaatatgtacaaaaaattaaatcaagtattttgtcctatgtataacacaaattaattttacacagagaaagatgtttctaggcaagtgaaattctggtaattcatactatttctttgtatgaacaaataaaatatattttgccaacg

SEQ ID NO: 1828 - DNA, 1290 bp, Homo sapiens
gaaaaacgagagatgaaatttagttaagtctatgtgagcaagtgagagaaggttaggtaaggggagaggatggaatgcttgcctccaatgaactttggagcttgtatgtgagtcagattgctcccctattgctattatctattactcttgagagctggctgtcctttgaaagaaagaagtaatgttctttgaaagaaagaaaaatctcttgctgtgtcaaacctcaaaatgttgctattggggttagaaggcctcctctttatgctttttaatgctctttcaaacgtgttcttttagaccagttttctaataagctttgtaaaatgtactatccaaattagaagcggatttggaaatgcaaactaacgtgcacttagatatccaagtgggtgagcttagccactcttacccatgctctttccctggaatccctggagacctgtccaagatgatttccatataccagcatagaaaatcagaatcaagagcaaactctgagactggcacaatccaagaagatttcctggctctggcttttagtaatttgggactccaactgccactgtactggactgtaatttataaatccagtagctacgcagggtggaggctgggctgaggattaccataatgaaatgtactaaatcttcatttaggtatgcaattgtgaagtgaaggcatctgctttctttacagtatcagagtccaagaacaggatgtcaccatagataaaagcctcatacaaaggcagaactacactccaaatttaatgtgtttaaattggtggggcaccagcagaaaatacttctagctcagctttactcttcttccacactaggctgggcccagcaatacaggagaggatgaagggaggagctccaggaggcgagggaagagccctagcagggcggccatcacaaccactcactgagagttgcccttcttaaaaatgtattttattttagccagtgggtcccttcctttctcctttcctctctactgctcaagaacagatttgaggccaggtgcggtgcctcacatctgtaatcccaacactttgggaggctgagatgggtggattgcttgagcccaggagttcaagaccagcctgggcaacacagcgagaccccatctcttaaaaaataacagacttgaggaacccctctcccttccataattcccctcatccaccgcccactccaggcactcactcaaacttgctcttcaactctgtatacaagcagaagcaataaaccaatctgattttcttttcaaaaaaaaaaaaaaaaa

SEQ ID NO: 1829 - DNA, 1503 bp, Homo sapiens
  misc_feature (1061)..(1061): n equals a,t,g, or c
gtaattcggcacgagttacaatcccaggatggtgcaaattctgaagagaggttgcaagatacatgagcaacttaagcagagaaacagttttactaatatctagatgtgctatgattgtctgaaatggcacagaaagaaagcctagagaagtaaacaaagcaaacaaaataaaaattacaatcaatgaaaaggatcttaggttttaattctccaagttgtgtactggagagtagccgcactgaggggatagaatgttctcctaatttgattatataatcactcttgtccattactactacttttccttccttctcacttgaaaaatctgacactgctctaatttcatgctttccctgaataggcaccaactgcccataaatttttagtcaattacacagaaacctttgactcttgggggctgtatttgtgatggtatttgcttaagagttttatttctaaggtagttatttatctaagtcttgattcttataatattataatcattaattccctttkttttaggstcaacatctctacccacattatcatgtttcttgatcacaactaggttacaagggttggagatacacaaagatgaatgccatactatttatgcttataaaaaagcaatttatcttttgttctactacagaaaatccttcctcaaaaacaaattcatgaagtcagccttgctcaaacaccttcagtggctctttatttctggacataaatctaaattcctttgtcaacattttgagatcttcaataacctggtttcagtcttccaatttaatcttaaatatgttctactgaatgaaccaagtgcttaaacaatttttattatgtgggtgctttgaaaatgttgccagaatcatttaaaaggttctgggagaatatctcacctgaaggaaatggctctgctgatgcaagcagcacattttctggctttaaatcacagtgcacaatattcttaaaatgcagattccycaagcaacaagtatctgttatgaaaaagatttycttttcatgtctggaaatcacagtaaacctcctgtgactcntgaatgatttaatttgaaaactccactatagttcatcaagacttagctaaaagtgtgttattctgctccttaaggttaacaattcccacaatcacccaacatgtaaargtactgctatttaattattttagtttttagckggatacagtggctcatgcctgtaatcccagcactttgggagacctaggcaggtggatcacttgaggcaaggagttcgagaccagcctggccaacacggtgaaaccccagctctactaaaaatacaaaaattagccaggcgtggtggcacacatctgcaatcctagatacttgggaggctgaggcatgagaatcacttgaatccaggaggcagaggttgcagtgagccagattgcaccactgcactccagcccaggtgacagagtaagactcttgtcttaaaaaaaaaaaaaaaaaaactcga

SEQ ID NO: 1830 - DNA, 2289 bp, Homo sapiens
cacgcgtccgcggacgcgtgggcaacaacaaccaatatcagtaaagctttggaagacctctgctacctatttaaaataatcaacactcagccagaagaggtaatgtaatgctgtagatgggaataggagcattgatcttgctcttcttcctgactgtagtacttcctttctatggctttaaccagccacctcctcctgggaaacatctcctgtgggcttgttgggtatagaagctactctaagacccaaccagataccatgatgccactgttaattctgtttgctcttctaattaacctaagctagtgtgtatgtggacagggaggtggacaaaattctacagtaaatatttcaaaaattatagcatcatagaatcatctttatggctgccagatttgtcatcaacacccccaggatagacagtttcatcttccgacctatctggaaaatctcaggaccatgtccccagacctcctaactaaccatagcaccccaaaatacccaaacccctattgtgaagtggaactcttccccacttagtggatcccccctggaccctgctgtccccctgccctgaccactattatcggaatctgggaagttgggcatctatatctccagtgcactcataactctaacatttgcatccactcttgcattaatgacacaaaagtggaagcttccctgcgatgctctggtccaactctagttgcaagtttccaagaccacggggaggtaatgagattccatttgtgagtgaaaagaccatatatggtaccttctcccggatgggaacataaaggaaaaacaactgcctgatctgggaaggtgacagtactaccttcttctagaaaacaaagattgttcaaccaccaccatgagaacaggtggaaaatatctctatagacccaacctggcaatgaagtataacatcccacccccaggcttctcttggtgccctagttgggttcatttttgtttgtgactatgaatgggaagaagtcacaccctgtaccactccaactccctaaggagtcacctcttctttaaggaatactttcccttgtatctaaaacttggaactgacatgaatgaacgttggccactcttacccctccaggggtcacaatctataacgcctaggacccaagaatatcagaaataagtaagcaataaaactaattctggcaggaatcagggtggcaataggactagcagcaccctggggtggctttgcctaccatgagttaacgctaaagaacttggctcaaatcctagaatccttagccaccaacggagatcaggcattaaagagaatcaagagttccccagactctggaaaatgtagttgcgataacagactaccattggattattaactagctgaacaaggaggggtcttggcagttattaataaaactgctgcacatatattaactctggacaggttgaggttaacattcaaaagatctatgagcaagctacctagttacatagatataaccagggcactgcccccaactatatctggtcaaccatcaaaagtgccttcccaagtctcacctgtttttcacctcttctaggacctttgacaactgtcttgttacaaatgtttggtccttgcttctttaacctcttagtaaagtttgtgtattctagattaccacagttccagagacaatgctggcacaaggcttccagcccatcctgtccactgacacggagaatgaaatcgtcctgcctctgggctccttagatcaggtatccagagatttttactcctccagtgccaggcagggcctacgtccataaactcagcaggaagtagttacggaaaacagatctccgcccttctgcagcccccttaagattaaggaggagtatctaatctctgaagggggaatgaggtagtaggtgggcctcacctctggaagtggggctcaggcactcagaccaactgagcactacctaaataggtccagggcagatgctagttccataggacacaccgacctgtgtcaagtcagttcccatggctctggcagcacccagaagttaccaccctcaccctggaaatgtctgcataaactgccccttcatttgcatataattaaaagtggatacaaataccacttcagaactgcctctgatgctactgtgggcgcacaacctgtagggcagccctgctttgcaaggagcagcgctctgctgctgctgtgcacagccggccgcttcaataaaagttgctaaccccaaaaaaaaaaaaaaaaaaaaaaaaaaaaaaaaaaa

SEQ ID NO: 1831 - DNA, 2929 bp, Homo sapiens
ccacgcgtccgatgaacttctggggaaccctgtgctgatctgccaggaagatggaacttggaatggcagtgcaccatcctgcatttcaattgaatgtgacttgcctactgctcctgaaaatggctttttgcgttttacagagactagcatgggaagtgctgtgcagtatagctgtaaacctggacacattctagcaggctctgacttaaggctttgtctagagaatagaaagtggagtggtgcctccccacgctgtgaagccatttcatgcaaaaagccaaatccagtcatgaatggatccatcaaaggaagcaactacacatacctgagcacgttgtactatgagtgtgaccccggatatgtgctgaatggcactgagaggagaacatgccaggatgacaaaaactgggatgaggatgagcccatttgcattcctgtggactgcagttcacccccagtctcagccaatggccaggtgagaggagacgagtacacattccaaaaagagattgaatacacttgcaatgaagggttcttgcttgagggagccaggagtcgggtttgtcttgccaatggaagttggagtggagccactcccgactgtgtgcctgtcagatgtgccaccccgccacaactggccaatggggtgacggaaggcctggactatggcttcatgaaggaagtaacattccactgtcatgagggctacatcttgcacggtgctccaaaactcacctgtcagtcagatggcaactgggatgcagagattcctctctgtaaaccagtcaactgtggacctcctgaagatcttgcccatggtttccctaatggtttttcctttattcatgggggccatatacagtatcagtgctttcctggttataagctccatggaaattcatcaagaaggtgcctctccaatggctcctggagtggcagctcaccttcctgcctgccttgcagatgttccacaccagtaattgaatatggaactgtcaatgggacagattttgactgtggaaaggcagcccggattcagtgcttcaaaggcttcaagctcctaggactttctgaaatcacctgtgaagccgatggccagtggagctctgggttcccccactgtgaacacacttcttgtggttctcttccaatgataccaaatgcgttcatcagtgagaccagctcttggaaggaaaatgtgataacttacagctgcaggtctggatatgtcatacaaggcagttcagatctgatttgtacagagaaaggggtatggagccagccttatccagtctgtgagcccttgtcctgtgggtccccaccgtctgtcgccaatgcagtggcaactggagaggcacacacctatgaaagtgaagtgaaactcagatgtctggaaggttatacgatggatacagatacagatacaatcacctgtcagaaagatggtcgctggttccctgagagaatctcctgcagtcctaaaaaatgtcctctcccggaaaacataacacatatacttgtacatggggacgatttcagtgtgaataggcaagtttctgtgtcatgtgcagaagggtatacctttgagggagttaacatatcagtatgtcagcttgatggaacctgggagccaccattctccgatgaatcttgcagtccagtgtcttgtgggaaacctgaaagtccagaacatggatttgtggttggdagtaaatacacctttgaaagcacaattatttatcagtgtgagcctggctatgaactagaggggaacagggaacgtgtctgccaggagaacagacagtggagtggaggggtggcaatatgcaaagagaccaggtgtgaaactccacttgaatttctcaatgggaaagctgacattgaaaacaggacgactggacccaacgtggtatattcctgcaacagaggctacagtcttgaagggccatctgaggcacactgcacagaaaatggaacctggagccacccagtccctctctgcaaaccaaatccatgccctgttccttttgtgattcccgagaatgctctgctgtctgaaaaggagttttatgttgatcagaatgtgtccatcaaatgtagggaaggttttctgctgcagggccacggcatcattacctgcaaccccgacgagacgtggacacagacaagcgccaaatgtgaaaaaatctcatgtggtccaccagctcacgtagaaaatgcaattgctcgaggcgtacattatcaatatggagacatgatcacctactcatgttacagtggatacatgttggagggtttcctgaggagtgtttgtttagaaaatggaacatggacatcacctcctatttgcagagctgtctgtcgatttccatgtcagaatgggggcatctgccaacgcccaaatgcttgttcctgtccagagggctggatggggcgcctctgtgaagaaccaatctgcattcttccctgtctgaacggaggtcgctgtgtggccccttaccagtgtgactgcccgcctggctggacggggtctcgctgtcatacagctgtttgccagtctccctgcttaaatggtggaaaatgtgtaagaccaaaccgatgtcactgtctttcttcttggacgggacataactgttccaggaaaaggaggactgggttttaaccactgcacgaccatctggctctcccaaaagcaggatcatctctcctcggtagtgcctgggcatcctggaacttatgcaaagaaagtccaacatggtgctgggtcttgtttagtaaacttgttacttggggttactttttttattttgtgatatattttgttattccttgtgacatactttcttacatgtttccatttttaaatatgcctgtattttctatataaaaattatattaaatagatgctgctctaccctcaaaaaaaaaa

SEQ ID NO: 1832 - DNA, 1203 bp, Homo sapiens
ccacgcgtccgcgcaatcactgatttgaaaagttcccaacacaggcagctgctgtgtatatgggattagagccactacatagaatagtctcttacagattttcataaatactagtcacaataagggtatttttcttgggggtggagtaagggggagactgatgctagtccttgttgtattttgttgggctgtccttgtgtattttcaccccagcctgtagtcctcctcacttcaaccccagggatttttggggagcaagggtagccaatggcagagggggttggggctgggactctggaggctcctccccttctttctcttccttccgcctcccccgtgcccccagctgctcttgtcactgtctctgatgggtatttgcctggctttgttgcttctctatctgtatttagctgcagtgatcctttagctggttggctcagaaaaaaaaaaatgtgctttaggtgccctgtaatcctgggcatcaagggaatccatccttcccctttttgatatgttctccccgtacttccagatttattgttatggctcccagtgggtattggcgattcttgtgatgcagggcctcagtcagtgtccagccatgcataagggagaggatagtgtgtacctgccctgccctctgctatgaaggtctctgccttgtggatcatgggactccccttggaggatctgtgcaaaggggggctgggcacaaaggagaatgtcctatttgggagggcaggaagcaaaggaactggacagggattggtgggcttggggaacggaagtttatcttggatacccttgatgaagaggctgggtctcttcacatgaagatcgaaaagggaccctgcttccaatttccctcttccattcctcgagctactccagggcttagaagaatgctcttggtctgtgggtccagtgttgtctgtcatccatttaagtgttcccactttcaagtgacaatcctctccttggccctgccatagggcagagcatgtctggcatagcagcctgacttttatgccctaatcttgagttgaggaaatatatgcacaggagtcaaagagatgtctttatatctgactgtatataaatgaagtttttttgttttttttgttttcctttttggtgcaataaagtttgttttggcagaaaaaaaaaaaaaaaaaaaaaaaaaaaaaaaaaaaaaaaaaaaaa

SEQ ID NO: 1833 - DNA, 3186 bp, Homo sapiens
ccacgcgtccgcccacgcgtccgcccacgcgtccgcgctgcgcgagggctccggagctgactcgccgaggcaggaaatccctccggtcgcgacgcccggccccggctcggcgcccgcgtgggatggtgcagcgctcgccgccgggcccgagagctgctgcactgaaggccggcgacgatggcagcgcgcccgctgcccgtgtcccccgcccgcgccctcctagctcgccctggccggtgctctgctcgcgccctgcgaggcccgaggggtgagcttatggaaccaaggaagagctgatgaagttgtcagtgcctctgttcggagtggggacctctggatcccagtgaagagcttcgactccaagaatcatccagaagtgctgaatattcgactacaacgggaaagcaaagaactgatcataaatctggaaagaaatgaaggtctcattgccagcagtttcacggaaacccactatctgcaagacggtactgatgtctccctcgctcgaaattacacgggtcactgttactaccatggacatgtacggggatattctgattcagcagtcagtctcagcacgtgttctggtctcaggggacttattgtgtttgaaaatgaaagctatgtcttagaaccaatgaaaagtgcaaccaacagatacaactcttcccagcgaagaagctgaaaagcgtccggggatcatgtggatcacatcacaacacaccaaacctcgctgcaaagaatgtgtttccaccaccctctcagacatgggcaagaaggcataaaagagagaccctcaaggcaactaagtatgtggagctggtgatcgtggcagacaaccgagagtttcagaggcaaggaaaagatctggaaaaagttaagcagcgattaatagagattgctaatcacgttgacaagttttacagaccactgaacattcggatcgtgttggtaggcgtggaagtgtggaatgacatggacaaatgctctgtaagtcaggacccattcaccagcctccatgaatttctggactggaggaagatgaagcttctacctcgcaaatcccatgacaatgcgcagcttgtcagtggggtttatttccaagggaccaccatcggcatggccccaatcatgagcatgtgcacggcagaccagtctgggggaattgtcatggaccattcagacaatccccttggtgcagccgtgaccctggcacatgagctgggccacaatttcgggatgaatcatgacacactggacaggggctgtagctgtcaaatggcggttgagaaaggaggctgcatcatgaacgcttccaccgggtacccatttcccatggtgttcagcagttgcagcaggaaggacttggagaccagcctggagaaaggaatgggggtgtgcctgtttaacctgccggaagtcagggagtctttcgggggccagaagtgtgggaacagatttgtggaagaaggagaggagtgtgactgtggggagccagaggaatgtatgaatcgctgctgcaatgccaccacctgtaccctgaagccggacgctgtgtgcgcacatgggctgtgctgtgaagactgccagctgaagcctgcaggaacagcgtgcagggacttcagcaacttcctgtgacctcccagagttcttgcacaggggccagccctcacttgccagccaatgtgtacctgcacgatgggcactcatgtcaggatgtggacggctactgctacaatggcatctgccagactcacgagcagcagtgtgtcacgctctggggaccaggtgctaaacctgcccctgggatctgctttgagagagtcaattctgcaggtgatccttatggcaactgtggcaaagtctcgaagagttcctttgccaaatgcgagatgagagatgctaaatgtggaaaaatccagtgtcaaggaggtgccagccggccagtcattggtaccaatgccgtttccatagaaacaaacatccctctgcagcaaggaggccggattctgtgccgggggacccacgtgtacttgggcgatgacatgccggacccagggcttgtgcttgcaggcacaaagtgtgcagatggaaaaatctgcctgaatcgtcaatgtcaaaatattagtgtctttggggttcacgagtgtgcaatgcagtgccacggcagaggggtgtgcaacaacaggaagaactgccactgcgaggcccactgggcacctcccttctgtgacaagtttggctttggaggaagcacagacagcggccccatccggcaagcagaagcaaggcaggaagctgcagagtccaacagggagcgcggccagggccaggagcccgtgggatcgcaggagcatgcgtctactgcctcactgacactcatctgagccctcccatgacatggagaccgtgaccagtgctgctgcagaggaggtcacgcgtccccaaggcctcctgtgactggcagcattgactctgtggctttgccatcgtttccatgacaacagacacaacacagttctcggggctcaggaggggaagtccagcctaccaggcacgtctgcagaaacagtgcaaggaagggcagcgacttcctggttgagcttctgctaaaacatggacatgcttcagtgctgctcctgagagagtagcaggttaccactctggcaggccccagccctgcagcaaggaggaagaggactcaaaagtctggcctttcactgagcctccacagcagtggggaagaagcaagggttgggcccagtgtcccctttccccagtgacacctcagccttggcagccctgatgactggtctctggctgcaacttaatgctctgatatggcttttagcatttattatatgaaaatagcagggttttagtttttaatttatcagagaccctgccacccattccatctccatccaagcaaactgaatggcattgaaacaaactggagaagaaggtaggagaaagggcggtgaactctggctctttgctgtggacatgcgtgaccagcagtactcaggtttgagggtttgcagaaagccagggaacccacagagtcaccaacccttcatttaacaagtaagaatgttaaaaagtgaaaacaatgtaagagcctaactccatcccccgtggccattactgcataaaatagagtgcatttgaaaaaaaaaaaaaaaa

SEQ ID NO: 1834 - DNA, 1608 bp, Homo sapiens
ccacgcgtccgcaccccctcccctcggcccctcagacgctacccaatgatgccggtttgcagagttggcctgtggaatggctcatgtttgtgcgtgtgtgtgtgtatatttatgggcatgggtgcatgcttggtgtgtatttgtacatgtctgtattgctgtgtccctgtaaatacatgcttgtgtatggatggaagaagccaggcccaggcctggcctcttcctcgggcctgtggccacacctcctgcagctccccaaaatgactgaggcagaaagcccttggggagcctagaaagcaaagctaaaggggatgcagggtctgtctgtctgtctgtctttcagtctgaggaatgagaatcctgacctgagggctgtgcagctgagagcccactacctccccagcccctctcggccccagccgcatcatcccacctgtcccctcccccccacctccagtggggctttctccagatgtcttatggttgggggtttcctgatgggccaggagaggagggcatcttcttgcgacacactgtctgggttaagtgcccagtgaggcatggtgtggggagctggcctcagaggagccgctggtgggcaagcgtgaagtgggctgaggggctctgagccactttgctcccatctaggggactgccccccatggaactcctttgaagtcacagcagccttcctttctgtttgctcttggggctgagaggtggctcaaacactcggggtccctatggctctgggtcaatctaggccaggctgcaccccatggacagggagtctcagggctcctgatcatgcccaggccctggcctggggcctccctccttggcagctttcccacccccacgcccctggcatcctcagttgctatgggatgcccctccagggcaccagctcagggctaagcgaaggaagataggagcagctcagagctgccaggctctgccttcctcacagacctggtggggcaggtcctgttcacagcagcaggagtgaaggcctggccatcggtggagagggcagctgtcagagggctgggggccagggcacaggattgaagagtttcacatatcatcacagcatacactgggaatttggtgggggcagaagaacccagggccactccctcaatatgaagggaaaccaagctgaatgtgaccaccggcacactgctgcatgtcccatgtccacctttctccccgggaataactggccctgagacccctagacccaaggaggcctgtccatgccaagcatccgggaagcatggctggccttatccacccatgggtcacgtcggttcccaggggcagcatgggagatctttgggggcaacagggagagtctgggtggggagacgggacttgtccaagcagaaggcaggaccctgggaaatgcataatgtaaggacatcaataatagtattattttttttgtaagggaaaatcaatatgtacattctgaaatcattttctctgtaaatggttggatttcatttcacccttaaagggatgcttaaaggagaagataatattaataataaaaacagctacaaagtcaaaaaaaaaaaaaaaaaaaaaaaaaaaaaaaaaaaa

SEQ ID NO: 1835 - DNA, 1218 bp, Homo sapiens
ccacgcgtccgatcgtcatttcttcatagtaaccctgactcaaggggttttggaagatttccagtggtctcaatggtgtgaatcctatgaaggtgtcttatttgttgaattagaggtgaaagcctccttcctcactcttttttagaaacagtttagttttattattatgcagaatttgttgagcaaattgcaacagcccaagccacagctagctccacaagagcccttccatgagccctcaacctgggatctcgtgtatctttgttggaatggacattaggtttccaagtccaggcctgtgatttagaagggtcaggttgggtaggagagaggagagtcttggaggggctgctccatgggggtcacacctctctcctgtgggttttcgctggtgattgagttctgaggcatttgctgcattgactgttgtagctttaactcgtgtgcacgtgtgacacataaagccccaagagaagggctgcctggctcagatgcacttccatgctgattatatgcatgggtgttgaaagcagtgctggctgagcagcgatcccagtgcagtttgactttattctttgctcaaataggtgaagcccacggtcccggcctcgaaggtggtctcgtgggcaagcctgccgagttcaccatcgataccaaaggagctggtactggaggtctgggcttaacggtggaaggtccgtgcgagccaaaatcgagtgctccgacaatggtgatgggacctgctccgtctcttaccttcccacaaaacccggggagtacttcgtcaacatcctctttgaagaagtccacatacctgggtctcccttcaaagctgacattgaaatgccctttgacccctctaaagtcgtggcatcggggccaggtctcgagcacgggaaggtgggtgaagctggcctccttagcgtcgactgctcggaagcgggaccgggggccctgggcctggaagctgtctcggactcgggaacaaaagccgaagtcagtattcagaacaacaaagatggcacctacgcggtgacctacgtgcccctgacggccggcatgtacacgttgaccatgaagtatggtggcgaactcgtgccacacttccccgcccgggtcaaggtggagcccgccgtggacaccagcaggatcaaagtctttggaccaggaatagaagggaaaggtgggtttcatttaaaaaaaaaaaaaaaaaaaaaa

SEQ ID NO: 1836 - DNA, 368 bp, Homo sapiens
ccacgcgtccgaaaaggaattgcaatactatcttaaattgaaggcttttatttcaatgtccttacatttaaaatgggatcttacaagggaagtaccaaaaaagtaaagtttattttgatgactctcaagatatatatgtttgttttgaatgttggcagatgccaatagcccttaacatttgaaaaatggtacttgaacatcaattatgtctcagagttcccttaaactttttgggcttaaatatttttattcattttggtcatacctttgacaatggatatgttaaactttaacaattatagtgacaaaacagcttgcttagaacctggaaattaaaacacaatttctagagtaaaaaaaaaaaaaaa

SEQ ID NO: 1837 - DNA, 685 bp, Homo sapiens
ccgggaattttggtcatgaccttttgtgcgtgtgtgtatgtatgtgattgggttgaatttagcttaaaaaaagttatgcaagaaattcatgcttgttgtaacgtgtcaaacaatacagaggtgtagggaaaatacctagtgccaccctccactccaaaaccccatgtcgccagagataaccatttattcagacagtgagtatctattaagtatctattgctaggctttggagatagcataatgaacaaaatggatgtgctctctgcccttgtgatttggacagatgcttccagttaatcttttttctgtgttttatattgattatgtttgtatgtatgtgcgtgtgtgtgtgtgtgtgtgtgtatcgactgttttcttcctcctcccataccattccccaaaaaaggagggggtagggatcaagctacacctatttgtaacccagttttttcaattaatggctgggcatgtccttccaagtcattacatatagatctggcttatccttttcaacagctgtacccacattcttcagtgcagagagaccacgctttattccagcattcccccactgctggtcctttaggttgttcctctgagatgtcttttttttttttttgagacggagtcttgcactccagcctgggcgacagagcgagactccatctataaaaaaaaaaaaaaa

SEQ ID NO: 1838 - DNA, 781 bp, Homo sapiens
ccggtccggaattcccgggtcgacccacgcgtccggtcataattgctgccatarttcctgtttgtctatctctctctcccctaggctcagaattccttgccaacagtggctgtgtctgatatgtctttgaatcttcagtatcgaactcagtgcttggcatatttgatgttcataaaatgtctgttaaaagaataaatgaatccaggactcatgtttctaataagtatagaaattgctctcttaccccacataagtcttgcatatccttggtcattggcaatactagataaggatatgctatttaagtagcctaaacttaaacaatgataaagctacattactgcatgtttactgaatgtcaaacagacttctaagtgctttgtgtttactaactcatttaattctcacaaatttataaccatttggtaggagaggaaaccaaggcatggagaggttaagtattttgctcaaggccacacagctagtaaatggtggaactgggatttaaactccaacaatctaacttcagagcaatacagccttagtaaagcagtctcacatccatcatctgactcaattaatgtatcacaagatagtaatacctacgtatttattataatgaaagaaatcaagagccaaataaatcaagttgttagctatagtctccaaagaagggatacccaagatgcaacccttccagccacttcctgcagccatgcttggttcctgtatatgcctaaagacccctcatttaaaaaaaaaaaaaaaaaagggcggccgc

SEQ ID NO: 1839 - DNA, 829 bp, Homo sapiens
cccacgcgtccgaaaccgttttagtttaaaatagatcatttgatttaataaactattttaaaattgactgttttgtaaactgcatattcataaagtgtttatagtctgtagttaaattttatgttactgttaacgaattaatttatttaatttcttccttcatgttcctaatcattttcatttcacttaattttagtttatgtcatagtaatctgacatttactcatcagcaaattacaatgcaaaagaaaaaatatttttaagaaatattcatatttttctttatggaaataagtgtgtttaaatgcacaagataggaaaggacgaacctgatctcttatactagtatccttaatcatttttattgccacaactaacctcctcggactcctgcctcactcatttacaccaaccacccaactatctataaacctagccatggccatccccttatgagcgggcgcagtgattataggctttcgctctaagattaaaaatgccctagcccacttcttaccacaaggcacacctacaccccttatccccatactagttattatcgaaaccatcagcctactcattcaaccaatagccctggccgtacgcctaaccgctaacattactgcaggccacctactcatgcacctaattggaagcgccaccctagcaatatcaaccattaaccttccctctacacttatcatcttcacaattctaattctactgactatcctagaaatcgctgtcgccttaatccaagcctacgttttcacacttctagtaagcctctacctgcacgacaacacataaaaaaaaaaaaaaaaaaaaa

SEQ ID NO: 1840 - DNA, 1007 bp, Homo sapiens
ccacgcgtccggaaaggtctgagcatggtgccgattaaattctccattgaaatgtacctttgtgggtacattaaattattttagcataagtctagtgaagtgccagcagtagatactatgttatttctggagctcttgatgttgatttttgaggctgaacatgctcttagcctcaagcaggtcatatttggaatacctgatgtgtgctcctggttgctcagtgcttaggatgcataaacaggtagctgcagtctcatctctcagtatatatacttttcagcaaatcttttttttctagataaattggaaaactaccttttttctgcatttttcatctgatgtcattatggtatgtaggtggcagctttcttggggcacagttgtctatataactgttcatcacatgagtcattgtctgtttctgktcttctgcctgaaaattccatcttggaaatcgtgtcatgcaatcggtgactgcgacattctacttgttatgtacactgccactggctttgtatgttatgttgatggactctacctgtgctacagtgaagggataaagtgacttattaaattgagtcagactcagttcctccaaatggtatttcctgtaaaaatgatgccaagcaagattctgcataaaacatgcatatgctttacactgtaagcatacagtgcctaccttttgttattgtctctgcttaaatccttaccacagttgtactcctgtttgatcaagtggccagtttaactagatactagctttgaagaagttctgtattggcccctggaatgtgacagttcataccacattgaaaaggtaagaaccaagtctttgtagagtagaacaccttaaagttaatccacttttaccaaattcctctattgttaaagcaacagtcctatattggctaatttttaaaatcataatgtgccacactttacacatccctagaatgtaagctagggggcaggggccaaaaaaaaaaaaaaaaaaaaaaaaaaaa

SEQ ID NO: 1841 - DNA, 854 bp, Homo sapiens
  misc_feature (345)..(345): n equals a,t,g, or c
tcgacccacgcgtccgccacaacagtcgagtccaaatcaaacgcgctccaggcaggtggggctggggttctgccagcctcctggccagcaggggtgggtgggcagactggggccagtatcagctgttctgcctggacccaggccgggctgggaaggcacacttgtgcttatttcccgcctccacttctgtgcaagcttgtgctgtcataagcagagatcacagccccatttcttggatggagaaagtggacactgaggtctgaggcttttgaggacagtcaggagccctcctatgggctccagtgatgcactcaccagcttctggtcctcttcttccacctcttnagagtgccttggctccctcctgtcgtcctggggaacctcggccccagccctgcctccccagccagtcacagctcctccctggtcaccctgagggagctcagggcccggctggtagctgggttgctctgcttctgtccccgactcctgtggagcctggcaggcaactccatgatctgaccccggttaccttgacagccctgcctggcctcccctctcatggcccagccaccccagaacctgaagaggttttctagctgccgtgcatttgccaggctgggttacccaccctactttccctgcctgccctccagtgctgccaggcctagtgtgccagccagcgctcagccttcagtaaagggttcccctgcttccaacctccattgcactgcttcccctaagactgtgacctcctggaaggctggagcacaactgcctctcaataaacgtgttgcaaaaaaggaaaaaaaaaaaaaaaaaaaaaaaaaaaaaaaaaaaaaaaaagggcggcc

SEQ ID NO: 1842 - DNA, 1274 bp, Homo sapiens
cccacgcgtccgtgcatattgaatttaactaatcattgtccttaataggaagagcagcgaagaggcacaaaaagagaggagaaggatatcaaatttattgaacataatggaaccaagcctccttcagttttatatttctcgacagtggcttaataaatttaagacctttgccgaacctggccctatttcaaataatgactttctttgtattcatggaggtaagaactcctgtaatgcaaaccggtagtagaagtttgctgtaaaataatttgcaaattaggagagccaagaattttcctctcccacttatttcccatttccccacctgcattcaaacttaatgtgttttaattccatatggtttcagaaattcacccttcctttttaattgtaggtaatctctagcttctttattgaacatatatttactgagtacatgctttctaaactttttgctagtgcctaaggacactaaaaatcctttttcttctgtgaaagctctaatttcatagtagagtaagatacataaacagctgtttacattacagtgagctcctctattatacatcatttttcctacctgaggcattcctgtgctggtgattttatctatcgactatattggtggttcttaaccccattgtctaaatgaatagctggcttttttcccaagtatggaaatgtatctgggatttaagaaaaaaaagcctcataattaaatataactttggcccttgtgagattggctgtgttaatgtttatttctacaataaataggacctttgtgtgatgccaattaaacttcaaggttgaagatgggatattcatggtaattatgtttgtagtgaaaccagaagggatagggatacctgtattggacatagaaattttaaggtgtatgttcatcttgaggaaacacaatcaccaaaaatgctttataattaccgttcttgggagagagagtgtaagaataatgattgagctgagtgcagtggctcacacctgtaatctcattgtctcaggaggctgaggcaggaggactccttgagccctagagtttgaggttgcagtgagccatggtcatgctgctgcactccagcctgggtgacagagtgagaccttgactcaaaaaaatggccagacacaatggctcatgcctctaagctcagcactttgggaggccaaagcaggaggatcacttgaggtcatgagtttgagaccagcctgggcaacataatgagagcctgtttctacaaaaaaaaaaaaaaaaaaaa

SEQ ID NO: 1843 - DNA, 1820 bp, Homo sapiens
acgcgtccgattaaatggttattctagctcctcttaacaatgaaagtgatcactctctggaaccattggaaataggtcattatatcatatgaaatgtattcttgaattctaatgactattattttaaaagtgctcttcattcagatgacaactcagttaaaatatttttcaacaatgatgaattattttgcattaattattttttctgtttggttattggtttaacactctggagatgagcaaagaaaaaatatttaagtctgcctttcggaaaaaccattgtactctcagtgtcttccatcatttcttacctacaaatgttgttttgtttaaggaagggttcttgacatttgccgtgtaaggttatagaataaataaagagtttatttacctacggtagtggtgatttagtttatttttaattcttactgtctattataggtgtaactcattgattttagttacaagtttttaatttaaagtttctatccccaaaactattgccctcgaaagtatcaaattactataaaatatgaaaccttaaatactttgacacttatgtaaactagggtaacatcattttcattacgtatgggaaagtacatatctaaatatatttttgaccaaatatatttgtcaaatttttaggccagtttattttgtcccaatatttgagcaaagttgagtggatattaagagtgggtttcctcaaattatgaggaacaaaggcataatgcctggcacaaaggagaccctgagtgaatcacattgctttttaaaaatttgttttgatcacttaagaaaaaataagtcatgtttttggtatatgtctcaatgtaagaaataaaactttatcaaatatttgaatttactcacagctaattaggtttttaaaaagcgttaaaatttgtgacatgtatttctatcaaattgtatacacactcattttttaatttaaggaatcaaggatttatagatacagttttgttatgcatattgaacctatgaacaatagctacatttctaagtatcttttgtgaagttagttgttttaatgatactaaagatatggcacttgggcttgtctttaagaatccctccagttatgcatatttttatttataaatagacatttttctctggcaacagcttttattattctctcagaggttcacagccttccaaaatttaagaaccactgtttttttttttgttttttgttttttgtttttgagacggagttttgctcttgttgcccaggctggagtgcagtgagctgagattgccccactgcatcactccagcctgggtgacagagcgagactccatctcaaaaaaaaaaaaaaaagaaaaaatcagacctttataacaaataatgaaacatttcccaataatgaaaagcccagaaccaagctaagctggtgaattctatcaaatattaaaagaagaatgaacacaagtcattctcacatgcttccaataaatagaacactcagattcattttttgaagccagtattacactgataccaaagccaagggaaagtatcacaagaaaactacagatccaaatcctttatgactagatacaaaaatcctcaacaaaatagtgacaaactgaattcagcaggttattacaaggatttatacatcaagaccaagtgggatttatcccaggaatgcaagattgcttcaacatatgaaaatcaatatgatataccatattagaagaatgaggagacccacataatcagctcagtagatacaaaaaaaagttgcatggaacccaaaatgctttgatgatttaaaaaaaaaaaaaaa

SEQ ID NO: 1844 - DNA, 1984 bp, Homo sapiens
tccgtctttttctacattttagctcctaacaatgcagtttctatttatttgctgatttcttactattgatttgatagtctataattaacatgtatctttttaataatttttttttcagttcttggtacttaattctagtccttctaaatcagtattcaggaactattgtgggagtgtattagaaagtgcatgttcaaatgctaatcacatatccagggagactccagttctgtgttcatgcctctcagccatcaaatgacttcgggaaatattaattcccttctccaggttcaaagtcacttcaggtaaatgaaagaagaaatgtggtttttgatatcctggtgcagagtctgaagcttgatttctgtggagggtctagagatttgctaactgaaggcattatgggatagttagtgcccacttctatgtaggaaatatttttctgtctcccattgataatagtaaatacaaaggaacatcattagtttaatattatgaaacagcctgcagtttcaaaggaatcatgtttttgatttggtgagacagggctggattctctacagcctatattcatcattctgcatatcatggttgttgattattgaggattaggcctcctaatcctacagctgtgtcctaggtgcttgggacatatcattgaacataacaaaatccctgcctcatggagcttgcatcctaacagagggaaatagtaaataataaatataataaataacaaaaataaacagagtctttgaaagcagtaattctttggaaaaaagaaacgaatattgcaatattgcaatttaaggggattgatagtgtattataagttattataagttgcagaattaaatatcagagcagttattattgaaaaaaaatcgagctaatatttaagggagataaaggagtgaaccatgttagtttcggggcaaggacattccaaactgaggaaatagcaagtgtaaaggtcctagggtaagagctgccaaacatgttctgcaggtcaagcaggcataaagagggatgtaagttaatgtaatcattttatcctttctaatcttcaattgatgttagagtctttttagtgttcctaaatgtctgtacactagatcctggttggctgaattgccatctgcagtggtcctgctactggattcctctgacctttggtcattcttccctttaaaccttttacattttgacacttcattattttatgctgcttattcaaaatgtatactttcttttaacgttattctttctttagtctctttacttcacttggagtcagattctactagaatcttttttgaccccaaaagcatttggaaacacatgaaatatttgggggaaagggagttgtcatggtaactagggaactcccgtttcctagactgcagtacagtgtcatgatctcggctcattgcaatctctgcctcccgggtttgagcaattctcatgtctcagtctcttgagtagctaggattacaaatgtatgccaccatgcctggttattttattattattattattattatttttgtatttttagtagagatggggttttgccatgttggccaggctggtctgaaactcctggcctcatgtgatctgcccgccttagcctccttacatgcgtgagccactgagcctggccaaaatattgtctaattattcatcattctgtagtgttgagtaaatgtaacttttttgtgtctatattatgtagttttgagtaaatgtaactttttttgtctgtgtctttggacacttgtagccaaaaagaggaagaagaacaggaggcatacagggtattttaaggtctagattgaacctggaccttggaactgcttcctaggtgttgcaaatgggtaagaaacatatgtaacaaacctgcacgttgtgcacatgtaccctaaaacttaaagtataatagtaaaaataataaaaaaaagatcaaaaaaaaaaaaaaaaaaaa

SEQ ID NO: 1845 - DNA, 789 bp, Homo sapiens
  misc_feature (15)..(15): n equals a,t,g, or c
  misc_feature (47)..(47): n equals a,t,g, or c
cgtatgttgtgtggnattgtgagcggataacaatttcacacaggaancagttatgaccatgattacgccaagtctaatacgactcactatagggaaagctggtacgcctgcaggtaccggtccggaattcccgggtcgacccacgcgtccgctcttatattaaaataatacctggccgggagcagtggctcacacctgtaatcctagcacctttggaggccagggtgggcagatcgcttgaggtcaggagtttgagagcagcctggccaacatggcgaaaccccgtctccgcaaataatacaaaaaatgagccgagcgtggtggcacacgcctgtattctcagcctcctgagtgcctgggaccacagtcatgccccaccacacctggctaatattttttgtttttgtagagatgaggtttcgctatgctgcgcgggctgcgtcgaactcctggcctcaagcaaacctcctacctcagcgtcccgaaggctgggattatgggtgcacgccactgcatctggcccttttgtaggtattttttccccctttctctgattgtacctattgatttttctccctttctctgattgtacctattgattgtttagagtctctgaaaaatcacactcttattggctaagtcttcaccccataaatctttcctaataaatgctcattcagactctcagaactttcagcattaaagagttttctattcatgccctcaattcctcccataagaactaaagtgatcttttgcaaagtaaaaaaaaaaaaaaagggcggccgc

SEQ ID NO: 1846 - DNA, 354 bp, Homo sapiens
ccacgcgtccgaattttttcattttgcctaattttagacttattgacaaagtgctgggaagacaggcgttagcaccgtgcccggcctctgtttcctgttattagtgattttcctgcccaagattgcaacaacaaatatgtagaactacagactgtttagaatgctgagactgttctaagaaactttcaaaaacagtagcacttcaaggaatggtcactttctatgaaagaaactggtttgatagccataatcttattgctagctgcttttagcaaaagtcttttcttgaaaccaccacctatactctttaaacaaataaaaactaaaatctcttgctaaaaaaaaaaaaaaaaa

SEQ ID NO: 1847 - DNA, 1487 bp, Homo sapiens
acccacgcgtccgaaaaaaaaaaacctcatggtgagataggtgaaaaatagtctaaaataataggaagccctttgctggtgctaaatttccatttgacagatggtgggcctgaggcctagaggcatcggggttgcccaaggtcacacaaagcctgacattgagcatttgttttttaatttcaaatctattttctcttacaccccatctgccttcatttctcttgctatgaaaagacactgatggtttggcatacagtctgggcgtagtcaacattttgtgggagaaaaggaaggaattagactaggagatctgggatgcaagtatatattcggcccttgattagccttttgctttggggttaaaagggagtggctgggggtgggtgaggttttaactagatttccaagaacctctttcctccttgcttttgaagttgggggtgggggtactatattggtttgtcagtcagctactcatgccaaacattaggtcattatcactttcactaaattcactcattcaacactttttggtctgcaaaattttgaaacgggaaagagttaatgaatacccaggcaattttaacacaatgatgaaaaaggctacaaaggagtaaatctccgtgttatgaaagtgtgcagaggagaggtcgaggaagggctctaggagggaattatatctcagctcagattggaccccaaaggaggagttagttgggtagaatggaagagagtaaggaagggaggctctctgggcagagccactcctgccctccagagagatagcatagcccttgaaggaggaacttgaagacatcttgtttggctgaagcctcaggtaagtgggggatgtgacaagaggtgaagttgggtcattagagggcagaagagcttctaaccttattcaagagtctggactttakcctagagcagtagggagccactgtaggatcatrtatggggaggccawttaggacgttaagaaacaacatcatttgcccattcccttcacttggacctttgccgtttacaaagtactttcacttatgttattactttatgtaaactactcaataatcatataaggtagaaggagatagatatctccttgttgtagacaaggaatctaaagttctgagagggtagttgactgattaatcaagtaagaagctagaggggccaacacgtgagcctcgcacttcagttctggactgtactctagctgcaacaacctcttcctctcaaaacaggtgctggagttttccacaggactctgtgtgttgggcacttacccataggaccagcccctttcagtggtctacaataactattggccgggcgcggtggctcacacctgtaatcccagcactttgggaggccgaggcgggcggatccacgaggtcaggagatcgagaccatcctggctaacacggtgaaaccccgtctctactaaaaaaaaaaaaaaaaaaaaaaaaaagggcggccgc

SEQ ID NO: 1848 - DNA, 820 bp, Homo sapiens
  misc_feature (779)..(779): n equals a,t,g, or c
  misc_feature (798)..(798): n equals a,t,g, or c
acccacgcgtccgcccacgcgtccgctaatctatgtcatttaagttctagattttacagtattttggagtgatgaataaatagcatgctgttcttctatagctagcaaacaagactcagctttggagacaagaagaaggaatacaggagatgtttccttgaatgagtcttcttcctaaactctgctagaagtatgtcagaaagcgaaggttacctcagtctccaagtcatgaaaacatgaggtctttctgttttctagggaaagtatttcatttcctagtgtggctttttgcacaccccagaaggaggaagacaagccttcgtgtcacctttacatggtagttgagatgcttcacatttgtacataacatcttatatgatcgaaagaggaactcaaactcgacaggggagaataaggaaatacatctaaaactgacaattatgttaatccctcaattccctgggcccccaaaatagtctcctctatttgccatttcaaaatagctaatgagagggtaattggacatgtagacactgaatttccactgctcatggtttccttccctgggctcccagtcacccggaaggccccggattacctcaaatgtcataatgggktcatcgcattacgaattacctccttctgccaataaactacaagttctttgaggaccaaaaaaaagwmraaaaaaaaaaaaagggcgggccgccctaggaggatccaagcttaaggtacccggtgccattgggacggccaatagctccttccaaaagggggcnccctaaaattcaaattcanctgggccgttcggttttacaaa

SEQ ID NO: 1849 - DNA, 751 bp, Homo sapiens
gcacaacttcaacagattttctgtcatattctcaccagcacatctgaatgaggctttgtgttttccttgctctcttgcatgttccttttcaactcatggcccacagtgactctcagagatttatgccaaaattgcatacaattgttttctgaatcataacttgtctatttttctgcctatgtgtgctactttcagtttgtttctcatcaacattttgactctcagaagagcctccatttgcccctttctctctttaggtatctaagatctttgaacacctggacctttacatttgatccaaccctatcaaataatgaacttctcagagaggcatctggggtcctggaacttcatgttgatgaagtcatattatataatatgataaaaatattctcatgcagtattttaaataatttcaaattctagaagaagcaaatttcagcgacatgtcattgagtttttatttggtaaagctataattgtgcagtgtacaaagcactttttaaaaagatagtttattctgtcagggtatatgaagttagtatacagccagaacagccaagcctcaattcttgtaccttgtgtctttttattactgtttaatcaatagatatcatatgtttatgacagtttcaagaattgtttttaaacccaaacttaattttawgtttcagactattgttagaaaaacaaaacaagaaaaaaaaaaaagggcggccgctctagaggtccaagcttacgtacgcgtgca

SEQ ID NO: 1850 - DNA, 1084 bp, Homo sapiens
  misc_feature (864)..(864): n equals a,t,g, or c
ccacgcgtccggatgtatcaaattacaaggtttcatttgtaaataaggtgattaaaatgacaaagtgtattaaaagaaattgtattgtccagtgaagttttaagaaacagaaaccataaggtgattattatttttcaagccccaaaggagaattcattagatgacatacttttaaagttcattacaggtgtgagccactgcacctggccgtataattttctttttatcagggatgtaggctcaaatgagattgggtgccaaaacttcattatttttcttttcttttcttttcttgctagtttttgctaaacttcttttgttaaagaaaggcagttactgttactgagatagctcgatggtatcctgtgcatttttttttgaaagctcaaatagaagtctcacagttttagggagggattttttttagtctacaaaaagttattagtatgcctgtcctcttagtactgtactgcctagttactctcctttcaaaaaaaaaagcgtatatttattatatttccatggtaaactagcagctacaataatgtacgcttttttttttagtctacaaaaagttattagtatgcctgtcctcttagtactgttcctaaaaatgcttgtacattctaaaactgcaattttactgatagttgggaaatgaaagtgcaaaagaaattaatgacttgtgaagttctggtatttcattatgtcaagacaagattttttttttttttcctgagctgtagatctcatttgctgttggttgattaagaaaaaaatcttggccaggtgcgataggctaagtctgtggtcccagcactttgggaggctgaggtgagtggattgcttgagctcaggagttcnagaccagtctgggcaacgaggcgaaaccccatctacaaaaaaaaaaaaaaaaatagaaaaattagccaggcctgtacacccatagtccctcctactcaggaggctgaggtgggcggattgcttgagcctagaaggttgaggctgcagtgagccgagatctcaccactgcagtctaccctgggtgacagaatgagaccctgtttcaaaaaaaaaaaaaaaa

SEQ ID NO: 1851 - DNA, 1403 bp, Homo sapiens
ccacgcgtccgcccacgcgtccgcccacgcgtccgatgacccatggtggtcatgaccaactgcttttaaaaataccgaaccaaaactgttttaaccttgccccttgaattatagcagtttatgagtcagcagcttatgctataagggatttgattattatttacttcgagaaaactggcttccttgaaatctcctgatatgcatgtaaaactgtcatgtcatgtaaatcaaaggtaatattcaaggtgtccaactaagtgtaaggtccaaaataatgaccaaatgatataaagcaacttagccttggaaacaatatgaagcatagtactaatgtagaatagttgtattggagttgactttatataaaaatgtcttacatcactctacttaaattcatcttgtatttcttctctctagtatctgagttcagaaaacttattccatttataatgttctctttatattggttatgctattttgatcttaccattctttttaaaagtcttattacatatttatttttccttttttctttctattctatcattatacccataagagagtttgttacacctgaaaagtgaaacaaactaaattaaaataaaataaaagaataaataaagaacattggtcaagtctacaaaagttaaaaatttaaaaatcacatggctttgcttatattgaaataaatgttttgtgtatggttaatacaaacttctctatttcctggcatttattcaatgagtaatgaatagcgtaatgttactttttacataaatgccatttctgtaaactcactgtctaaatatttactactctaggtaattgccagatcttttatatattaaaggtcatcaagaatgaattaatcatttagcattagtaatacaactggaaggctcaagaagttcaagtatgttaaaaatgctttggaaagtcttctgaaaactattggactagtcctatcataaatgggatatttagatactgtaccatttgcatgtgtgcttgtgtgtgtgtgaatgtgtgtattggtgtatacgtgtgtgtttgtgtctttctgcaggcacatctcattttaactgttagagttgaatcagtcaaataatcacttttgtgataggctcacttttgtgaatgatctgagtatcagaatagaaacctatagatatggccaaatggtaatattcatttatgatgatttttttaaaaacacattaattttattgtgacagaatgttggttattaatgtttgaaagatctagttgcatacacagactcttggatcaaaaataaagagctctgggctcacttcttagatcagtctgtggccaaaataaatgaatttaattcctggcacatcagtttgtcaaaattaggcgggaaaaaaaaaaaaaaaaaa

SEQ ID NO: 1852 - DNA, 1566 bp, Homo sapiens
cccacgcgtccgtgctatgttgccccgctggtctcaaactcaatggactcaagcaatcctcccacctcagcatcccaaagtgttgggattgcaggcatgagccactatgcctggcctagtaaaatatttttatactaagtagagagagtagattcgtggaaaactcttaaactcaccaggtactgcaatgaaacttctagcattggtgattagcatactaatatgtactgggcaaatttataattgttagtaatttgcaatggagtcttttcattctgatattcaaagtattttacaaacactaaactttcaaaatctctcttataataggtattgttaaattaattccatatttcatatgaaaaaacaaaagctgagggaggcaaagttacttacctaagaccacacagtatttaactgatggaacctgagtagttccaaatttccgttactcaactctaacccgcatataaaataaaatcagtgtaatgctaagaaatactattgtacctccaagaataaacttgacaataaaaatattgtcatggcagtttaaagaaatgtctttattaaaatgaggattccaaggtaaaatcctctaagtataaacatatttatataagatatttatatttaagaagatagtaatttcattcaatattttgtttttaatatcatgatcattaagttacatagattctcttctggtaagcaaagtgcaaaaaaagccaaaattgttatagactgtgattcaaatactctttcatatagccagggtgataaactacttatttattgaacttgactgtttaaatataaaaatgattgtcctaatggagaaagcccctaaaaagcaagtagctccttttgcataaaagacttttacattattttggattttagtgaacagtgtttttttctattgtaatttctgattagatatcacattatttatgaattgtttgttatggtaggagtatagtatcttttggaagaatttatcttagtatatattaaccaatgagtcaattaagattagccaatttcaatattatccttaagcagtattaccattgtaatgctagaatagacatatcccagaccattaaaaacctgacaattctttatccaaaaaaaacaagcaggcaaaatatttacaaaactattaaaagattggggagctaaagtagtggcaaatgcattactctgaaaatcctcacacatcctctgaaaaccaataaagatgaacaaataagactacacataaccaggctgggcacagtgactcacacctgtaatcccagcactttgggaggctgaggcaagtgaatcacctgaagtcaggagttcaagaccagcatgaccaatatggtgaaatcctgtccctacaaaaatacaacaattagctgagtgtggtggcacgtgcctgtagtcgcagctacttgggaggctgaggcagaagaatcacttgaacccaggaggcagaagttgcagtgagccaagatcatgccactgcactccagcctgggcaacagagtgaaactccatctcaaaaaaaaaaaaaaa

SEQ ID NO: 1853 - DNA, 668 bp, Homo sapiens
ggtaaactatcttgagattaaatggaggctgcaaaatcactgtgtcccagggctcctttgtcttgctctgctcttcttctatgcagtttctgtattgtgggcgaggatggttaccattgtgtctgctaataagaagaaaaagagaagggcattctctttacctttaagaggagtttgtgtatatcactttcactcagatccctctggctctaactttgtcacgtcacaaccagttgcaaaggaggctgggaagtgagtgactctgacctaggcagccatatgttgcacttaatttttattactgcataagaaggagagaacagattctggggagatagccagctatctgtcacattaaggtttgagtcagatttatttycattaaaaaaaaaaaaatggcctcaggcctgtaatcccagcaggytgaggcaggagaatggcgggaacctgggaggcatagcttgcagtgagccgagatggcaccactgcactccagcctgggtgagagcgagactctctctcaaaaaaaaaaaaaaaaaaaaaaaagccgttgattatttaaacagttaacttttttgttgttgttctggaatgagtcttggttactgtatagtatgtattaaaaataaccattagcaatctaggcatagtggtatgtgcacagtccc

SEQ ID NO: 1854 - DNA, 313 bp, Homo sapiens
gctgacaataccaaatgctgggaaagatacagagcaacaggaactctcatgtcagagttcctgttgctctgtatctttcccagcatttggtattgtcagtttaaacacaaatgctgggaaagatacagagcaacaggaactctgacatgagagtaggaatgcaaaatgagacagccactgtggaagacagtttggcagtttcttagaaagttaaacacatttactctatggcccaggatctcattcctggggatttactcaagagcaatgaaaaccccactcaaagatctctacaatccaaaaaaaaaaaaaa

SEQ ID NO: 1855 - DNA, 1082 bp, Homo sapiens
  misc_feature (1065)..(1065): n equals a,t,g, or c
gcagtcactttagtaaaataagtacattatattacatgtcattataatattgtgttatcacataaactgagcataccacaatccatattctacggactgtcttctcctttttccactgattacatgtgagtggttcttagataacacaccctaaagacaaagaaagaaaggaagagaaacagaattaacaagagagggaaaagagtgtcagtttcctttgctatgactattaaatgactcagtgaattttcttagggtaaagttactgccattcaaaattatagtaaattggtaatattttacagtcatatatttttkgtttcagctgagtatatttkgttycagcttaagtatgggcacatatctcccacacttttttagatcagatatgacacataaaaaagatggctttggttttttaaaaactcttacaattagcaactaatggcagtgtgaacatataattggttttataggtaaatcaatttgtcgacttacaaacttttaagacttcatttgttattcataactacattttgctgaggaaaaaaatacttgtttatgtcaaaaaggggagaatttccattaagttcatactctccatgatgagaaagcacaccccgaaataagacattaaatgttagaatgtattacttttcctggttagaaaagaacttggctttgggagtggaccctatgcgtatcatggtgtggcaatgccattttgtttccaaagataacatttgtagatgtacagatgtcctgaactttattaaaccacagctgtggttatcacatatttattcaaaagatattacagctatcaaagcagtatgtcagcaaagtccttagtagtttgcttaaattgccctttcattttactgtatctgtaagtattcaaccaatgtctttaaaagcctgagtaaaaaaaaaaaaaaaaaaagaaaacacaaataagcaaacacgaagcattatttacatggaagcattcagaaatcatgaatagcattatcacaaatgagttatgacattttataggttcacaaaaacgagagaaaaaaaaanaaaaagggcggcccgct

SEQ ID NO: 1856 - DNA, 1316 bp, Homo sapiens
  misc_feature (24)..(24): n equals a,t,g, or c
  misc_feature (37)..(37): n equals a,t,g, or c
  misc_feature (48)..(48): n equals a,t,g, or c
  misc_feature (61)..(61): n equals a,t,g, or c
  misc_feature (121)..(121): n equals a,t,g, or c
  misc_feature (1305)..(1305): n equals a,t,g, or c
  misc_feature (1308)..(1308): n equals a,t,g, or c
ccatttttccccccaggaaaccancctatgcccatgntttccgccaancttttaattccgnctcccctatagggaaaacctggtacgcctccaggtcccggtccggaaattcccggggtcnaccccacggcgtcccgcaaaacatcagtgcctttcaaatgctaaggaaactctgtcaaatgatctttctttttttgttttttgttttttgttttttggtctcacaatatgtctcaccattttatagtaacaccttctttggtgtccagtaaaatgaaaacttgagagatttctactgcttcaacaatttttttaattacgtggagattttaattttctatgagctatctgaaagaagagtagaaaataaatacaatcttgaaaaatcccatgaaaaccataggcaaatattaaatgattgaggcttttcttttttaaaacgtggctatgttctttttagatagcctggattcagggacttgggaccttgtaaagccaaagctgattgacactcataaggatgtcttcctgtatgccattctaatagacacacatgttacctgatagagctgggcagaggtgcttcagtctcaggctgaaggttctgaagtccagggaagttgggtgctgcccagggttacaagccatgagtgggagagctcaagtataagacacttaggccagacttcgtttcacaagtccaggctgctcctcaccaaaattctgtgtgtatatatatattttttctttttctgattctcatgcatattgtagataatttggaatatacagtaaactgaaaattctatatccacatttctgtgagctttttaaaatgtgagtgattactggccaggcatgggggctcacatctataatctcagcaattcgggaggctgaggtgggaggataacttgaggcctggagtttaagacgagcctgggcaacatagaaagaccctgtctctacagggagaaaaaaaaaaacctaacaaacattagccaggagtttgagcccaagagtttgaagttacagtgggccttgatcgcaccactgcactgcagcctgggcgacagagcaagatcctgtcttaaaaaaaaaaaaaaaaaaaaaaaaaaaaagggcggccgctctagaggatccaagcttacgtacgcgtgcatgcgacgtcatagctcttctatagtgtcacctaaattcaattcactggccgtcgttttacaacgtcgtgactgggaaaaccctggcgttacccaacttaatcgccttgcacacatccccctttcgccagctggcgtaatagcnaanaaggcccg

SEQ ID NO: 1857 - DNA, 722 bp, Homo sapiens
  misc_feature (665)..(665): n equals a,t,g, or c
  misc_feature (719)..(719): n equals a,t,g, or c
ggaacaaacaaaaaaatctctctaacgttttattctgccttatcctcaattggagaaagggatgaaggctgccacgtattagctgtgatttcttaacttctctacctttaatttcctcatctatgagatgatgttgaacctgtctacatcataagtagttaaggatgaaatgaatgggtatatgaacattgtgttggggacgtagtagatactcagcaaatgtgtcttcccagtgatgtcacatttcctctacttctgcttggtatgtgtctcgttcccctgagcccagctcatgtcactgtgacgtgagagggcaggtgaagtgttagttgttcccactccatcatgccctttcacagttgttagtctgatgctaaagacttaagatttatttcttcattgttgttgttgttgtttttgtagagatcaggggttcgagaccagcctggccaacatggtgaaaccctgtctctactaaaactacaaaaattggccaggcgtggtggtaggcgcctgtgatcctagctacttgggaggctgaggcaggagaatggcttgaacctgagaggtggaggttgcagtgagctgagatgacgccactgtgctccagcctgggcgacagagcgagaccctgtctcaaagaaaaaaaaaaaaaaaagggcggncgcyctagaggatccaagcttacgtacgctgcatgcgamgtcawagccctccanaag

SEQ ID NO: 1858 - DNA, 858 bp, Homo sapiens
ccacgcgtccgaaaaaagggttatgtaaggaaagacaagagtatgtttaagacggtttctaccattttgcttagggcagtccctataatcttagaggcaacagtaagagagtgaaatattgcaggcagtgaattgggctaatttgccatcactccgatttcttcaaaactctcttaaagatgagttaatgttgctggcctaaaatagtctcatatatgggactcccttagaaatgatagtgatagtgttttatttaataaatctgctgtgatggtctaaggcaaacttgacttatggaattccagttagcactgttgatgataataattacagttggttttgcatctgtacagcactttacaattataaatactctttatggaagtagtttccttgggatgatatatatctggccattattctgttcaataggtgtgctatattatggcaaatgttgcaattatcattgtacatattggtatgtttatttgtatatagaatcatactcataccacagagtctaaagaagtagcagcagtgtggtgtagttagcaatcaagaacactggaccttaaataactgggtccaaatatcactttcaccatttattcactgtgagtcatgagaaaattgttttagttttgctgtctgtacaatggcatactactacctgtctcatacacacacacaggcacacacaaagttttactaattggttcatactaggaactctccaagtatcaattatccctgttacagaaacagtatgtatagagagacaatcatggagattccctgtccaaggattttcctgatagcttcctctggtccatatcaaaatgaaaaaaaaaaaaaaaa

SEQ ID NO: 1859 - DNA, 1206 bp, Homo sapiens
  misc_feature (38)..(38): n equals a,t,g, or c
gaaaccccatctctttaaaaaaaaaaaaaatccaaaanttagctgggcatggtggcatgcagtggtagtcccagctactcaggaggctgaggtgggaggatcactggaacccgggagcagagactgcagtgagctgagatcacactactgcattccagcctgagcaacagagcaagacacacacacacatcaatttattttagttgtataatgcttttctattagtaaagcatcagctaagcttcagtggcctgctccatcccctaatgactcccatgggctatcctaaaggaacttccagaacctttgttggtgtgttgacattgaccatgcagaccaatttgggcacaactggacattgattccttttacacaagagctgcctcccaaagatagataaattttcccagccctaaatatgaatcatggggcaagatattggtcgtattgatggtgaacctttcctactggattctttgcatgccacatagcaggattcattgcctttctctcatcatggatggcatgcagcagcacccaagtattcttcattctttgcagggaaaaaattgtgcatgggggctgaaatgtagtatgtgtagctcaattagtctctcctctgtgatgcaaaatggaatattcaatggcagatctgcccttctgagatgctgaccatccaaaacaccttgtttatggtgcaccatgattagctcacacacaatgccaaggctgtgcttctattatctgatacatagtttgacaatgggtaattctactcagaccctccctactgattggctaggatgcctgtcaggaactcattatgctactggttgtttggggatccccatagtggactactttcaggaatggcatgaattgtaaccaactgagtgctgcccccactgttacggaagtttataaaaccttagttccagaagacccaaaggagagtactggtttgtgtttggtgcttggcctagatccagccaccactctgaaactcatcacatcttcattgacagggagggagcccaggacatatgtgtggctcattgaccagaaggctttcttagtcccaacagccatgaaccatgcacttatggatacccagccttttagggctacgtgaaatgcatccttgtaacatcattgtattctttcaataaatagccttctgagttgaawaaaaaaaaaaaaaaaaaa

SEQ ID NO: 1860 - DNA, 2102 bp, Homo sapiens
ccacgcgtccgcagccttggaaaggaaagcagctgagatccagaggagtggaaggctcccccttgactaaagctaaatcactaaaccttggccatggtcacttcctcttttccaatctctgtggcagtttttgccctaataaccctgcaggttggtactcaggacagttttatagctgcagtgtatgaacatgctgtcattttgccaaataaaacagaaacaccagtttctcaggaggatgccttgaatctcatgaacgagaatatagacattctggagacagcgatcaagcaggcagctgagcagggtgctcgaatcattgtgactccagaagatgcactttatggatggaaatttaccagggaaactgttttcccttatctggaggatatcccagaccctcaggtgaactggattccgtgtcaagacccccacagatttggtcacacaccagtacaagcaagactcagctgcctggccaaggacaactctatctatgtcttggcaaatttgggggacaaaaagccatgtaattcccgtgactccacgtgtcctcctaatggctactttcaatacaataccaatgtggtgtataatacagaaggaaaactcgtggcacgttaccataagtaccacctgtactctgagcctcagtttaatgtccctgaaaagccggagttggtgactttcaacaccgcatttggaaggtttggcattttcacgtgctttgatatattcttctatgatcctggtgttaccctggtgaaagatttccatgtggacaccatactgtttcccacagcttggatgaacgttttgccccttttgacagctattgaattccattcagcttgggcaatgggaatgggagttaatcttcttgtggccaacacacatcatgtcagcctaaatatgacaggaagtggcatttatgcaccaaatggtcccaaagtgtatcattatgacatgaagacagagttgggaaaacttctcctttcagaggtggattcacatcccctatcctcgcttgcctacccaacagctgttaattggaatgcctacgccaccaccatcaaaccatttccagtacagaaaaacactttcaggggatttatttccagggatgggttcaacttcacagaactttttgaaaatgcaggaaaccttacagtctgtcaaaaggagctttgctgtcatttaagctacagaatgttacaaaaagaagagaatgaagtatacgttctaggagcttttacaggattacatggccgaaggagaagagagtactggcaggtctgcacaatgctgaagtgcaaaactactaatttgacaacttgtggacggccagtagaaactgcttctacaagatttgaaatgttctccctcagtggcacatttggaacagagtatgtttttcctgaagtgctacttaccgaaattcatctgtcacctggaaaatttgaggtgctgaaagatgggcgtttggtaaacaagaatggatcatctgggcctatactaacagtgtcactctttgggaggtggtacacaaaggactcactttacagctcatgtgggaccagcaattcagcaataacttacctgctaatattcatattattaatgatcatagctttgcaaaatattgtaatgttatagggcgtctctttatcactcagcttctgcatcatatgcttggctgaatgtgtttatcggcttcccaagtttactaagaaactttgaagggctatttcagtagtatagaccagtgagtcctaaatattttttctcatcaataattattttttaagtattatgataatgttgtccatttttttggctactctgaaatgttgcagtgtggaacaatggaaagagcctgggtgtttgggtcagataaatgaagatcaaactccagctccagcctcatttgcttgagactttgtgtgtatgggggacttgtatgtatgggagtgaggagtttcagggccattgcaaacatagctgtgcccttgaagagaatagtaatgatgggaatttagaggtttgtgactgaattccctttgacattaaagactatttgaattcaaaaaaaaaaaaaaaaa

SEQ ID NO: 1861 - DNA, 1289 bp, Homo sapiens
  misc_feature (1254)..(1254): n equals a,t,g, or c
  misc_feature (1285)..(1285): n equals a,t,g, or c
ggaattcccgggtcgacccacgcgtccggggagctcagccgagggctgcacaaagaccttcctggcctgccccagacagagctgaggacccctggccgtgggcttgggcctcggcttcacaggatggggctgccagtgtcctgggcccctcctgccctctgggttctagggtgctgcgccctgctcctctcgctgtgggcgctgtgcacagcctgccgcaggccgaggacgctgtagcccccaggaagagggcgcggaggcagcgggcgaggctgcagggcagtgcgacggcggcggaagcgtccctactgaggcggacccacctctgctccctcagcaagtcggacaccagactgcacgagctgcaccggggcccgcgcacagcagggccctgcggcctgccagcatggatctcctgcgcccacactggctggaggtgtccagggacatcaccggaccgcaggcagcccccctctgccttcccacaccaggagctgccccgggctctgccggcagctgcagccaccgcagggtgcgctggcctcgaggccacctattccaacgtggggctggcggcccttcccggggtcagcctggcggccagccctgtggtggccgagtatgcccgcgtccagaagcgcaaagggacccatcgcagtccccaagagccacagcaggggaagactgaggtgaccccggccgctcaggtggacgtcctgtactccagggtctgcaagcctaaaaggagggacccaggacccaccacagacccgctggaccccaagggccagggagcgattctggccctggcgggtgacctggcctaccagaccctcccgctcagggccctggatgtggacagcggccccctggaaaacgtgtatgagagcatccgggagctgggggaccctgctggcaggagcagcacgtgcggggctgggacgccccctgcttccagctgccccagcctagggaggggctggagacccctccctgcctccctgccctgaacactcaaggacctgtgctccttcctccagagtgaggcccgtcccccgccccgccccgcctcacagctgacagcgccagtcccaggtccccgggccgccagcccgtgaggtccgtgaggtcctggccgctctgacagccgcggcctccccgggctccagagaaggcccgcgtctaaataaagcgccagcgcaggatgaaaaaaaaaaaaaaaaaaaaaaaagggcggccctctagaggatccangcttacgtacgcgtgcatgcgacgtcatagntctt

SEQ ID NO: 1862 - DNA, 868 bp, Homo sapiens
gggtttatcaaaaaatgtcatgaatgtttctatatttcttgttggtttatttctcattattgagttatatattgctggaagtttaacaacttctcttgaattccaacaggaagcatttgctaggtaggcatttggtacctaatggataatctttcatgatggataaatctgccacatcagtctctcttgactttgaaaattaaaatctgggcactttgggaatttctgctgtcttaattggctggcctgtcctgtgaacagccgtcttctctaaatggtataataactgcatttcagcgctgtctcattgtgagtctttttgaaagcttttaaaatgatgttgtgtgatccaaatttaaattaatagttaagcagtgtgttctaccaccaatgcaaataactcaactgaatgacaattggatcctgcttcactcagtttgcgcataaatggttgaggaaaactacatcataggtgacccccgttggtggtagccaaatttcatagtctactgtgtgaaccatcatgatttcagaagcactaaaatatagaaacatacattcttggccaggcacagtggcccatgcctgtaattccaacactttgggaggccgaggtgggcagatcacttgaggccaagagtttgagactagcctgtccaacatggtgaaaccccatctctactaaaaatacmaaaattacccaggtttgggggtgcatgcctgtaatccgagctacttaggaggctgaggcatgagaattgcttgaacgccggaggcagaggttacagtgagccgagatcgcaccactgcactccagcctgggtgacagagccaccctgtctcaaaaaaaaaaaaaaagggcggccgc

SEQ ID NO: 1863 - DNA, 2929 bp, Homo sapiens
ggaaagctgttacgcctgcaggtaccggtccggaattcccgggtcgacccacgcgyccgcccrcgcgkccggtcgcgaagcgcgcctgcgacccggcgtccgggcgcgctggagaggacgcgaggagccatgaggcgccagctgcgaaggtggcggcgctgctgctcgggctgctcttggagtgcacagaagccaaaaagcattgctggtatttcgaaggactctatccaacctattatatatgccgctcctacgaggactgctgtggctccaggtgctgtgtgcgggccctctccatacagaggctgtggtacttctggttccttctgatgatgggcgtgcttttctgctgcggagccggcttcttcatccggaggcgcatgtaccccccgccgctgatcgaggagccagccttcaatgtgtcctacaccaggcagcccccaaatcccggcccaggagcccagcagccggggccgccctattacaccgacccaggaggaccggggatgaaccctgtcgggaattccatggcaatggctttccaggtcccacccaactcaccccaggggagtgtggcctgcccgccccctccagcctactgcaacacgcctccgcccccgtacgaacaggtagtgaaggccaagtagtggggtgcccacgtgcaagaggagagacaggagagggcctttccctggcctttctgtcttcgttgatgttcacttccaggaacggtctcgtgggctgctaagggcagttcctctgatatcctcacagcaagcacagctctctttcaggctttccatggagtacaatatatgaactcacactttgtctcctctgttgcttctgtttctgacgcatctgtgctctcacatggtagtgtggtgacagtccccgagggctgacgtccttacggtggcgtgaccagatctacaggagagagactgagaggaagaaggcagtgctggaggtgcaggtggcatgtagaggggccaggccgagcatcccaggcaagcatccttctgcccgggtattaataggaagccccatgccgggcggctcagccgatgaagcagcagccgactgagctgagcccagcaggtcatctgctccagcctgtcctctcgtcagccttcctcttccagaagctgttggagagacattcaggagagagcaagccccttgtcatgtttctgtctctgttcatatcctaaagatagacttctcctgcaccgccaggraagggtagcacgtgcagctctcaccgcagatggggcctagaatcaggcttgcttggaggcctgacagtgatctgacatccactaagcaaatttatttaaattcatgggaaatcacttcctgccccaaactgagacattgcattttgtgagctcttggtctgatttggagaaaggactgttacccatttttttggtgtgtttatggaagtgcatgtagagcgtcctgccctttgaaatcagactgggtgtgtgtcttccctggacatcactgcctctccagggcattctcaggcccgggggtctccttccctcaggcagctccagtggtgggttctgaagggtgctttcaaaacggggcacatctggctgggaagtcacatggactcttccagggagagagaccagctgaggcgtctctctctgaggttgtgttgggtctaagcgggtgtgtgctgggctccaaggaggaggagcttgctgggaaaagacaggagaagtactgactcaactgcactgaccatgttgtcataattagaataaagaagaagtggtcggaaatgcacattcctggataggaatcacagctcaccccaggatctcacaggtagtctcctgagtagttgacggctagcggggagctagttccgccgcatagttatagtgttgatgtgtgaacgctgacctgtcctgtgtgctaagagctatgcagcttagctgaggcgcctagattactagatgtgctgtatcacggggaatgaggtgggggtgcttattttttaatgaactaatcagagcctcttgagaaattgttactcattgaactggagcatcaagacatctcatggaagtggatacggagtgatttggtgtccatgcttttcactctgaggacatttaatcggagaacctcctggggaattttgtgggagacacttgggaacaaaacagacaccctgggaatgcagttgcaagcacagatgctgccaccagtgtctctgaccaccctggtgtgactgctgactgccagcgtggtacctcccatgctgcaggcctccatctaaatgagacaacaaagcacaatgttcactgtttacaaccaagacaactgcgtgggtccaaacactcctcttcctccaggtcatttgttttgcatttttaatgtctttattttttgtaatgaaaaagcacactaagctgcccctggaatcgggtgcagctgaataggcacccaaaagtccgtgactaaatttcgtttgtctttttgatagcaaattatgttaagagacagtgatggctagggctcaacaattttgtattcccatgtttgtgtgagacagagtttgttttcccttgaacttggttagaattgtgctactgtgaacgctgatcctgcatatggaagtcccrcttcggtgacatttcctggccattcttgtttccattgtgtggatggtgggttgtgcccacttcctggagtgagacagctcctggtgtgtagaattcccggagcgtccgtggttcagagtaaacttgaagcagatctgtgcatgcttttcctctgcaacaattggctcgtttctcttttttgttctcttttgataggatcctgtttcctatgtgtgcaaaataaaaataaatttgggcaaaaaaaaaaaaaaaaaaaaaaaaaaaaaaaaaaaaaaaaaaag

SEQ ID NO: 1864 - DNA, 1141 bp, Homo sapiens
cttcagggcaacaggctgggatccaggcaaggtgcctgcactcagaggggcttcagtgctgagggcggcctgctgtccgtccctgcggcagactgggccctgtcccaccttcccgtcactcctcgatgtcacatcagagtgctctctcctgggtgggaacccgcgcacggaggaaacactttaccagagtaaacgagattataacttgtttgccagagaacctctcctgtggccatgcctgaacctctcctgggactgtccgtggtcttcacattggtgcttggacacccgtccttcgggaggggaggaaaagcggccggtaaaatggagacagtcggtggcgtgtgtttgccgattggactggcattggtatagacagataccaatcactgcacagacatttccaggggcccttccccagccatgtttagtggcactgacctcaggcagctgggcccccgggacagcaaccaggggactgccctggccctggatggcagccgggaccggctcacaagcttctgtttggagcagttctgttggcagccccccgcctccagtggagatgtgacacgactctttcttgcctgccaaacgttctctgattctttggatcatcgatcctaacacagcaaaggcggtattgttgctgtcctttcaaggttaatccaggatcagaaaagtctaatcatttctctgtggtttttggaatttccaaagagcacccagattttaaccctcagtcctcggggttgtccggctgcggctgtgctgctgttgagcattaagctcattccacttcacatgtaaacttgtttctatgcattcacctcctgggagactccacattcctgagagaactgcatggttatgaactcttactcgtgtgcactaaagtgcacgtgctgtgtgtgtactgaccctctgccctgtgggagccacgtgctgtggggagaacagaccagcagcagatgggactcctcctccaggaacctgctaccagctaggcgtggtggtgcaagcctatacttctggcactttgggaggctgtggcaggaggatcacttgaggccaggaatttgaggccagcctgggcaacatagtgagaccacgtctctttttgaaaaaaaaaaaaaaaaaa

SEQ ID NO: 1865 - DNA, 1285 bp, Homo sapiens
aattaaccctcactaaagggaacaaaagctggagctccaccgcggtggcggccgctctagaactagtggatcccccgggctgcaggttttaatgtttcgaagatggttgtaaagaggaaaattttagtatctcaaatgctttaaagtgagtggaattttgactgtacagttccttctagcagaaatcagtaaaccttgtaagatgcttcaacaaaaaatggggttgattccttggcacttcacagacatcctcacctttctgttccctcagaatcgggttcctgtgaggctgggtagtgggaggcagggatggaggtagcaggatggcgtgggtgggattagcaagtctcggagtctgttgtcccatctcaagggttccataaaaatcacctttttggtcctatattgggaacttgtgtggttctcagcttctgaccagaagctcctaggaagaactggctggtcacgactccttaagcttcatccttgatactggttgtgtcatctcagacccacgggttagtatggtagcttcactgggcttttggggctgggtctgactttgcatctgattgctctgggcctgtcattagcatccctgtaaggagagggaacggagtcagttcagggatattcttgccagaaaatctggggtcgaaatctccttccacttttcctcccagcagattggactcattggcgctctcatgttgaatttcaaactttaagatgagttggtcactggaaaggagtttgctgggattacaggcgtgagccactgcgcccggccacattcagttcttatcaaagaaataacccagacttaatcttgaatgatacgattatgcccaatattaagtaaaaaatataagaaaaggttatcttaaatagatcttaggcaaaataccagctgatgaaggcatcttaggcaaaataccagctgatgaaggcatctgatgccttcatctgttcagtcatctccaaaaacagtaaaaataaccactttttgttgggcaatatgaaatttttaaaggagtagaataccaaatgatagaaacagactgcctgaattgagaattttgattttttaaagtgtgtttctttctaaattgctgttccttaatttgattaatttaattcatgtattatgattaaatctgaggcagatgagcttacaagtattgaaataattactaattaatcacaaatgtgaagttatgcatgatgtaaaaaatacaaacattctaattaaaggctttgcaacacaaaaaaaaaaaaaaaaaaa

SEQ ID NO: 1866 - DNA, 1796 bp, Homo sapiens
ggcacgagaggtggccatcactgagcaggatttggaacttattaaagaaagagaaacggcaattcggcagctggaggctgacattttggatgtcaatcagatatttaaagatttggccatgatgatccatgaccagggtgatctgattgatagcatagaagccaatgtggaaagctcagaggtgcacgtcgaaagagccactgaacagttacagcgagctgcttactatcagaaaaaatctcgcaagaagatgtgtatcctggtgcttgtcctgtcagtgattattctaatcttgggacttattatctggctagtttataaaacgaatgattgcctccgatcgttctcccgctgagctgttttcaagggcaagtgcttgttgaagtcttgccagaacaaactgatcacaagaagacagcatatatcagaacgtcctgtaatcatttagttagaaactaactactaactagtctttggaattcgtgacctatggagacagtaattatcaatttattgattctattgatttctcaaattaggaattaacttatgtggattttgcttcctcttgtattctgattgcccttcatcccaagtgtttactgaaaattccattctagatattcttgttttgacaaatgacactacagtctcgtaatattgtcttttatgtatatacaaaatttacctttttactagcatctgaagatagagttactttctggtacccagtatattggagtctgtcagaaactctataataggccaccagtttttattatttaacatttttatttgaatttctagaagcctattctctatctattttgaaagattttggcactatatttaattggaaggtaaaatattgtacatgtgatccagagtaaatgagaagtctctatctgagctggtcagttactggagtacatgttactaatctgggtttaaagtttacttcattatctgctagtgtcatccacagcagttcatcctcatccacactaagccatcctgttagcttttaaaggaagttaatttaattaacattaatatactctatgggctccctctcccacctgtctgcatagaaaggcagaattagacatagcatgctttggaaaagcaaataggaattgttgggaatgatttaatcttgttgttgttgttgttgttgttcacttgtggttctacattcctggtgaatgatgaatgttgctgtcaaagggctgccccctaccttataagggttgctgggcatttgaaggcaggaagatttttaaagatagattgaggttggtttaaaattattcctgtaaaccaacaataaagcaaagaagaggttcatttttgtaaataacactggtttcaaatagtgatgttagacttaacctaatttataaacaagagattaatatctccatgcatagttttagacaaaaaaagatgtttcaataaaattactgtcttgtaatataaatgttgtccacttcccttttccacaggcctagaacagttaaagggaacataatttgtttaggctcccacataaatgtgaatctggccaacaactttggttcatcctttagtgaattagaggatttggctaccctgagtatatttatattcatttcttctgttctccttctgttattatacttaatcttctaaactaaactaatgtgaacagtagggaagcaagggcccaaatgcataagtttctttgcactgttgcacttacttaatacaaataaatgttttttaaagctttaaaaaaaaaaaaaaaaaaaaaaaaa

SEQ ID NO: 1867 - DNA, 770 bp, Homo sapiens
  misc_feature (745)..(745): n equals a,t,g, or c
  misc_feature (761)..(761): n equals a,t,g, or c
  misc_feature (770)..(770): n equals a,t,g, or c
ggcacgaggcttgacactcatagtcccatggagtcagggatggacaagacagagggaccagagataaaggaacccaggcggaggttgcagtgagctgagatcatgccactgcactccagcctgggcaacaagagcaaaacttgatagctttgcatagggaaagagggcattgatgctggggttttgaaaggtgagtaggagtccatcaggcaaaaaaagtatgtattaattcgaagtattaaacatccctagccacccccattgggaaagatgtgccactgatttgcgaggcgggaggcgggggccagacttgggaatatgtgcagccctttctgggctggaaccagggtgcatgggttggggtagctgctgggaatatgcccccctgtcttgctttgtgcagaaacccttggaagatcagacccagctccttacccttgtctgccagttgtaccagggcaagaagccggatgtctgcccttcctcaaccagctccctcaggagtgtttgcttcaagtgatggccggtgagctgcggagagctcatggaaggcgagtgggaacccggctgcctgcctttttttctgatccagaccctcggcacctgctacttaccaactggaaaattttatgcatcccatgaagcccagatacacaaaattccaccccatgatcaagaatcctgctccactaagaatggtgctaaagtaaaactagtttaataaraaaaaaaaaaaaaaaaaacncgggggggggcccggnacccaattn

SEQ ID NO: 1868 - DNA, 1444 bp, Homo sapiens
gaattcggcacgaggaagaatctgagagaaacctgacgcagggagcatgggtatctggacctcaggcactgatatcttcctaagtctttgggagatttacgtgtctccaagaagccccggatggatggactttatccagcatttgggagtttgctgtttggttgctcttatttcagtgggcctcctgtctgtggccgcctgctggtttctgccatcaatcatagcggccgctgcctcctggattatcacgtgtgttctgctgtgttgctccaagcatgcacgatgttttattcttcttgtctttctctcttgtggcctgcgtgaaggcaggaatgctttgattgcagctggcacagggatcgtcatcttgggacacgtagaaaatatttttcacaactttaaaggtctcctagatggtatgacttgcaacctaagggcaaagagcttttccatacattttccacttttgaaaaaatatattgaggcaattcagtggatttatggccttgccactccactaagtgtatttgatgaccttgtttcttggaaccagaccctggcagtctctcttttcagtcccagccatgtcctggaggcacagctaaatgacagcaaaggggaagtcctgagcgtcttgtaccagatggcaacaaccacagaggtgttgtcctccctgggtcagaagctacttgcctttgcagggctttcgctcgtcctgcttggcactggcctcttcatgaagcgatttttgggcccttgtggttggaagtatgaaaacatctacatcaccagacaatttgttcagtttgatgaaagggagagacatcaacagaggccctgtgtgctcccgctgaataaggaggaaaggaggaaattcatttctggcttccagtcctgaaaatgattaggaagaagcaaatggacatggcaagtgcagacaagtcatgagagaccccgactactcctcagccacatcgcaccaacaattctcttcaggtctaggatggcagtcactattcatgccggataatagagaactatgtgacgcagtcctctcaggagtctgagtttacagagccaacttgcagcacctggttatgcctcctttcatctcaaagccaaagagctgccaggtaaatggttatgtggtctatgttccaaacaaaccacatgatcttgcctgtgtcacaatgtaacaagactctagctgggtcccctggtgatgagtttcagcatagaataatgttcaaggaaaagaaaacgaaaacagtttaaatctctaccacagcctcacaagcaaatgctaaggggaacatacatgtaaaaagccagcaaactatcttcaaactcttccgtccttaatgtcttccatggctattgcccccacaatggtctcttttctccctgctcccttattaaagaactctttctgaaaaaaaaaaaa

SEQ ID NO: 1869 - DNA, 1892 bp, Homo sapiens
attcggcacgaggaaacctgctgctttcacagaggaaggcatttgctggctttcccaaggcaagaacaatgaaaacaaagtcatgaggagttctctctacctcaaatgaaggccgcagctcctgctcaagctattttggcagtctgagagaacagtacattctgaaccacattgacgcagggagcatgggtatctggacctcaggcactgatatcttcctaagtctttgggagatttacgtgtctccaagaagccccggatggatggactttatccagcatttgggagtttgctgtttggttgctcttatttcagtgggcctcctgtctgtggccgcctgctggtttctgccatcaatcatagcggccgctgcctcctggattatcacgtgtgttctgctgtgttgctccaagcatgcacgatgttttattcttcttgtctttctctcttgtggcctgcgtgaaggcaggaatgctttgattgcagctggcacagggatcgtcatcttgggacacgtagaaaatatttttcacaactttaaaggtctcctagatggtatgacttgcaacctaagggcaaagagcttttccatacattttccacttttgaaaaaatatattgaggcaattcagtggatttatggccttgccactccactaagtgtatttgatgaccttgtttcttggaaccagaccctggcagtctctcttttcagtcccagccatgtcctggaggcacagctaaatgacagcaaaggggaagtcctgagcgtcttgtaccagatggcaacaaccacagaggtgttgtcctccctgggtcagaagctacttgcctttgcagggctttcgctcgtcctgcttggcactggcctcttcatgaagcgatttttgggcccttgtggttggaagtatgaaaacatctacatcaccagacaatttgttcagtttgatgaaagggagagacatcaacagaggccctgtatgctcccgctgaataaggaggaaaggaggaaaaacaaggaactcaagatattatccatgattcttcctttaatatatctgtgtttgaacccaactgtatcccaaaaccaaaattccttctatctgagacctgggttcctctcagtgttattcttttgatattagtgatgctgggactgttgtcctctatccttatgcaacttaaaatcctggtgtcagcatctttctaccccagcgtggagaggaagcgcatccaatatctgcatgcaaagctgcttaaaaaaagatcaaagcagccgctgggagaagtcaaaagacggctgagtctctatcttacaaagattcatttctggcttccagtcctgaaaatgattaggaagaagcaaatggacatggcaagtgcagacaagtcatgagagaccccgactactcctcagccacatcgcaccaacaattctcttcaggtctaggatggcagtcactattcatgccggataatagagaactatgtgacgcagtcctctcaggagtctgagtttacagagccaacttgcagcacctggttatgcctcctttcatctcaaagccaaagagctgccaggtaaatggttatgtggtctatgttccaaacaaaccacatgatcttgcctgtgtcacaatgtaacaagactctagctgggtcccctggtgatgagtttcagcatagaataatgttcaaggaaaagaaaacgaaaacagtttaaatctctaccacagcctcacaagcaaatgctaaggggaacatacatgtaaaaagccagcaaactatcttcaaactcttccgtccttaatgtcttccatggctattgcccccacaatggtctcttttctccctgctcccttattaaagaactctttctgaaaaaaaaaaaa

SEQ ID NO: 1870 - DNA, 2509 bp, Homo sapiens
  misc_feature (617)..(617): n equals a,t,g, or c
ggcacgagcattttcactgtatatcatggtatcttaatgatgtatataattgccttcaatccccttctcaccccaccctctacagcttcccccacagcaataggggcttgattatttcagttgagtaaagcatggtgctaatggaccagggtcacagtttcaaaacttgaacaatccagttagcatcacagagaaagaaattctcctgcatttgctcattgcaccagtaactccagctagtaattttgctaggtagctgcagttagccctgcaaggaaagaagaggtcagttagcacaaaccctttaccatgactggaaaactcagtatcacgtatttaaacatttttttttcttttagccatgtagaaactctaaattaagccaatattctcatttgagaatgaggatgtctcagctgagaaacgttttaaattctctttattcataatgttctttgaagggtttaaaacaagatgttgataaatctaagctgatgagtttgctcaaaacaggaagttgaaattgttgagacaggaatggaaaatataattaattgatacctatgaggatttggaggcttggcattttaatttgcagataataccctggtaattcncatgaaaaatagacttggataacttttgataaaagactaattccaaaatggccactttgttcctgtctttaatatctaaatacttactgaggtcctccatcttctatattatgaattttcatttattaagcaaatgtcatattaccttgaaattcagaagagaagaaacatatactgtgtccagagtataatgaacctgcagagttgtgcttcttactgctaattctgggagctttcacagtactgtcatcatttgtaaatggaaattctgcttttctgtttctgctccttctggagcagtgctactctgtaattttcctgaggcttatcacctcagtcatttcttttttaaatgtctgtgactggcagtgattctttttcttaaaaatctattaaatttgatgtcaaattagggagaaagatagttactcatcttgggctcttgtgccaatagcccttgtatgtatgtacttagagttttccaagtatgttctaagcacagaagtttctaaatggggccaaaattcagacttgagtatgttctttgaataccttaagaagttacaattagccgggcatggtggcccgtgcctgtagtcccagctacttgagaggctgaggcaggagaatcacttcaacccaggaggtggaggttacagtgagcagagatcgtgccactgcactccagcctgggtgacaagagagacttgtctccaaaaaaaaagttacacctagggtgtgaattttggcacaaaggagtgacaaacttatagttaaaagctgaataacttcagtgtggtataaaacgtggtttttaggctatgtttgtgattgctgaaaagaattctagtttacctcaaaatccttctctttccccaaattaagtgcctggccagctgtcataaattacatattccttttggtttttttaaaggttacatgttcaagagtgaaaataagatgttctgtctgaaggctaccatgccggatctgtaaatgaacctgttaaatgctgtatttgctccaacggcttactatagaatgttacttaatacaatatcatacttattacaatttttactataggagtgtaataggtaaaattaatctctattttagtgggcccatgtttagtctttcaccatcctttaaacttgctgtgaatttttttgtcatgacttgaaagcaaggatagagaaacactttagagatatgtggggttttttaccattccagagcttgtgagcataatcatatttgctttatatttatagtcatgaactcctaagttggcagctacaaccaagaaccaaaaaatggtgcgttctgcttcttgtaattcatctctgctaataaattataagaagcaaggaaaattagggaaaatattttatttggatggtttctataaacaagggactataattcttgtacattatttttcatctttgctgtttctttgagcagtctaatgtgccacacaattatctaaggtatttgttttctataagaattgttttaaaagtattcttgttaccagagtagttgtattatatttcaaaacgtaagatgatttttaaaagcctgagtactgacctaagatggaattgtatgaactaatgatctggagggaggggaggatgtccgtggaagttgtaagacttttatttttttgtgccatcaaatataggtaaaaataattgtgcaattctgctgtttaaacaggaactattggcctccttggccctaaatggaagggccgatattttaagttgattattttattgtaaattaatccaacctagttctttttaatttggttgaatgttttttcttgttaaatgatgtttaaaaaataaaaactggaagttcaaaaaaaaaaaaaaaaaaaa

SEQ ID NO: 1871 - DNA, 2101 bp, Homo sapiens
  misc_feature (247)..(247): n equals a,t,g, or c
  misc_feature (2007)..(2007): n equals a,t,g, or c
  misc_feature (2024)..(2024): n equals a,t,g, or c
tcgacccacgcgtccgcccacgcgtccgggacgccggcggagacgcgggcgagtggttagcaggaagaagatgagccttaagtctgaacgccgaggaattcatgtggatcaatcggatctcctgtgcaagaaaggatgtggttactacggcaaccctgcctggcagggtttctgctccaagtgctggagggaagagtaccacaaagccaggcagaagcagattcaggaggactgggagctggcggancgactccagcgggaggaagaagaggcctttgccagcagtcagagcagccaaggggcccaatccctcacattctccaagtttgaagaaaagaaaaccaacgagaagacccgcaaggttaccacagtgaagaaattcttcagtgcatcttccagggtcggatcaaagaaggaaattcaggaagcaaaagctcccagtccttccataaaccggcaaaccagcattgaaacggatagagtgtctaaggagtkcakagaatttctcaagaccttccacaagacaggccaagaaatctataaacagaccaagctgtttttggaaggaatgcattacaaaagggatctaagcattgaagaacagtcagagtgtgctcaggatttctaccacaatgtggccgaaaggatgcaaactcgtgggaaagtgcctccagaaagagtcgagaagataatggatcagattgaaaagtacatcatgactcgtctctataaatatgtattctgtccagaaactactgatgatgagaagaaagatcttgccattcaaaagagaatcagagccctgcgctgggttacgcctcagatgctgtgtgtccctgttaatgaagacatcccagaagtgtctgatatggtggtgaaggcgatcacagatatcattgaaatggattccaagcgtgtgcctcgagacaagctggcctgcatcaccaagtgcagcaagcacatcttcaatgccatcaagatcaccaagaatgagccggcgtcagcggatgacttcctccccaccctcatctacattgttttgaagggcaaccccccacgccttcagtctaatatccagtatatcacgcgcttctgcaatccaagccgactgatgactggagaggatggctactatttcaccaatctgtgctgtgctgtggctttcattgagaagctagacgcccagtctttgaatctaagtcaggaggattttgatcgctacatgtctggccagacctctcccaggaagcaagaagctgagagttggtctcctgatgcttgcttaggcgtcaagcaaatgtataagaacttggatctcttgtctcagttgaatgaacgacaagaaaggatcatgaatgaagccaagaaactggaaaaagacctcatagattggacagatggaattgcaagagaagttcaagacatcgttgagaaatacccactggaaattaagcctccgaatcaaccgttagcagctattgactctgaaaacgttgaaaatgataaacttcctccaccactgcaacctcaagtttatgcaggatgatcacaatttagtggagagtatttatttgagcctaaattgtaggtagcccttactacactcaactgattgggatctagaatgtaactaaattgcttataaatgtcagagcattttttaaaggtacagtatatggggattgtttcgtttttcctagcaggggaaccttagttaataataaaatactacttatttgagttactgatacagattcatttaaggcttgtgtgcaaattttgtctcaatcttttttccctccatgattttcctatgtgcttcctctggcattcactgtggttttggtaaataattgccttttaaaggattaaacaaatgaatgctacaaagtgtatgttcaagaaaattaaatggtaccactcttccacagtttggaataattttataattgtaaagatagaaattatattgatargtaaatatgtaaaattgtaaatatgtaaaanaaagaatggtgtctgcngtgcatggcattttatatgttaattttttagtttaaaatgaagtatattgaatgttttgcctttagcacccattttt

SEQ ID NO: 1872 - DNA, 1322 bp, Homo sapiens
cgggcaaaggcgccctggaccctggcgaaggacgcttgccgccgagcggactgattcgcagagtctgtacatagtgtatattgctctacccggycgcacaccacgtcctgctctggcttttgccttcttgatgccagcctgctgcaacagaccctccccgcgcccctccccagcccatcttactgcaagcagcgtcctgaggagacagcggcacgttctagctgcgtctgcggccagcccgtgccagtggagtgggctccgcgttgctcattctctccgacaggttgtcagcctctgtccccgctgcacagggtcttgccccttctccggggcctgtgccagctcccttccctccccgttstcctgtccccacagccattctgggagctggggaacctggtctcaaggcaggccctgcagttccacagaggtggcaggtcttgccctttggccaacagatttcttgtcctgccttctagatgcctctgagctccaaacccagggcagccatggcttctcatttacaccaacaggtttcagttccaacagaaaggtcggggtaggttcgtgcagagatggggctggcaggggggctatgggaggattattttaacagatcaagaaaatgaagccaaatcaagtgaattaaattcctcacaattattttctttccctgaggtttgattggcacagcagcaaaagttgaggccaccccacttgtgtccactgtttttagaaaaaaatgaatggcttcctgccattgtggggctggactcttgggctttcttggtgggagcggagaaggggcctcccacccttgtccgagttgcctcccactggaggtcaggagtctacactgcagcctcgggcactgtggggagtgcatgcctggggcctctgggtggggaccatggacaggccctggtcactgtcctaacctttgtcaggacaaaggtagcaagaggatttcctggcgggtgggaaggaatggctggggcggccagttttgacacgccccagtgccctggagaacaaccagggtcatctgcacttgatgactgctccccgacccccagcccggacacctcattcccctcccactacagggatcaagtgacctgggaagaaccgagttyaacaccaggatgtgtttccttagatttcctttcctaggcgatttccagggagagccctgattggacaatcacatcacagatcacactgcagtttccatgttagcactgtggatgggtttttaatcaataaaaactgggggtttcttctcaaaaaaaaaaaaaaaaaaaaaaaaaaaaaaactcgag

SEQ ID NO: 1873 - DNA, 1111 bp, Homo sapiens
  misc_feature (115)..(115): n equals a,t,g, or c
  misc_feature (1095)..(1095): n equals a,t,g, or c
agcggcagtcgggtgggaagccgtgtctcgcagtcgtggactcgtgcagctggggcgtcygcakscgctcgtmacccgcgtratgctgtttctggcgttgggcagcccgtgggcngtcgaactgmctctctgcggaaggaggactgcattgtgtgcggccgccgcgctccgaggtccccgggcctctgtctcccgggcgtcctccagcagcgggccttcggggccggtagccggctggagtacggggccttcgggagccgcgcgccttctccggcgtccgggtcgagcgcagatccctgtttattgggaaggatatgttcgattcttaaatacgccatctgacaaatcagaagatggaaggctaatttatactggcaatatggcccgagcagtgtttggtgtgaaatgtttctcttattctacgagtctgattggccttacatttctgccatacatttttacacaaaataatgctatttctgaaagtgtgcctctgcctattcaaatcatattctatggcatcatgggaagctttacggtgatcaccccagtgctgcttcactttattacaaaaggctatgtcattcgattgtaccatgaggccacaacagacacttataaagccattacctacaatgctatgcttgcagaaacgagtacagtgtttcaccagaatgatgtgaagattccagatgctaaacatgtatttaccacattttatgctaaaacaaaatcactgttagttaatccagtgctctttccaaaccgtgaagactatatccatctaatgggttatgacaaagaagaatttattttgtatatggaagaarccagtgaagagaaacggcataaagatgasaaatgagcctatttgttagtgttcgtgctyaaatgtgatttacgttttaatgtataataataaaattgccttttgcattccgttagtgactgattgttaaaaataatttgaaattatcaaagcttttaatttccagagaatgatgtttgtttataataaaacaagctatgtttgaaaaccaaaatgtagtatctaccattcgtgttttagaaaggtatgtgaataaatatgttctntgaagatcggactggt

SEQ ID NO: 1874 - DNA, 1514 bp, Homo sapiens
gctgcaggaattcggcacgaggcagcatctgggctgatgggccgtaccctgcaccgtgagccacccgcaggagaccaggagggcacagcactgcacctgcagacaagcctgccagccctttctgaggcagatacccaggaactaacccagatcctgaggaggatgaaggggctggccctggaggccgagagtgagctggagagacaagacgaagccctggatggcgttgcagcagctgtggacagggcaaccttgaccatcgacaagcacaacaggcggatgaagaggctgacctaggggcagaacgtccctgcattcctgtctcaccctgcacatcccgctgagatggagggctgggcggcagtgccagggctgcagaggcctgtggccctccggagtggtcttcctctggatggggctgctactgtggggctgcttctgcaccaggggcctccccaggtgtgcaccatgcctgcctcccacttggctgtccctgctgctgggcaggacccggccacatgttctgcggatgctgcagaagtgtggaccatggcgggaccccaaggacacttggcacaggcctggaagaggccgccctcgtcttgtctcggctccctttcatggacagactggccttcttagctgtactataaatttgtgagtgaagttagagcccagctcacttagccagctcactttgagggcatcctataaacacccaactgttcttttatcgtctcggttttagccaaaagtgaaattagcatgactgcatctttcaaacaaaaatattgatttctgcttttagggccccgtttccatccagaaataaagggaaatgctggctaaaaaaaaaaaaaaaaaactcgaggtcgacggtatcgataagcttgatatcgaattcggcacgaggtgaaattgacctgcccgtgaagaggcgggcatgacacagcaagacgagaagaccctatggagctttaatttattaatgcaaacagtacctaacaaacccacaggtcctaaactaccaaacctgcattaaaaatttcggttggggcgacctcggagcagaacccaacctccgagcagtacatgctaagacttcaccagtcaaagcgaactactatactcaattgatccaataacttgaccaacggaacaagttaccctagggataacagcgcaatcctattctagagtccatatcaacaatagggtttacgacctcgatgttggatcaggacatcccgatggtgcagccgctattaaaggttcgtttgttcaacgattaaagtcctacgtgatctgagttcagaccggagtaatccaggtcggtttctatctacttcaaattcctccctgtacgaaaggacaagagaaataaggcctacttcacaaagcgccttcccccgtaaatgatatcatctcaacttagtattatacccacacccacccaagaacagggtttaaaaaaaaaaaaaaaaaaaaaaaaaaaaaaaaaaaaaaaaaaaaaa

SEQ ID NO: 1875 - DNA, 2799 bp, Homo sapiens
  misc_feature (2794)..(2794): n equals a,t,g, or c
  misc_feature (2799)..(2799): n equals a,t,g, or c
gcggctaactatggcgaccgccacggagcagtgggttctggtggagatggtacaggcgctttacgaggctcctgcttaccatcttattttggaagggattctgatcctctggataatcagacttcttttctctaagacttacaaattacaagaacgatctgatcttacagtcaaggaaaaagaagaactgattgaagagtggcaaccagaacctcttgttcctcctgtcccaaaagaccatcctgctctcaactacaacatcgtttcaggccctccaagccacaaaactgtggtgaatggaaaagaatgtataaacttcgcctcatttaattttcttggattgttggataaccctagggttaaggcagcagctttagcatctctaaagaagtatggcgtggggacttgtggacccagaggattttatggcacatttgatgttcatttggatttggaagaccgcctggcaaaatttatgaagacagaagaagccattatatactcatatgggatttgccaccatagccagtgctattcctgcttactctaaaagaggggacattgtttttgtagatagagctgcctgctttgctattcagaaaggattacaggcatcccgtagtgacattaagttatttaagcataatgacatggctgacctcgagcgactactaaaagaacaagagatcgaagatcaaaagaatcctcgcaaggctcgtgtaactcggcgtttcattgtagtagaaggattgtatatgaatactggaactatttgtcctcttccagaattggttaagttaaaatacaaatacaaagcaagaatcttcctggaggaaagcctttcatttggagtcctaggagagcatggccgaggagtcactgaacactatggaatcaatattgatgatattgatcttatcagtgccaacatggagaatgcacttgcttctattggaggtttctgctgtggcaggtcttttgtaattgaccatcagcgactttccggccagggatactgcttttcagcttcgttacctcccctgttagctgctgcagcaattgaggccctcaacatcatggaagagaatccaggtatttttgcagtgttgaaggaaaagtgcggacaaattcataaagctttacaaggcatttctggattaaaagtggtgggggagtccctttctccagcctttcacctacaactggaagagagcactgggtctcgcgagcaagatgtcagactgcttcaggaaattgtagatcaatgcatgaacagaagtattgcattaactcaggcgcgctacttggagaaagaagagaagtgtctccctcctcccagcattcgggttgtggtcacggtggaacaaacagaggaagaactggagagagctgcgtccaccatcaaggaggtagcccaggccgtcctgctctaggcagagtcccgggaccatggcctcctgccacacaacacgcagagaggactcaagactcccgctggccatggagtggcctgaaagagagcaagaacatgtggatctttgataggattgttaccaaatggtgtcagtatggaccaattgtgtgaccatgagaaggatgcttattttttttaaaaagaaaacacatctaaaagcccaggaactgatttttttaagaggaaaactaatgacagtgtataactgatgtttaaattgtgcatttagtactatttaaatgttttcttatactagtattttatattcttttgttgtcgtttaaaactggagcttcagtgtctcttccctccctctaatagtaatggttcagtaagcactccttaactccttagtatttcatagaaaaatgactgcaacattaaagctaagaggaacacttcarcatatgtggtacaaatttatattgaagatctaaataaaccacgtattttccagtcttcgttgtgtgaagctaaatggtggctaaaaggaacactttttgtgtgattattataaactttgcattgtatttgaatcttagaacttttgtacacactaaatattgatgtcacaccatttctaatctgagcatccttagccagagaatattcattatacttcctaagtgagcaataatttaaatcagaagctattttattttaatgtaattaacctttctttacatttcttatgtgttcacctctaatctgttttaggaagagagttggttattatgttgatcccataatataaatcatatcctttatattttagaatatctcaaatgtattccttttttgtatggtgggtttgcctagggacgtgtaactacaggcttttactaagccaaggaaaaagagaatttttcttttcatcttacaaattccagatatctacaaaagatgtgaaagcactaaaaataccatttttaagcagtactttacctgttttttctttagcaaaccaggttatgtggtgtaaaggtttgttatacgtgccacaatatagcatataaatattatgccatcattccttctcttgttaaaggtagaagaataaaattgtgatttttataacctgtgcttattactcaaatggtcttcaacatctttttaaacaacacatactttttgaatgttcagtttctattttgcttgaggtattttgtacatatgtgccttgtgattgctgctgctttaaaggataaagtactctttgggggatgagtctggtttgttttgttttattttttaatgaaataaacctatattcctgaaaaaaaaaaaaaaaaaaaaaaaaaaaaaaaaaaaaaaaaaaanggggn

SEQ ID NO: 1876 - DNA, 990 bp, Homo sapiens
accatgtttcatcatcctgtagctacatctggtcttccttgtgtgctgggggactgcagataggtcaggggtatcagcctcagccactcagacaaggaaagggggcaccacatgagctcagggacccccacccccatccctggcctgggtgatggtacagcgtctggccctgccaggtccttggcctgcacaaagtcagtgacagcaggtgaaatgcccagctgggtgcctgcctggagcgggtgtggggcagtgagcccctgtgggtgtgggcttgggagtggctgtgacaggtggtgagcagggcaggggcaatcagacagccctcagaaggcctcatggcccccggtgagctgcaggaagaggtcttcatccagctcctccccacgggcccgctcccgcgtcgacaggaaaatgtagcccccgatatactcgtgtacaattcggcagctggcagacacgcagctgaaggccacattgatgtgttcatcaaactcgatggccactgccggatgtcccagttgacattccactggcgcatgttgctgaaacgccaggtcttgaccacgtcgcccacggccaagtcgatgcggatcagtcggttgttggcgatgcccaggatctcgtctttcctgctgcccttgaacctgaccatgacataggagatgccgaagtcgggcagggactgccaggcctggatgaagcgcagctgggcctctgccagcgacaactgggccacattctggtgggcttccaggatccgtggggtgagctgcttggccttgaactttcgctggaaacggggggcaacaaggccgtaggggttgaggccctcggcagaggcatcagggccgtgggggtggttgcccgggcccccactgcccgtgcgctgcaggctgaggaaggccaggatggcctgcacctcgctggtgtagctgctgtcggccatggtgcggcctttggaggccaggcggcagccagcctcgtgcc

SEQ ID NO: 1877 - DNA, 1316 bp, Homo sapiens
ggcacgaggctcccacttataagggagaacatatgatatttggttgtccattactgagttacttcacttagaataatggtctccagctccatccaggttgctgcaaatgccattatttcattccttttatggctgagtaatattccatggtagaatgttacttttgtttatctacttgttggttgatgggcatttaggttggttccatattttcgcaattgcaaattgtgctgctataaacatgcatgtgcaagtgtccttttcaaataatgacttctttttattaacaccctgtagttaataacctgaattctttatagcttgcattctgaaacatttttctcgaactatccgccttctggcctgttccagtcattctggctttcatcttgatttgtttttcttaaaactttctccagcttccctctgcatctgtgattcgtgctctgcttcttgtttgtggctttggatcaataatgctacagatccagtctaattaatcatggatcaaaagctaaagcatccttcccccagatggtttattattaataccacccagaaaaataatttataatttaattctctacctcatagagtttgggatccttggtagaatgtgttcccttccccttttcttcttcgctatttcctcctcttcctctccatcaaaagtggctttatctccacctttgcagctgacagcaaccctcccatgctccgttgatgaagccctcctttcttaacccctcgtccatatggctctccctccaccctgctccatctcctgtgatctcaaggcctcggagaaatgatctcaaggcctcggagaaatgaaaagtgacctttggtatttgagacaaccaatagcaaaatatagctcccacttccaacagcccatattggtgggggagggatttgcttcatacgtggtctgtgttgggccattctccttctccatgttttctctgttcttacagcaccatctttttgcctcatttctttgctctactctattcctcccccatcatcgtctggtgactcacactgtaatcctagcactttcggaggatcacctaaagtcaggagtttgaggccagcctggccaacatggcaaaaccccgtctctactaaaaatacaaaaattagctgggcgtggtaatgggcgcctgtaatcccagctactcaggaggttggggtgggagaatcacgtgaacctgggaccgggaggctgcagtgagccaagatggtgccactgcactccagcctgggcaacagagcgagactccgtctcaaaaaacaaaaaaaaaaaaaaaaaa

SEQ ID NO: 1878 - DNA, 1146 bp, Homo sapiens
ggcacgagatcattttgatttctaacaatattggtgttggttattggaccttccttccatgaagcccagtgagctgcttctgacagaggtaccaagagactacaggggaactaatgggattgtcctcagtgacatcagttttaccagctggggactttgtttgaatgccctggatttactcactgaccactctggaaatgcaatctattgattgataaccctccttgaacttatctgtaaaaccattcatgaaatattttatgtttccataggctggcaagttctcatttttgtgtgttagattttcatggtgaccctctggctctataattcttttatttgaaaaaacacaaccatgtttactctgtcattactcttcaagctttttcgtatttcattttcccttccttttagaaggagtgttttcacactgtagcttttctcatttctttatgcaatcaccctgagagatcgaaagttattaagcataataacctatattgtgtcaaattgtgggtacatccaaagtgcagccatgcgtgggtgttaataggaaattccaaagggttcataaaaatatcttcagaagtttaatacattcagaatatatccaattagcattagtggatttctaatttcacttgacacattcatcataatgaattttgcttttgaagtagtgttctgtttaaactggcgctctggtctatggtagtgtttttttttttttttttaaaaacaggcttactttcaacatccatttacaaacatttgttgaaaaatattttaggagtatttgtttaaacattattccgaatttactgctccataaagcctagtgaatatttaaattcttgaatatgttgccagaaaaagaagcagagatccaaaaacaagtatatgaccagagttagagctgaaataatagcttgttgaagaagagaaaattgtaataaattgctttatcaaacttgctttcaaaacctgttttttaagttgggcacagtggctcacgcctgtaatcccagcactttgagaggccaaggtgggtagatcacgtgagctcaggagttcaagaccagcttgggcaacatagcaagacttcatctcaaaaataaaatagcgttaaaaaaaaaaaaaaaaaaa

SEQ ID NO: 1879 - DNA, 545 bp, Homo sapiens
  misc_feature (46)..(46): n equals a,t,g, or c
  misc_feature (536)..(536): n equals a,t,g, or c
  misc_feature (544)..(544): n equals a,t,g, or c
ccgctctagaactagtggatcccccgggctgcaggaattcggcacnaggtagggctgccaggctgcagcctgctgctccagggagcaccagctgcagctgatccaatacaccaagcctgtgtctccctcttctatcacctctctccaggatctctgctgtctcttggatcccatctgcctagatggaagaggatcctatccgaagctaggataaatgttgtcttactcctctgctatgttctcccagaaaaaattgattacaagttctctgctgtggttgctgcagctccaggaagtccccgcaatgtctcacgttgtctttgaccagtggtccccagtaccaggccagagaagacaactttataatgtcatttgtgttgtgaaaattcttccactgacccaaaatggaaccgtacaaagcctatccgtgtatatggaaaagtctcatgcacctggattaactcagaaaaagtaaagtcctgaaacttcaaaaaaaaaaaaaaaaaactcgagggggggcccggtacccaattcgncctatagna

SEQ ID NO: 1880 - DNA, 606 bp, Homo sapiens
ggcacgagctcgtgccgactcgtgccatttaacctgatacagtcatacctattaatgaattgcatgctcaaaaattacttataattaggagtataagatcaaagatgtttggaaactaatgatatatattgatttaattagccatgtccctattgataaacttttgggttgttttcagtgtttttctcttataaataatactgcagtgagtaaaaccttgatgcctttttctgagttctcttctcagccactacaaatggaactgctgttccataaagtgtaaacatttatgaattgaatggaaaattccaaattgctttccaaagtgtctgtacagggctgggcaccatggctcatgcttataatctcagcactttgggaggccgaggtgggaggatcgcttgagcccaggagtttgaggctgcagtgagctaagatttttgctactgcactccagcctgggtatatcagtctgttttcatgctgctgataaagacatacctgagactgggaagaaaaagaggtttaattggacttacagttccagagtctcaggcaggcctccttgtcccagatcccttgtgaatgcactaactctgaccggca

SEQ ID NO: 1881 - DNA, 1035 bp, Homo sapiens
ggcacgagtttctgacaaggcacagctctggctgaagcttcatttaccctcaaaacctctgctggtcaggatgaccaggtaaataattttctgaagaagacagcaaagcaaaagtgtgctagatacactgaatcctgttgccaaagaaccacaccagtgaggctgccacacacgaaggaaggaggtctctgaagcaagatgtgccgtgtgtcccctaaacagtagcttttgttttgcctcgtatgcaagaccaatgctatcaagttgaaagagactttttggcagaacttcagacatcaaagaggatggatgctgtgactatctgtggtgccaagaagggggatgaaaatgaatgcagatgtattcacttcaatagatgacagtgtccttggtttccaggagttctgtgttcaacacttgtatttacaatgctcaggcaaggaggccatgccatcaacctaatgtcattacagcaggcaggtggaaaatgagtttaaagcaatcgctttgtgccttgtttgttctctcactaattcaatctaatctcaagccccaaacagatcttccaccagttctgttctcagggggcttcagcccctagaaacacctaccttgaattcaagctgtgttgggacaaccaaaaagaaggaaaggttaaaaggaagaaaacaagggaaagaattggggagaaggagattaaggaagaaaagcaggaggccgggcgcggtgctcacgcctgtaatcccagcactttgggaggccgaggcgggtggatcatgaggtcaggagatcgagaccatcctggctaacaaggtgaaaccccgtctctactaaaaatacaaaaaattagccgggcgcggtggcgggcgcctgtagtcccagctactcgggaggctgaggcaggagaatggcgtgaacccgggaagcggagcttgcagtgagccgagattgcgccactgcagtccgcagtccggcctgggcgacagagcgagactccgtctcaaaaaaaaaaaaaaaaaaaaaaaaaaaaaaaaa

SEQ ID NO: 1882 - DNA, 2414 bp, Homo sapiens
ctaaacccacagctttaagttcttccctaaaagaagcattgcagctaacccttgaactcacagttttaaaatacagtatttctcttctccacatctccatgccttcgcatcaatgcttgtttttcctggtgaacactatagataatctcctgtytgaaatgtgggacagggtgtttcatggcagtggagctaagtttctcctctttatagtgaactggtgacccaaatgtccctgtcatttatagtgaactgatgacccaaatgactccctgtcagtagagtcccatgtggcccatgcttcacacaagcagaaatgaacgcactgtttttaaggctagattatcagttctagaatgattacttcaaagatgggagctacctcctcagatattcacactatgaaatggaggtgcttgatgtgtttcacactggcttgtttgacagtcttctatcttactgttaattcagcagtattttattgtgaaagaaaaccccagtgtttgagctcactcaggaattggggagagagatggaccaccactgtggtgcatttcttaagtgttctgggagaatgtcatacttttccttcccagagtaaaagaaaccttkgggagatcctgagggagactgtttctccccaagtatgatgatgtctagtcaagtctaagaataccactggacatgttctatggacatttgggattgcagttgctattctgatttgattggtcctcagtcaaatggatcactttgaaggaaagctttggttgtcaccgktatataccactgagataaagtgttagcmaagtatggttcaaattaacttatgacatgaccaagagcttttctcttccaaaagatgaattgtattgtaaatagtttctcaaaatatttttaactggatcatgagcatggggagagaaagtttctcagctgctaagaatttccccactgtttacttctttcacttatggtggtattgcatttaagattacaaaatttaaggttttatttgtatctattacccaaaccattaaattgtctttaatttcattgttgtcttggaggtccagtgcatacagggctgatgggggaaaactccctctagccagtcagcactctaacccaggattaaaccatcccatcaagtagtatgtgaagtcaagtcttcgtactcttgcagaccagacattgaaatggattcattcatatagatttctataaatcctataagtgaaaagatagacaactgtccgcagttgcttttaaaaaaggtcactataataagtactatatagtacagtattaatttatagcaggaaatcgtatcttgtaaactgtatataaaacactgttttatggtgcaatcatttgtcaaacttttgtctgtttcattgtttttagagtgtgtgcattcttctcatacctaagaatatcactgtaaaatctgctgaaaactatttttaggttttatttgcacaagactgaattagtttgacatttttggaagctcctattgaacatacccaaacatctgtaaacatgaaaaatcttcaatttattaaaagcaaacatttcagtatgattctttccaaaggtaatccatgttctatgttgttaatgtgtgtatgtaatttttctgactcttccacctcttataaacctattttctgtttcatttgttttgtttttgaaggatggctcttttttctttttaatgttctagatgaccaaaacactattggtttttacccttttgcctaaagctttgatatccccacttgatgttctgtgaattcactgtttaatctattaagtgaaataataaatagtcctggtgacaaacaatctgttgatttagaggaaaggccctgaaaaatacagtattgggaaactaactttgcatatgctgktagctattattyygcatcatgggcttcatgggaagaacatgktgcatttattttgtctttattaaaagactactagccacaagttactctgattatagtaactgttttatcaacccacttcatctttaaaaaattaaatttacattcacaattcaaaacagtaagctgtctttcagaaaatttttgaaggataaaaacatgaaggaaaaaagtggcccgtgtaggtaggattccctacacaggacttttagttgtatcacctcaagagattttgaagtttgtgatcaaggtctgtatattatcccaaactttattaagaattgttttctaattggttataacatttttcaattaatagtttcaaaacaaattgttaatacaactgtataaaatgaacataattttcctcacttgtatttttgttattgagcaagtttatcaaaataaattgtctactaaagaaactaaaaaaaaaaaaaaaaaaaaaaaaaaaactcgtag

SEQ ID NO: 1883 - DNA, 582 bp, Homo sapiens
ggcacgagatccacttcccataggctcatcacctggcaatccccaattctctgtcacggtagttctgcctttttaaaatatcatatacataaatttacattatctggtcttttgtacctggcttatttcacatagaataaatgttttgaagtttatgttgtgtgtatcaatggtttgtttcattttgttgttgagtattctactgtatgaatataccaaaatttgtgtgtctgttcaccgattgattgacatttgggttattacaactttaaagctactataaataaacctgctaaaaatgtttacataagagcttttgcattggtatagattgtcatttctctggagtgaatatctaagaggagaatttctaggttatatgataagtataaccatattgttaagcattctagttgatgtgtagagaaagacaggatcgaaagcaattaaaatgaaagaatatttcaaaagataaaagagaatatagaataacatggttataaaagccagtggaagagtgattaagggatggaaactggagtttcaatgttagaacttcagaaattgaaaaaaaaaaaaaaa

SEQ ID NO: 1884 - DNA, 1426 bp, Homo sapiens
  misc_feature (506)..(506): n equals a,t,g, or c
ggcacgagtactcatacaaattcttagtatatggtgcgtatactgtcaatggtagttatcatcatcatcattattaatgggagcccattatgtgtgctgtcttatttcatcttcacaatattcacatgaaataagcattatctgtactttatgaataagaaaactgaggctcaaagacataaatgtcttaatcaagtcacccatctattatcagaaagaacggggatttgaaaatgcatcttcctagagacaaaacttgtttccattatgccacaggattttactatgtaccacggctttaaaaataataactcttaggaggacttatttataaaagactcctggtattgcaggaggaaagtaaatatattttcatgactctgcatctaactctgggttctttccttaatcccatgtgtgtgtgtgtgtgtgtgtgtgtgtcttttttaaagggaaaaatacccatagattttctcttgcttcagtgcaacattgcagatgatccntagtgatgacctttcccaaagttacattgtagaattcattggctaatatcggctgataccaccgcatgaggtgcataattaagtgatgtggtggcaagaccagattcattatcgtagacggtcatgtgccctgccatgacattttggtcagggacagactgcatatacagtggtgtgcccataagattataatggagctcagctaaaaattcctattcttggtgacatcatagccgtcataacaccgtagtgcaacacattactttttctatgtttaggtaagtttctatacacaaatacttaccactgttttgccgttgcctaacatattcagtacagtagcatactgtacaggtttgcaacaggctataccacaccgcctaggtatgtagtaggctgtacatctaggttcgtgtaagtaaattgtatgatgtttacacaatgagaaaatgttccatttcccagttcatatcctccttcttaagcaatgcatgagtatctcttctgttcttatgctttcctcttccaggaaatagatataagttgtgtcctagcaacaattttttgcttcacataatatctaaagatatctaaataaattaagattcactaatgactctagtggcttttaatgccatgagatattcctactagttctttctgtcattggtttattttcattatgtagattagaaatgaataaaaattacttccttattttacactaatactaataaatgcctctgatttttagagaactgtaatagatatatgatgtgttactctctttgactatttgtataattttgttttttaaagatacatctagattaaaaactactgttgtaagctgttgaaatcttccatatggccaaaattctgtcactgcctatagaaattccaaaaaaaaaaaaaaaaaa

SEQ ID NO: 1885 - DNA, 712 bp, Homo sapiens
gctggaaccaacaagaaaaccttaatatggaactgcaatgatgggaatttggggcattgaaagaagttgggttggcaacattgcttgggtgatttccttgctaacattgtactgtaaggtgtgagggcctttgcattagactctgactgggctctgtaaacctgagcctcattcttagaacctcttgagccccttgatgttgcccagtcaagtccatagtgactgtaggggctgaacttcaagggccacttttgcttatagccatcacctgagagcacctccagaatcaaaatggccttgggaagtacttgccccagagagagttttaaaaattattctgtcaatctgactcaattccttgtagatagttcatttccaggcatgtattttcttggagtttgttaaaaacaatggaaaaatcttatcttaaaagtacctcttgggccgggtgcggtggctcacgtctataatcccagcactttggaaggctgaggtgggcaaatcacctgaggtcaggagtgtaagaccagtctgaccaacgtggtgaaaccctgtctctacaaaaatacaaaaattaaccaggcatgatggcaggtgcctgtaatcccagctacttgggaggctgagatgggagaattgtttgaacctgctgcattccagcctgggcaacagagtgggactcaaaaaaaaaaaaaaaaaaaaaaaactcgag

SEQ ID NO: 1886 - DNA, 1702 bp, Homo sapiens
ggcacgagatcacacatcatgcggtcattctctttgtccttgtgccagtcgcacagaggctccggggagaccttggggacttctttgtcggctgcatcttcacggcagaactgagcactccgtttgtgtcgctgggcagggttctgattcagctaaagcagcagcacacccttctgtacaaggtgaatggaatcctcacgctggccaccttcctttcctgccggatccttctcttccccttcatgtactggtcctatggccgccagcagggactaagcctgctccaagtacccttcagcatcccattctactgcaacgtggccaatgccttcctcgtagctcctcagatctactggttctgtctgctgtgcaggaaggcagtccggctctttgacactccccaagccaaaaaggatggctaaatgctcctgggagtcaggcgcagcctcacaccagctgcctcctccactcagcattccatggaccaaattgtgccctgggtagcctcagactttgggtattgataagccgatggatttgagtttttctaaagaatattcatattacctccttcttctaacttgccctatttgcaaaagcacttttgtagtaacaactattgggtcctgtcagacctccacggacagcaaagtggttttaatgcaagcccaaggatccttcttaaggtcttatctcaagagctctgggaagtggaagcatggggtgggatcggtggaccagggtggtaagtgtctgcacatctgcctgtccctgtatcagcggctacccaccttccaaaccactcaggacagtacccgtggcactgggcccgcagaagcaagggatgacttggttcttggaagtaatgtcgtcttgtgacattggcctgggacaatcattgtgggtaggtagttattgatcgtttactagataacccattggttctttgcctcatcctctcatccatgggtcagagttgaattcttatgtctatagacttccaatcagaagtctcactggtggggctgggggtgggggcaggcaggaggcatggatgggaacctgagtaggtagtgtggccaagagatcagcacaacctttgcaggctgacttgctaagtctgacagtgacaaacttgtgagctactgcagtcagtcacagaggctgtcttttcacacacccttcatgcccggctttccccatatccacatgcagagggcgagctcataaaactacagggaagcgtgaaatgatggctttggtagctgtttactgggtaaccccactgtgacactgtccttttcatgtgatgtggaaacctacttctgtcctccaaaccatgaaatgtgtcatctagactgcagagtacttgagtgctttgcctcccgatatgccagagcttgtggtccaaagcccattcctgtgtgtccgtcctgccatttagccacagaaggctgcggagtgaggcggcagctagcctggccagtggctgtcccgtggaccgacacctgcgcccccttctgcaagcaggattttctggtgccaacactcattcatcattcccgatcaactaggatgaatttaagactgtgctaccatgtgttctcaagtggtagtttaaaaagtggatttttaaagtgcctttcaattgtctgtgaacgtctaaaggactgatttgtctcaaaaaaaaaaaaaaaaaaaa

SEQ ID NO: 1887 - DNA, 1720 bp, Homo sapiens
ggcagaggcccgtttcatcctttcctgccttcttaagatcttgcactgccaaattcctcactccttcaccttcaggctcttttgtcctctccctaaaaacagaaactaaaacacccttctgaccttttaatgttactgtcctctttctgttctttctgtcaccatcagacttctcagcttaccatctccatttttcacctttaacccattctgaactcattgaatcatgcttctgccaccaccatactactgaaacaggtcatcggtgacccacccccggatgagaccacttcatcaagtggtctcatcttcattcctcttcccacttcacttcagtaacattttatatattcacctctcaccttgccacattctactcccttggttactgtacagcagtgctgttcagtgtcttcccttccattctcacctccttcgctcttcctgtcttctttttaaatattagtgttccctagggttctgacctcagtctttaccctttcttacgtttctccagggatagtgagcttgtagcccgaagactgcattctctacctacagaattattatgggcattgtttttatttatttatatattttaaatagatttaaatgccttaaacgggatgtatacgcctttctattaagggcccctcttttcttaaccagatagcgccacatagttgttacytggtgsscactgaagttacctgatttgtgactcttgccctattttcaacctaaatggtttgatcccttatgattatcacccttgcttaagtattaccatgacttatgttgtctctgtggatctgctgccaaagtgtaaaacattattcccatatctaattarctaactgctaaactttaaatttatactcctaattgtttatcagaaatgtgtatctaaattagcatgaccaaaactaaattcccccaaaagaactgctctttttcttctcaactgggaatattttccccataactctactcgacattctaaccaaaaactttttgttttcttcgcctttcctttctccgttctcctctctactcccaagcaatttccccttcagtcttctctgtcttagaaaatcatccactcactcacatgtttgctgaagccaaaattttagcagttatctttatcatttaggttccagtcaggagacagttatttgaacagagagaattttttagaaagaattgtgaactaggtaaaaagtagctaaatagataactgaaaaagtaaaaagaaaacgaagatatcatggagttaaaaactggaagaagcaacaaccacctgtagggctgggagaacaggaagaaaagattggaacaaataagacttagaaacttaatgaagagggcttgtggaactgagctccctggtgctggagtctcttggtagaggcagaggtggggtacgtctgtgataaagctggttctccaaaggctgagaaaagtgccaactgtatttagttgctcttaaggaaagaagtgctgctgcagggatgagaagccttgccaggggtgacagtcacaggaacacaagcaagcccacaggaagcagttagggaggaagcagccatggtgtcttccatccagggccagcaggcaaagctgatgcgtagtgtgcagagtccttggtgcagcatcccaaagcacagtatagaagggtggggttagagatgacaaaaaaaaaaaaaaaaaactcgta

SEQ ID NO: 1888 - DNA, 505 bp, Homo sapiens
ggcacgagcagctgtttctatggtaattttttgttcattgttatcacttatagcttactctattatggcttttttaaaaaaaaatctctgtatattttctcatccttacttgtttgcttacttttctaaccattagtctaaattgacatttaggtaaatttgcttttaagttgaatacttaagccaatgattcagtcattttgtcttttctggggtgggtagtgcctactagacatttaattgtgctgcattttaatatttcttaccattcattataaactttttttttttagacaggctctccctccgttgcccagactggagtgcagtggcaccattttggctcattgcatccttaacctcttgggctcaggcgatccccccaccttagcctcctgagtagctgggactactggtgcgtgccactgccatgccttgctaatttttgtaccttttttttttttttctgtagagatgggattttgccatgttgctcgggctggtc

SEQ ID NO: 1889 - DNA, 485 bp, Homo sapiens
ggcacgaggttatgtacatatcattgttaatacagtcctggcattctgtacatatatgtattacatttctacatttttaatactcacatgggcttatgcattaagtttaattgtgataaatttgtgctgttccagtatatgcaatacactttaatgttttattcttgtacataaaaatgtgcaatatggagatgtatacagtctttactatattaggtttataaacagttttaagaatttcatccttttgccaaaatggtggagtatgtaattggtaaatcataaatcctgtggtgaatggtggtgtactttaaagctgtcaccatgttatattttcttttaagacattaatttagtaattttatatttgggaaaataaaggtttttaattttatttaactggaatcactgccctgctgtaattaaacattctgtaccacatctgtattaaaaagacattgctgaccaaaaaaaaaaaaaaaaaa

SEQ ID NO: 1890 - DNA, 2007 bp, Homo sapiens
cggcacgagtgaactcctgacctcaagtgatgctcctgcctcagcctcacaaagtgtggggattacaggtgtgagccaccgcacctggccagaaaaagagaaaataatttttattatagattatcagtagttatgtatattaatgaagaatttggcttcatttacctaattagattaatcataaatcatttatgaatagtaatagacttgaattgttactttatattacacagttggccctctgtacctgcaggttctgcatcctgggattcaactgtggatcaaaaatatttgggggaaaaaaagcaatacaacaataaaaaataatacaaattaggaaaaatatactacaagaactatttacatggcatttacattataagtaacctagagatgacttaaagtatatgagaagatgtgcataggttatatgcaaatatgccatatgagggactggaaaacccagggattttggtgtcctgggggctcctggaactaatcacctgtggatactgagggacaactgtaattaaattgatttttggatggatgcaactgatgttaaatttggcgggggggaaatgttaggattcacaataacgtgagtactgtgggttggagtagagaatatgcttttcagactcattttcctttggaaattaatagtaaggtctcaagtgccccctacagccttgctactcaaagtgggttccacaaagtgttgacagtatggtactaaatagaaagtggctgaatgagaaatgtaaattgcagagggcaactggtgtgtttatatgcctgacattatttgggttttcccccctcaggcagaagctgaggaagattgtcattctgatactgtcagagcagatgatgatgaagaaaatgaaagtcctgctgaaacagatctgcaggcatgtttcttcaattgtgtctttgatttttattccattgttcccatacatatgcagaaattgatcataatcatgggtatttgtaggttattactgtttgcatggaatttaactgtttccatactggtttatagaatacttaaaactatgttatggctttctttgtgaaaagaaatatcaataatggttgcttgtagtttaacatgggtttaaagtattcaaactaaggcttacgcatgactcaaaacccataatcttaaaaagattgatgggtttgaccacctaaaagtttaaaacctgtgtataagaaaaggcatcataaataaagttaagagaaatagccagctggaaaaactgtttattatatatgggcagaggattcatctcattacatagagcactcatatatttggaagaacagaggataaaaagatatgagtggactgttaatggcaaaataatacaaatggccattaaatatttgaagagataattagcctcattaataatttaatcagattggtgaataatgtgcatcgctgtccaagctgtgagaacactcatgcagtgtacatgaaaatgtaaattggtacagctttctggagggcagactggtgatatggatcaaaatgaaaaacatgcattcccttgatacagcaattctacttccaggaaattaattttaaggaaatagtggggaaagtaaatatgcaactataaagatgtttagtatagcattgtttatctggaaaaacatcatacaacttaaatattcattccctgttattaagtaatgatgcatccatacagtgaaaacactacagccatttaaaaggatgaagtaaatctttatacattaaaagagaaaaaaagttgctgtaactagttaagtgtgtctcactgcacttgtaaggttaataataattatttggaacagctcatctagtagacattgaatgctgctaaagattctgcaggtcagagatctatgtgtaacaggttaaaagcgtagcaacaaagcagtgtacagaatatagagaaaaattaatttaaaacattctagatacgtctttttaaaaaaaaaaaaaaaaaa

SEQ ID NO: 1891 - DNA, 1499 bp, Homo sapiens
  misc_feature (867)..(867): n equals a,t,g, or c
ggcgacaagtgacttaaacactctgtgcccagttttccgcatctgcaaaatggggagataaatagcccctacctcctaggatcatcatgagaatgaggtgtgcgaacttggccggcatgggttccatagcaggcactcaggggtgtcggccacgaagattattctttctcttctctctttgccgtcttatttcatctctctccgttatttggttcccctgtccttagtcccctttctcccccaatggcatcccaagatgcacaatagtggcaagtgcccagcctgtttccacagcctgatccccaccactgcgttggccagtcacccaagaagcagctggaccccatcatctggctctagggatgacccagttccagcacccccgcaaacctccgtctgtccccctacctccctcagcagaggcccagcccaatgcaggcccgtggctggatgggagtagctcttcccaccacccctgggcagggctctgcggagcttgggagcctcacctggaatcggccctcatgcctcagtagagaaggagagcgaggagagaggtgatggggctccgcgggcacccccgatgcacagtctccttctgggcttctgatggccacaaggccagaagacctgcccagaagaattcagtataacccagttcagtgaaattggagagaacgagggcctgcgtcttccgggcagaaggcagggttcctgccctctggagcccttggcctggcgcgggctgattaggacctaaatctgcctgggtggctgggtggccgagtggcgattgggctggttctgtaccgggtgtgctccgtggggggcgtgatctggcaaagccttggaggtgggactgtggangcaccattgattgaactgtgtcccctgcaattcacatgttgaagcccaaacccccattgtggctgcatttggagtagggcagtaattatggttaaatgaggtcgtatgggcgggtgctgatccactaggattaggatccttataagaacctgccaccttctctctgccacgtgaggacatggggaggaggcggctgcctcccacccaggaggagcccttactggacactgggccctggctgcaccttgaccttggacttctagtccccagaactgtgagaagtagatttctgctgattacgctttcctgtctgcggcctgagctaagacagcagcgcttggggagaagcagaatttgaggagctcctcagtggcaggctgccctggccctgctgtcagcagaggggaatggccatccatgctggcccctcaccagccgggccttcagtgagctccccgggtaggtgaagctctcccagctctgtgtcccccgccaaagcaggcccacaagcgagcgcctatggggtggagtgagagtgaggaagaaacattacccgaggggtcactctcttcagaagacctcaatgactgtagactactgaattatttccttaaaaaaaaaaaaaaaaaaaa

SEQ ID NO: 1892 - DNA, 1626 bp, Homo sapiens
ggcacgagctgcagtctccctagcatctgttatttattgactttttaataacagccattctgaccgctgtgaaatggtatctcattatggttttgatttgcatttctctaattgttagtgatgtggaacattttttcatatgtttgttggctccttgtatgtcttcttttgagaagtgtctgttcatgtcttttgcccagttttaaatgggatttgttttttgcttgttcacttgttcacactttttttttttttatagattctggatgttagacctttgtcagatgcataatttgcgaacattttttctattttgtaggttgtctgtttactccactgaaagtttcttttgtagtgcagaagctctttaattaggtctcacttgtcaatttttatttttgttgcagttgcttttaagcacttagtcataaattctttcccagagccgatatctagaatggtgtttcctaggttttcttgtaaaattcttatagtttgaggtcttacacttaaatatttaatccatcttgagttaatttttgtatatggtgaaaggtaggggtcctttcaccatagaataaaacgttgtttcattcttttgcatatggctagccagctatctcagcaccatttactgaatagggaatcctttccccattgcctattttttgttgactttgtcaaagaacaggtggctgtaggtgtacagctttatttctgggttctcaattctgttcccttggtctgtttgtctgcttttgtaccagtaccatgctgtttgggttactgtagctttatagtatagtataaagtcaggtaatgtgatgcctcagctttgttctttttgcttgggattgctttggttatttgggttcttttttggttccatatgaatttcagaatagttttttctagttctgtgaaaaatgacactggtcatttgataggaataacattgaatctatagattgctttgagaagtatagccattttaacaatattgattcttgtaatccatgagcatggaatgtttttccatttgtctgtgtcatctgtgatttctttcagcagtgtttcctagttctctttgtaaagatccttcacctccttggttagatgtatttctaggtactttgtttttttgatggctatcgtaaacaggattgtgttcttcatttggctctctagcttggatgttattggtgtatagaaatgctactgatttttgtacattgattttgtatcctgaaactttaccaaagttgtatgtcagttccaggagccttttggtggagtccttagggtttcccatgtgcagaatctcatgattccttaaaagcatgcatttctacttaaaccatcatgtttacttttctagagagcaattaacttggaggtgggtgccggggaggttaggttgcttttgtaatattaatggatgtacaccaagaatattgcttctgagaatgatcttatcctcattgggaaagatttttctgtttttagttgaaattgagatgaaatacatcttattataaataaattttgactcttactaatgattacaggattgtagacaattaactgtcttcctcatgctgagtacataaaaaaaaaaaaaaaaaa

SEQ ID NO: 1893 - DNA, 2397 bp, Homo sapiens
  misc_feature (155)..(155): n equals a,t,g, or c
  misc_feature (1195)..(1195): n equals a,t,g, or c
ctttttttttttttttttaggttgaatcaaagcaagttgtcttcagagactgggatccgagatagaaaacacacagtgaagtttaatcaggaacccaacctccggtcctctgctacaaccacggaaacggctccaaacttgaggggggacccccnaacgcctgcttttggcccaaagctctgccttccagccctcctcatacccactggccacctaggaccaggaaaggggggtagagccctgagaattctgggtctggggtcaccagctcccacacctgtgctccccggccccacacacatgatgcccaggggtgggcaatccctgacagcggtggccggcacttgggagctcctgctcagccacctgccacggcccaccctgggggtccggcaggagccagggcagtgcatggcagcataaggccccgctgcagatcgactgccttcagaaacaaaaagtcccggcgcaaaggcgttcccggagtggcagcctggcctgcaccccagctgtgctgcccctgcagagccccagcagcgagscacacccaggtcaggggagggggcttgggtaccaggggcctcactggctcttcaccaggaccctgtagagtgagaagctgaggactgcggccacggcggccccgacaacccccagcagcccccggagccagaaggaagagggatgcagctctgcgtggaccaaatgtgggaaggcggccatggtggcgagctgggtgaagatggtggtgctgggctcggctgggccagcacaggagaacggcacgggagcgggtagccggtgcttgcggcaaaactcggccggtgatgggccagacaccgcgacacttcgggcaggtcggccttggaggagacaaagaggcagggggtctgcccgtccatgtaatggtgcttgtagacgctggcacaatgtgcaaaggactttgggtcactgccatcaaacatcaagcaggcaacgtcacaggtggcgtccagcgatgtggccagcagaccatctgtgcccacctcacagaggatcaagtacttctcctgcccattgacctgcaccgtgtcgatggcgtagccgggaggctgctccctcgtgtcctggtgccccaggccgcggccgagaaaggcctgcaggaaggcagacttgcccactccacgggcccctaccaccttgcacaggaggamgntccgctgcgtctgtcccttctcctggtccagcctcttctcacgagtgactgtgatggcatgggcctggtcctgctcacagagggtggggtagcccaggtagcctaggtgtccaaggcagctccggacgtccaggtaggtcaccagggtccactggcagaggtatccgtgcaggggcaaccggccggcctctgtgcggactgtgcgtgggagctcggggccccagggcgctgctgggaacacactgaaaaggctttgcagctccacgggcgagagggcgccgtcgcggtcctggtcgtgcttctcaaacactctctgcacaaactggtagccaaggtggttgagctccgtgctgcagccggggggcacgtggatcagaggggagagatagtccgcagtcagctccagggcatcgctgtagccgaagcgccgcaggatggtccaggtggtctcgtgccggccgcgctggatgaagagcgtgttcaggaagaggaaacctgcaccgagacaaagcagggggagcaccaggcacagccccctccccacactccccaggcacaggcgggcacccggcctcaccatccagggtcagcyggtcctcccgcacgccgcccgccacattcctgcacaccaccgtcttcacgtcctccagggcctgcggggccagggggtgccyaaagcaggatttctggaaagcgttgagctcttcgtcactgagcgcctggtccaggtcctgatctgagagcctgaagatgcgcgtcagcgcctgggcgcacgcgggcctcaactgcttggcctcagggtcatagaggggggctgtgggatgcaggacggccttctgggcgtagtagaacagctctgagatgttcctcaggttcttggccgaacactccacgcaggtctcaatctcgggaaactggctcatgatggggagcacggcctccatggagctccccgaccgcaggtctgacttgttgcccactaggatgatgggcaccctgggcccctgcgtggtccccccattcaccagtgggatccacttagttcgaatcttctcaatggtggcctcctcagagacgtcatacaccacacacaccacgtttgccttgtggatctcctcccgcagctcctcgtccgtctgctcggcttctgagtagtccacgatgtgggtgggcaccttctccggggtgacgtccctcgtgcc

SEQ ID NO: 1894 - DNA, 641 bp, Homo sapiens
ggcacgagtttccttgctactttgctttggtgtaagcagagttctttctgtaggttttttcaaatgaaaacattgcaagaatatcaaagagagcagtgtttgcgttagtgattataaactgcagcatggtgctgacattgataactgaaagtcaactaatgagaatttgagacttctgaagtacacttagttgctagtgtctcccttttggtgtcactggaaagtttagaaagcatggttttgtttttgctcaggtttctctttctgtgatgcagagactctcagctgttcctcctctatgtctacattatgtctgaaggaaagaatttaacaaaacttgaaatactgctgtttttctacaatgtttgtaaatatttatcttgctgcttttctaggtttgtcttctggatttaaaatttggggcggctggggtggaattgcatggtttgggaatgggtaattgagctgctgctcattatggtatgtaacagtgatttgtctgtttaatatgtacaagaactggaaggtcaataaaatgaaagtggttgtcttgactgggtaatagtgttacatattttgttaaaagttatacatcttttcaataaaaacactgcatacttcaaaaaaaaaaaaaaaaaaaa

SEQ ID NO: 1895 - DNA, 2163 bp, Homo sapiens
  misc_feature (2118)..(2118): n equals a,t,g, or c
  misc_feature (2136)..(2136): n equals a,t,g, or c
tttgctgtccggctgcctakggtctgggaagctcgggcaccctccctctccggggctcctgctcccacccctccggcccccccaccgtcgcgctcctccaggctgggcctgtggccgcggtgctttttaattttcccccagctcagaatcttgctgctcggcccccaggagagcaacaactcaacgggaacgatgtggaaggtgtcagctctgctcttcgttttgggaagcgcgtcgctctgggtcctggcagaaggagccagcacaggccagccagaagatgacactgagactacaggtttggaaggcggcgttgccatgccaggtgccgaagatgatgtggtgactccaggaaccagcgaagaccgctataagtctggcttgacaactctggtggcaacaagtgtcaacagtgtaacaggcattcgcatcgaggatctgccaacttcagaaagcacagtccacgcgcaagaacaaagtccaagcgccacagcctcaaacgtggccaccagtcactccacggagaaagtggatggagacacacagacaacagttgagaaagatggtttgtcaacagtgaccctggttggaatcatagttggggtcttactagccatcggyttcattggtggaatcatcgttgtggttatgcgaaaaatgtcgggaaggccctaaagagctgaagggttacgccctgctgccaacgtgcttaaaaaaagaccgtttctgactctgtgccctgtccctgagctcgtgggagaagatgacccgtggaacacttgcctggcccactcagaatccacggtgacctctccgcttgccaaaataaccgaagaaagaccgttcaccagacttggctcctctaaacatttgctgttcaaacatgtttttgaatatacattctataaaagattatttgaaagacaaaattcatagaaaatggagcaaaactgtataaactgatttgtaactaacactggaccattggatcgatattayatgctgtaaccatgtgtctccgtctgaccattcttgttattgttaaaatgcagaggaatctggaaatatttatatccacggagtccttggatccagtgctacgtcagtaaatagcaccagcattttgcaattgctgatctgctgaaatgtacacattctggtctagtttggtctatcttttaaagcctgatctggtgtgaataatcaactaggaaatctaaacttggataacacgtggtgaacaactgcctttagctggtccagattaatcatttcaaagacatccattttagatcacaagcaggaagtcgatagtctcaaaggcactttgtttctcccaagtaggccaccaggcagcctctagagttgctttacccaaatccttctccagccatgacttggtgactctaagcttgctcccacctgccccctccacttccctcagatgatgaggagccagggctaagggggcagccttctctcttcccagtgatgcacatccttcacattggctgctttgttctggaatatggatatctcagcctggatgccgaggaagctgctggatgcttaatggtgctagaggctcaagtgtgtttgaaaccaagagccagttgtcccccatgcagaaagaaatcctgtgtgagcctctggtatgagaaataaaatctgccagttttataacattcactttctgcctctgaggaaagatacagggaacaaaaatcaatttgtacagtcttaatattaaaagcagcttgactaaatacctgatttaaaaatagaagacatccccagtcctcatgacataccgcaaatatctgtggggtcctgttgaaaagaacaaaataaaggagcccaaggggtcattctgtctcagcaccatccagcctggcacttctcttcccatatatccattggattttttttttttttttcctaaacaaagtttttacactgagcagatgctctgtcatgatggcggttgtgcaattctggtatcctctaaatttgtaagcattcataaaaaaaaaaaaaaaaaactcgagggggggcccggwcccaattgccctatagggagtcgtattacaattcactgsccgcgttttacaacgtcgngactgggaaaaccctggngttacccaacttaatcgccttgcagaa

SEQ ID NO: 1896 - DNA, 1312 bp, Homo sapiens
  misc_feature (1168)..(1168): n equals a,t,g, or c
ttgcaggaattcggcacagtcacggcatcccactctgttctgccgaggacgtgaatctttcctttgttcagtatatcccatgctgtatacactacctgcctgtcagtcattcagtagcggcctatgttatcagattggctgatcattgtattgcagtgctatgttcaggtaacacttattttacttatagtggtcccaaggtgcaagagtagtgatgctgacatattattataacttctattttattattcttattgttaatcttactatgcctaatttataaattaaacttaatcataggtatatatatataggaaaaacatagtgttatatagggttcaatactagccccagtttcagttgggggtcttggaatgtgccccccacagataagaggggactatattcttatagaagaagagtttgattttttaggacgttatttcctgttcaaaccattgacccactctttgagataagttattctgaagctttcatataagtaaaagcaattaaattttgccaccagcaccatcctcaaccattctgaattataaagtgttaaaattaagaacaggaagaatggaagtattcaataaaaaatgaagtattttcagttccatattgtcatcaaataagggtgggaaaggcaaaggagaaaatcaataagtatggagaagaaagaaatgagtagatagaacaaaaaagatgagaaaggaagccatattgaagtcaggagagagtgcagagcaagaaaggatgggcagaaaaaaagaaaacaagaaaggagtttaatgagtgagtagaatgtgctcttgttgcattctactgccagtctaagccatggaatagttcactattctgggaagtattcttaagatcatcagtgaccttcaggtcatgaaatctaataagcattctttcagacctgttcttatttgacctctcagtggtgtttgacactctcaaccaccaactctttgtgaaacctttttttccctgaaagctgtgaggtcgtgctttctcggttctcttctcatgtctctggtaactcctgctttgtctactttgggttttttgttttgttttgktttttgktttttaagagttgggatcttgctctgctgcctaggctggagtgcagtggcgcaatcatagctcactgcancctcacactyctgggcttaagtgatctacctgccttggcctyctaagtaactgtgttcatttgacacagtttaggaactaaagatcaggtaaaaccagccagttcctgagctggaattgaatctgttcagaatgtctgggaact

SEQ ID NO: 1897 - DNA, 1966 bp, Homo sapiens
ctgttcctggcggagcgggctccgctcgtcttctctgtcttagggctggtgctggccctgcccacgcctagggctccggcgcgtcacgggcctcagctgggattcccgcgcccctcggacggccacgagactcggacatctttccaggaacagcgtgaggaggacagaagcacccaacaggactgctcaagccacctgcgaacactgctgctaccatgcccaagagaaaggcaaaaggagatgctaaaggtgataaagcaaaggtgaaggatgagccacagaggagatcagctcggttgtctgctaaaccagctcctccaaaaccagagcccaggcctaaaaaggcctctgcaaagaagggagagaagcttcccaaagggagaaaggggaaagcagatgctggaaaggatggraacaaccctgcaaaaaaccgagatgcctctacactccagtcccagaaagcggaaggcactggggatgccaagtgaaatgtacatttttgagagctctgtacttatagtgactctactgtttgaaatactatttttttaaatcaagttttataaaagtgtagaattttggcttttttaagttatgttgttagcacacaggacacttccttgttgtcttttgtggaaagggcaagtaccactaatagggtgtatctcagaaactgaattgaaataagggaaaataggattttctgtcctggtttttgaagattgttcttgattcccttgattcccaggagagattctctgacattcacgtgtcagccactttggcacggaagccttacagtgtggggaaccaaaacttcgtgtctcctctttccccgatgccatcagcatagacttgacttccttaaaccgagagttttgatgtggccttggcaaccctaaaatcagctgtgttaggtaacaaaactcaggctttctgttgatgacatcgagatggtgtcacttaaaagagccaagattcctgttttcagtttgtggattcatcctgctggttttactttagtccctccatgtcaaagtgggcctgagaaaagctcatacatgcctcatgtgaagtgtccaccctctctgaaaatctttcttgttcaaaacagcaacgacatatcttgttaacttttacggtgacttttggaggaggggagtttggaaattgtaaaatgttatagattgttgcctatttcctgctgaaagtaaatgtttttaaaaagtatcatataaagctgaatacaaattggtttggggggagatcctttcctacccaaagtcataaatatattctttactgccttgtggaaattttatagttttgcctttcacatttgtctttagtctgtcctgaactgatttttgtgaaaattatgagttagaaattcaacttaacatttttcatattcgaagtggttgtctctgcactatttactgaaaagttcatcctttccccagtgatttgtaacactgcctctttcataaattaaatttttgtgtatgtgtgtgggtcttttgatggtttctattctgactgacatcaatttgtctaatcttgtagcagtacagtacagtcctgattattgcaactttaggaaaaggtctgataaaaaccaagatgcctccacattttgtcataattgtaaccaatttcacctctgtctccagtatcaccacaaaattgttcttccttggagtgtcttggctattcttagccaactgttcctccatattacttctagaattagaccaacaatttataaatcaaacaaacccaagagcattgaaattttgattggatttgtattgaatttatagattaatctggtaaaccatgtcatctttacaatgttgtcttccaatacatgaatatggtacagctcttcatttacttaggcctttgaaatatctttcaataaagtttataattttctccaaaaaaaaaaaaaaaaaaaaaattc

SEQ ID NO: 1898 - DNA, 1726 bp, Homo sapiens
ggcacgagttgaggaggagggagcgcttgaaggggactggcctggcgtgcactccgcacctcggggacattattgcgcgtggaacggctgcttttggaaggcacaacttcctgaatggaccatgactcccaccaaagatccctgtctctgattcaccaaacagcttcaaccctgaaaccaggacgagaagttgacaacatctgagtggacagctaattgacctaagacttcagaccaggcctgtatgatctcctgtctaaacattcttagagtattatatttactttggggactattggccttgtctgctttgactcagattataggatatataacctggttaatgtttctgtacacatgatggccacctatgtatatacacttgacttttcagggtctctgctggggatggaaaaatagttcattagccaaactctcctaaagtgtggcaatggaggcagtctctcagattgctggatttgtcaccatcttccaagggccattcaagatcattacatgctacttgttgcaccagagattgatttttctgacactccaaatgttaccatatacttacatcagttccctccaaatgtcactttccaaattcaaattcagcttctaaagccaggccatattttcattctgtgcttagtaataagccctaagtctcacccttccccaccgcccccaggtctatctatcagtaagccaattagggacaaattctctaacttatctagaacacaaacttaattcctcatcttttccaggtccctgcacattcctggcctcccaccgttactgtcataactggcaactgaatgtccaaaggagaaaaagcaaagcagattgtgccagcacgtctcatttgttatatatcatgcttatgcaggcctttgtaaggcctgcagtaaaaccaatccatggctcactcatgttttaaacaacttacctattcaaactattatgaatgaatagttaagagatacattttggtatgtggcattgggccacacccaccaactcaaggatgggcacatagtgtaaatagctggcaaaatagctggcaaattgaagggcgctttttttttttttttttttgagggagagtcttgctctttcgcctaggttgtagtgggtggtgtgacatggctcactacagccttgacctcctgggctcagggatcctcctaccttagccttccgagtactgggccaaggagtctgtgcagtagcatcaagagcctgtgccttacatcaacacctcgggtgaagtagagacttgcacagaaagaatttccaagcaagctaaatggttacagaggcacaaactactgatcttctcaatgactatttattggcttcctatttcttccagtctgcagttcaacccctttttcatgggtaaagtgccgacgtcataacaaggtttgagggaggcactttcaccgtgtgaatgcccagtcatcacacttacaaatgacaaaaggattcaaaccttgatatagtctctatcctactttcttactatcacttaaattactcatggtatttataaccacttacgtaagtctattgctaaaaccaaattataggtcaggtgcagtggctcacattcaatcctagcacttgggaggccaaggtgggaagactgcttgaggctaggagtttgagaccagcgtgggcaatgcagtgaaaccctatcttgataaaaaaaaaaaaa

SEQ ID NO: 1899 - DNA, 2006 bp, Homo sapiens
ggcacagctgaggaactgaaaagaaatgctgagacaggaaatctgcctcattcgtaccggctcatcagtgttgtcagtcacattggtagcacttcttcttcaggtcattacattagtgatgtatatgacattaagaagcaagcgtggtttacttacaatgacctggaggtatcaaaaatccaagaggctgccgtgcaagtgatcgagatcggagtggctacatcttcttttatatgcacaaggagatctttgatgagctgctggaaacagaaaagaactctcagtcacttagcacggaagtggggaagactacccgtcagscctcgtgaggaacaaactcctgggttggcagcatgcactgcatatttgttactgctgcccacctcacctttcctctgctgaaggagaatttggaattctacttgatgcgggagcaacaaacagctcagggccaaaccaaaagacaaaaattggagtaacgtagaatgctccatgctattttatggaaactttggtctcacatccgtagctgattatcctctttttctcctatgagtggcacttcttttgtcttaggaatacatgttgtaaatatatatctgtgtatgtgtgtatacacacacacagacacacacacacacacacgggatgaatggagccttaaagagttaggatgagccaccagaatatgcctgctcaaaattaatagcacagcagtttggagaagaaatgaaggtgtcaaagagtccattcacctgagaaatgtgtgaagacatacttatcagttggcttttagcttttatgttccttgagtagtttcactcaagtctgtaaccttttgtgtttccttattagtaaaattcactggaaagccagctcttcatgttacactaatgacagtttgttctctttgcaagagaggggcattactgtcacctgacttgaggagctgttttgttgttgttgttgtctgcaaatttcatgaatttgtgatgtctttgctgtttacatgcagtcccaagaaatggattgttggtgctttggaatatgttacagtcccacatttgatatttcttatatactttgttttctctaaggagatttcttcacacagtatgttcatcatatatcatcatcattattatggtggtaaagatagaatcttttttcttttttgtcattctgscatggagcagcattaccctaatggattgcaaccaaaactttaaacaagtagaaagataatatttctccaattgggactccccagcaggaatacttagggataaggaagaatgctagcatctctgtctctcaracatagggaggataagaagagtgktcttctggkaaagctaaaattctggaccactgaagctaaaagccctattgcaagtatgaaattaagtacttgagctataggacaaaccttgggcatttaaccatttactgtctggctttgcccttaaaatagggttgcaattaaaatgtgattggcttaggtaatcccaaaaactaacaaataacaaaggtgcataatttatttatctactttttaggtgctctgagttgaggcaaagtagagcggcaacattaagtgctatgctagtcacttagctgacgtaaccagcttggttaagcagcttatgaaaccatataaagaattcttttgaggatggaattctgtccacaaaataattttgtgagcccagatatcattaggatcacacagagttaaatatagaaaaatgaaaccatcattatattctttcgtgttttttcttttattataaacaaggggattattctttagttctcagaggtagggacaaaaccacatcaggttttcagaaggaaaaaacatttaaaaacccaccatcacatgagagaatcacttgaacccaggaggcagaggttgcagtgagctgagatcgcatcattgcactgcagtctgagtgacagagtgagactccatctcattaaaaaaaaaaaaaaaaaaactcgag

SEQ ID NO: 1900 - DNA, 1175 bp, Homo sapiens
ggcacaggtcttcacaacagcagaggcccaggcccgggtacagctccgtagtctcctgggacatggtccgaacccacggatggctgggggtggtctgaaaaggtcctggccctggggaggtggcttcctcgctgctgactgccgagggggccctggcctggatccatgctgggcagaagcagctggacactgaccaggaccccccagggccggagaaccaagcttgacagccccccagacaatacacagagcctggacccagacgagacctccccacccccccatctttgtccccaccaggacaaagagctcttgccagtcttcccactgggccatggtgccagctgtccccctagttctcctgccagggaccccaaggctgggaccaccccgccagcctgatgccccagcacccactctgcggcaacttttctgccacggcagccccctctagtggacattggagccctgccgcggaggcgggggctggaggcttgtggagcccttcccagggtctcctagaccccggtggagcagaagggcgggggccggcccaggtcactgcccttctgcacccacagaagctgcagctggtgctggccccactgcacagcctggcctcgcaggcactggagcatgggctcccggaccccggcagcctcctggtgcactccttccagcagctcggccgcatcgactccctgagcgagcagatttccttcctggaggagcagctggggtcctgctcctgcaaaagactcgtgactgcccagcgccccaggctggactgagcccctcacgccgccctgcagcccccatgcccctgcccaacatgctgggggtccagaagccacctcggggtgactgagcggaaggccaggcagggccttcctcctcttcctcctccccttcctcgggaggctccccagaccctggcatgggatgggctgggatcttctctgtgaatccacccctggctacccccaccctggctaccccaacggcatcccaaggccaggtgggccctcagctgagggaaggtacgagctccctgctggagcctgggacccatggcacaggccaggcagcccggaggctgggtggggcctcagtgggggctgctgcctgacccccagcacaataaaaatgaaacgtgaaaaaaaaaaaaaaaaaaa

SEQ ID NO: 1901 - DNA, 1402 bp, Homo sapiens
ggcacgagacgctctggacgagcgaccagcaggacgacgatggcggcgaaggcaacaattaaggccccaggggaactggcagcgcacgcggatgctactactgcagtctttatttttttcccatgagttgggggtcgggtgggggagggaaagggagggatgaccttcccagggagaaacccacgacctgtcctgtctttgatcgcctctttgacatttttgccaaaataccactagtggaaagtcaggctagctgtgctggtattggaatagcagcctcacactggcgtctggactgttctgtagattcatgcaagtggagctgtctgtctctaatttaacttattgctagataatagggttttcagatgaaaagaaaacttaaagaggaatggccctcattcagtaagttctgtggttccagtaaggatttttatgtacatacgctctcgtctctcgttttgggtactttctatctcatctgtctcggctctgcatgttttccagggtgtagcctacagacatggaacagtgtaaatcccagactgacagacttagaacctgaggtctcattcatccttatggtttaggccttgccagttttccgaagtctctgattagttgacagtattaacactaaattgcagtttacagtatttctacattacagccatatgtaacatcaagccatcgattgtgtacttttcctttgctagttgtttgggctttaacatccttattcagccttatccaggttggttttgctgttgatcggtctcctaggctaaatgagaatgaaagcgacttcaggtttttgggttcataaggtgctcggcaaggtggctgtgggaattttttttttttggtccttctttcctcttaacgtaaatccaccaccaaaattattaatcctcttgaaaagaaaacgtgaaacgccacaaaaatagagaaaattcaggtctgtatgtcatggatcgtgttggtattttcagagaacatcccgcttctgaagctgctgcagctccctcctcagggatcacactgccgtcacccactctgcactggggcgtttcctactgcgcctcgtgctggcggacgcagctgggtgcagaagctgtggggtcggagaggcgtttggagaaggtctgtggtgcagtgtgtgaaaattcaggtgctagaagcctactggtagaaaaacccaaaaggaagagctatatccttaaccattctgtccaatttcgggagccttgtcagtgtgtcagtttttcctccccgaagacactccttccccaagtaattgtaggaagataaaaaaactgttaccagataacaaacactgaactcctatttgaccagaactttttcctctcaaaaaaaaaaaaaaacaaaaaaaaaaaaaaaa

SEQ ID NO: 1902 - DNA, 1221 bp, Homo sapiens
  misc_feature (1220)..(1220): n equals a,t,g, or c
ggatggcgtcccgcaaggaaggtaccggctctactgccacctcttccagctccaccgccggcgcacagggaaaggcaaaggcaaaggcggctcgggagattcagccgtgaagcaagtgcagatagatggccttttccacagcccctggaacgtgcttaggatgcataccagggtacaagcttaggaagtgtgggcacccaccccagcccatggacctgtgtgctccctgcgttgagcctgagatgccatgcttctctctactctctctaccactgtgggatcccttggtgattttggttttctgttagtaaacttctgtgtttgggatctcgttgtctagacaaataaccaccctcatccctgccatctgcccagtgcttcacaccctcgctacacacagtgtggtcctcctgtcaggtgtcagcatcactggagaatattagaaatgcagagtcttaggccctatcccagatctaatagcttcaaatgaatcttcatttttataagatcccgagagaccctgtgcccactgaagtttgagaaatgctcccaacttattactgccactccacagctgtcacctcctcagctccacccaacttccggagttattgtcatcaccatttcacaagtgaggaaatgtccattgagattaagaggcagagagtaagagggactcagatcgagatctgctgccttccacccagggtccctgaaataccttggcctgactttccctgtgggtaccaggcaaaaggacacttcgaagagcttcactgagcaatcgacctgcccaggcctcctgagacrtgcaatttamcawwactgtgggtcacctcatccacacctctaacaaagtcacaaggggaactggagaaattcaagatgccagcaaagaaataactgccgggctgaaagacttcataattgccagatggctgaagtgttcagagagtcggagctatggagaagggctaattgatcttgacatgggctaagaaacaacatyacacctgcggcaatgactgcaagcttttctagtcccaagagggaaaggsaaaattctgctcccaacaatgagagagaaatggtctccacccccagtcagtggcaacacagagaggaggtacaagcacaggctgatctgcttgtgaattgtcaccacacttaactagtcagctagcctggggaaagttctgatttattctgagacgtagttnt

SEQ ID NO: 1903 - DNA, 942 bp, Homo sapiens
ggcacgaggggcttcagacttgagctctgcctccccagatcgaccgcttcatccccatcaccaagctcaagtattactttgctgtggacaccatgtatgtgggcagaaagctgggcctgctgttcttcccctacctacaccaggactgggaagtgcagtaccaacaggacaccccggtggccccccgctttgacgtcaatgccccggacctctacattccagcaatggctttcatcacctacgttttggtggctggtcttgcgctggggacccaggataggttctccccagacctcctggggctgcaagcgagctcagccctggcctggctgaccctggaggtgctggccatcctgctcagcctctatctggtcactgtcaacaccgacctcaccaccatcgacctggtggccttcttgggctacaaatatgtcgggatgattggcggggtcctcatgggcctgctcttcgggaagattggctactacctggtgctgggctggtgctgcgtagccatctttgtgttcatgatccggacgctgcggctgaagatcttggcagacgcagcagctgagggggtcccggtgcgtggggcccggaaccagctgcgcatgtacctgaccatggcggtggcggcggcgcagcctatgctcatgtactggctcaccttccacctggtgcggtgagcgcgcccgctgaacctcccgctgctgctgctgctgctgggggccactgtggccgccgaactcatctcctgcctgcaggccccaaggtccaccctgtctggccacaggcaccgcctccatcccatgtcccgcccagccccgcccccaacccaaggtgctgagagatctccagctgcacaggccaccgccccagggcgtggctgttgttacagaaacaataaaccctgatgggcatggaaaaaaaaaaaaaaaaaaa

SEQ ID NO: 1904 - DNA, 2103 bp, Homo sapiens
  misc_feature (456)..(457): n equals a,t,g, or c
gttggtgctgccatccactaaggagaccttcaggttcaagctaactccaaatcctacgaagcccttctcttctgctctgtggctggcagcccagctcttgtaacaaaggcatggaaattgacagcagctatagccacaatctgaggaatggcagacaagaaacagcagagtaggcctcaaggagtcactgaagaacccagggctcctctttttagctcagagccatttagctgaaattgatgagtggatggtctttaagtcattctcccttgattggtcagtggcctgtcacagataactggcttgggagctgcctccatgctcctgagggtcttcttggtggttgtcacacagtgtggctgctgagtggggacaggctccttgtgaatggtgtgctctgtctaacctctctcattcccgccctcccgactcaccgacgtgcatgctgcccacatnncccctgcccaagacaccccctgcacccccatctgctcccctcgtgggcagcaggtgcctatgccttgtctacctttctgctcctcatccctacagtgagggagactctgatgtggactcggagctggaggaccgtgttgacggggtcaagtcctggttgtcaaaaaacaagggaccttccaaggcagcttctgatgatggcagcttaaagagttccagccccaccagctactggaagtcccttgcccctgatcggtcagatgatgagcacgaccctctcgacaacacctccagaccgcgatactcccacagttatctgagtgacagcgacacagaggccaagctgacggagactaacgcatagcccaggggagtggttggcagccctctcaccccagggcctgtggctgcctgggcacctctcccaggaagtggtggggcaccggtctcccccacccgactgctgatctgcatgggaaacaccctgaccttcttctgtcaggggcactttccaggctatgggtgtctgatgtctccacgtggaagaggtgggggaaagaggagtttctgaagagaactttttgctcctctgtctcaaaatgccagactcttggcttctaccctgtgtcaccgtgggcagtggcaggtggcctggcactgcatggagccagcacgttgacctccctctcagctccctgctcagggacggtggacaggttgcctactgggacactctaggttgctgggtccatggggaggattgggggaggagaagcagtgccttccctctcgtgtggggtgggggctctctcttcttggtgcctgctgtctttctactttttaatttaaatacccaacctctccatcacagctgcatccctgagagtgggagggggctgtagtggtagctggggctcccaagaacgactcgggaatgtcatctccatcttcacccttcagagagcagtcctttctctgtgcagctggagacgctggtgaggagagccgggtccaggttcttaagaatgaggtgcggaggggctctccggtgctgctgggctgggttgagcaagcctacgcagacaagtgtgtgtgtggaccatccgcacctccagcccccaccccaccctctttgtctcagcgtgttatgtgcaatgacctatttaaggtaaacccattccaactacagcagttcagggctgatccaagcactgcctccctcctgctctgtccaggtggtctggaccataaactcaacttgagagggaaggcttggggttgaggacttgtgatcagaaaaactgaagatggaagttttggccggtgctcattagacatgagtcctcactctgtgtcctgagcccgtgtcattcttccaacctccctgcccccacacacttatcccagacacaacaccatgtggtctggaggtcccagcccccaccctaaaaaggttatccctgagaactccaccagacttgggagcccaagtgcagtgcctggtgctgctcccatctgccgccccccttctctcctgcaattggtttgtactcactgggctgtgctctcccctgtttacccgatgtatggaaataaaggcccttttcctcctgaaaaaaaaaaaaaaaaaaaaaaaaaaaactcgag

SEQ ID NO: 1905 - DNA, 1255 bp, Homo sapiens
aactagtggtatcccccgggctgcaggaattccgatacattggtctttaaacccaaaccccctttaaggcatgttggtctcaaggggatttgggattgaagcrcagctttctgttgaggaaacctaggtgtcactttttagaacattaaaaagaaagttgtagggtgggcttttccatttaaaggaatgtgatgatcctaggttctgatgagtgataggtggtctccgtttataccctttcttcttttggcacctgtaagttccggtagtggccatcttacattctcatgtcctgctggaagtgcctagttgcctgcaaagccagctaaggcttattatttcaaaagaagattatttaaaacatgagtgacaggtagtcagaagagaacaaaaggacgcaagatactctatagccaagtcagcttggaggcaggatgggttgctgagtgaagtcgccgctcacttttggattcttatggactgtgagttagtcttccctctacacggagtcacaggaagggtataaatgcatgttcctgaggtgccctcccccaaagaatgtacctgcactcaaaccaggatctgtttttgctgttttaatcataaatagactagttagtagaagacttttgaagaacaaagtaaaacttttttttttcattaaaagatgtcccagaggaaaggccctgtgcagccagtatattctaatgactgcctggrccatgtcctaatawgggtggttttaagttgttgggccaaaaatcctttaaagacatacgaaacatctgccaactttttagcaaccccacagagcccgcgamamgctcgctttcttccccgccctgcccctttagtccccgctctggaagscccaggcagtttaggtgtaaatasgtatcttttatggtttccaaatgaattatttgtgtgagagtaattaaatctgtaagaaaacctgttgagattcttcacwatgaattatgacttctacaacatgtattttagcaaaaacacgatgctggcctccactggatagctcagtatgctgattgccagtgatagttctgtacgcgttaccaacagcgtctttattaaccctctcccacatccagtggaaatcattgctaggcggtatttgttggttggctgttagctttgctttatgatttcatgtttcttttaaaggttgttttgcatgttgaatattaaattttttttttctgtgtmaaaaaaaaaaaaaaaaaaattctcggcg

SEQ ID NO: 1906 - DNA, 1642 bp, Homo sapiens
  misc_feature (1369)..(1369): n equals a,t,g, or c
tcgacccacgcgtccggtggaggggaccctgtggttagcagcagctatcgcagcgtcggatgttcagagcagcagaagccggcgtcgtcggatgttgtgttgcccgccaccatgagctacacaggctttgtccagggatctgaaaccactttgcagtcgacatactcggataccagcgctcagcccacctgtgattatggatatggaacttggaactctgggacaaatagaggctacgagggctatggctatggctatggctatggccaggataacaccaccaactatgggtatggtatggccacttcacactcttgggaaatgcctagctctgacacaaatgcaaacactagtgcctcgggtagcgccagtgccgattccgttttatccagaattaaccagcgcttagatatggtgccgcatttggagacagacatgatgcaaggaggcgtgtacggctcaggtggagaaaggtatgactcttatgagtcctgcgactcgagggccgtcctgagtgagcgcgacctgtaccggtcaggctatgactacagcgagcttgaccctgagatggaaatggcctatgagggccaatacgatgcctaccgcgaccagttccgcatgcgtggcaacgacaccttcggtcccagggcacagggctgggcccgggatgcccggagcggccggccaatggcctcaggctatgggcgcatgtgggaagaccccatgggggcccggggccagtgcatgtctggtgcctctcggctgccctccctcttctcccagaacatcatccccgagtacggcatgttccagggcatgcgaggtgggggcgccttcccgggcggctcccgctttggtttcgggtttggcaatggcatgaagcagatgaggcggacctggaagacctggaccacagccgacttccgagtgagtggaggcagccttcccctctgggaagcttagttcccactggggcggagctaagggccgggtgccatgcaccctgacacggcttcccccccttatgacccagaccaagaagaagaagagaaagcagggcggcagtcctgatgagccagatagcaaagccacccgcacggactgctcggacaacagcgactcagacaatgatgagggcaccgagggggaagccacagagggccttgaaggcaccgaggctgtggagaagggctccagagtggtaagtggctctggctgggcattttctgtctgcaggcagggcgagctggcctaaagagtggtgctctccctgggggccagaggcaatgctgtgtcagctctgcgtgcatggtgaccagcatggggaggcagtgtggtctggcasaaagcacaggctgcctagctggangcacagtttccttgttggaaaatgggatgagcccctgtgcaccaggtagtgggaggatgtgaggtttmtggcacatagccgggccttgtcatttaaagccattgtaaataactgggctactctgggccaccctgcctataggatagccctgctctgtctatggagcaagcagctgttttactatataccgttgctctaataaacttggtttcttttaaaaaaaaaaaaaaaaaaaaaaaaactcgagggggggcccggtacccaattcgcccg

SEQ ID NO: 1907 - DNA, 1621 bp, Homo sapiens
ggcacgaggctagatagtgctatgaaactaattttggcaaaagactttgatgaagatagaaaatagtaaaattgatggaattcaccaatttggtgatattgacaatgtttcttaagctaggactttcttttcctttttggtttgtagcctatgatgttggtttacttggaataaaatctagtaagaattcatagaatattgaagctaaaattttacttagacatccctgtcctagctctttattttctgataaagaaattgagacatagaacatggcacacaactcaacatctaggtttagcaaatgtttactggaaacctgtaaggagcctggtactgtatttgcagaggcatttgggacacagagctgtagttcccgacctggagaaacttagccatactttctgactttcatttcattgttctttccatcataccgtgctgcctcccttctcctcttccctctaactttaaataataagctgatttaacttcaaagagaacatttcaattttaattcctagtatttaggatctctcgttataacttaaaaaaattcgacactaatcttagaaataactgctgtttaccactaaggaaagatagttattctccatgttataaatggcttcaatatactttagggttctgggtttcccccagcattggcatctgaaaaagaaagatgtcttagagcagcaggagaagtatgggatacatgagctgttcattcttgcctgacatgaactggcctgtagaggatgagctgggcatttgggatcaaagtttagagaaaatctgaccagaaaagaaatttcactttcttgggattcacaggatcatagagtcttaccaacgagagaggcactcaaagaatgtgaaggttcagttgattattttttaacttgggcttggctgtagaacataactcttcttcgtatgactttttcatttcctggaattctcctaacaacaaaacaagaggcttagtatccaaaaggaatggagtaaacactgcaggcaagcaggagcacattagaaatttttacctattctttattagatagggatttagtagtcatcttaaatggcacgatagtttgaatgcccacacttctgcatgtggtctttctcttggttcattttttaggtatcccagtggttcttaaatataatatgtaaagggattactgtagtgcaaggttgtatatacatatctgtatgtgaattttagaagagtttaaaaggattttcttaatgttaattctgtagcatttggctacaggtgatgttacaacccatccccaatgtaagacgttagtactgtaatgacgcacttgtcccactgtaactaagtagctggatatgttacaatggaaaagggagaatgaatgattgaaaatagatttttattcaagaggaaaagaatcattatttcctagtttctaaatatccttcaaaatgagaagaggctaaagacatattaactaagtatatcagcagttgtctaccaatattatttattctcaaaggacatagtggttctttttcctaagagaagatagtacaaactatttaaatgtagacgatttcctggagctttgaaaaaaaaaaaaaaaaa

SEQ ID NO: 1908 - DNA, 1978 bp, Homo sapiens
ggcacgagtttgcacatgtgtcccagaacttaaagtataatttaaaaaataaaaataaataaaataattagaacaaagtccagcagtatagagaattaggtaataatcaataggaacagacaaatctaatgttgaaatagaataatagatccagaaattaattctaaagtcttatttatggttctttaatgtgtccttgatattagcttgcaattagctccatcaagtgatagtatccaacgtaaaatgggcttagcaatttcttgcttctcatgctgcttttatatctctcttctttcacattcttggagtccccaacaacagggcagaggctgaagggcacagatcttttgtgtcgtatggcttggcctccattgaagtaggtgagggtgaccatccctggtacggaaagacaggtccgggcaggccacagtctggctctcctgcctggcttcctgggaataattgagcaattgctctgtaccaggcggggttctgaatgcttccacgtcccaatttcaatcacttctgcaaggtgacgcagctaggaaagatgtgactcaggccactctggcatccaggactcacctcctcttctgacctctcgtcagcctgctgtattagctgggccgcccttcccatgttgacctcctcccatatctgagcgttggcctcacaggcagcgtcatgaagctgccaccatccctgtccccctttggttcaggccacagggatgcctggagctgggaacggccctgcgtagcactgactgcagagtcttcagtgcgtgtgtctctgtctcctttactgaactgtgagcgcctaaggaggggccttccatctgctagtttatccctggaatgtatctcaatgcttggcagaggataagcgttacatgttggatacattaattgatcctaagattctaagcactaaattttacgagaagtagcaaaaatgacctgaatgtagtcgcactgtatcttttcaatgatccaaacagctgactccctgggcttacgccttcataacgctggaaccccctcccgcccgctttgttcctctccctcttgcagcagatgggatcagagcggatggagatgcggaagcggcagatgcccgccgcccaggacacaccaggcgccgccccaggccagcccggagcggggagtcgcgggtccaacgcatgctgcttctgctggtgctgctgttgtagctgctcgtgtctcactgttagaaaccaggaagatcagaggcccacaatagcttcccacgaactcagagcagatcttccaacctgggaagaaagccctgctcctactctggaagaagtcaacgcctgggctcagtcatttgacaaattaatggtcactccagcaggaaggaatgcattccgtgaattcctccgaacagaattcagtgaggaaaatatgctcttctggatggcctgtgaggaactgaaaaaggaagctaataaaaacattattgaagagaaagcaaggataatctatgaagactacatttctatactttctcctaaggaggtgagcttagactcccgggtgagagaagtgatcaacagaaacatggtggagccatcccaacacatattcgatgatgctcaacttcagatttacaccctgatgcacagagactcatatcctcgattcatgaactctgctgtctataaggacttgcttcagtccttatcggagaaatctattgaagcataggatttttcaaatatatttattattaataaaataataaaagaattcatgggctacaactagcacagggaatttagaggttgtagcatcttctgctggagtaatactcaggctattctaataacagatgattccttcaacagactgctatatattcaccatgtaaactgcagccacctttagtgatacttttgaaaaaaaaaaataaagggatatggctgttgtagaaaaaaaaaaaaaaaaaaaaa

SEQ ID NO: 1909 - DNA, 932 bp, Homo sapiens
  misc_feature (929)..(929): n equals a,t,g, or c
  misc_feature (932)..(932): n equals a,t,g, or c
ttccactcctgctttttgttaccagctgtgatgtttggcaagttaataaacctctcaaaacctcacctgtaaaatatggataacagtacaataaggtttcakcaaatagtagatgttgtcaataatgctttgttttctttggaacatgataatcttactagtggcttcttcggcctattctggttgtgaccttgcccttcctggaacttcggcgttatgactgtwcttaactgctgaagratggctgratgtctggaaatggraaaatctgtsctgtggatgaaatcttattaatagatgtggragmcactaattagamcaccacaacttaaaagagtgtggatgaatgcttaatgtctctttaagtcatggagatggtgttctgggaaagaggtgagtgtagtgggggtatgatggcatctgactccttgttacccacttcctgcagctagatacactgtcagatcctttggcatccggagaaatgaaaagattgctgtccactgcacagttcgaggggccaaggcagaagaaatcttggagaagggtctaaaggtgagcctaatcccctaatggagtgatattgatcagcactcctttagtaacacatgtagataagttacatttaatgttctgttctttggtgtcttgatatttatttacttaagcttctaaaaggctttttctacaatcagcagggttaaactgttcttggtggtttaaaagatgcttgaggctgggcacggtggctcaacgcctgtaatcccaacactttgggaggccaaggcggttggatcatttgtggccaggagttcgagaccatcctggccaacatggtgaaacaccatctctactaaaaaaagataaaaattagccgggcttggtggcgggstcgrgtagtccaagcaagagagttccagttacggtgngcn

SEQ ID NO: 1910 - DNA, 3052 bp, Homo sapiens
  misc_feature (2994)..(2994): n equals a,t,g, or c
agcgctcccgcccaccctccggtctcggcggctctccagagcgtctgtaaacacccagagactgtcatggagggggaggaggaggcggcggcggcgaagggaggcgtttggggccgcctccagggtccgctctgccattcctgaactggtccctcgtccccgtgactctggcatcagggaagcgaactgttaggcgagaggaggaggcagccagaaccatatccccttcttcctcggggcgggggccgggccaggccggctgagccgggggagggctccgggagggagtgcctggccaggccggcctgtctgccgcgatggatgacagtaaggtggttggaggcaaagtaaagaagcccggtaaacgtggtcggaagccagccaaaattgacttgaaagcaaaacttgagaggagccggcagagtgcaagagaatgccgagcccgaaaaaagctgagatatcagtatttggaagagttggtatccagtcgagaaagagctatatgtgccctcagagaggaactggaaatgtacaagcagtggtgcatggcaatggaccaaggaaaaatcccttctgaaataaaggccctactcactggagaagagcagaacaaatctcagcagaactcaagcaggcataccaaggctgggaagacagatgctaatagcaattcctggtgaagattatataaagatgagtcagtgattgaagccaatattctgattcccatggaagatggatgggcaagagtgtacttcttggctccatttactacctactgctcagtagtcatctctgtaaatctgcaatttctaccaaaatgtgtgatcgtagatctcaaaggatcttgctttaactttcaacacttagaaaatctacaaacattcagacctgtctgggttggtattgccacccatgacatttaacatgttgtgatgcttgaaaacacaggagtagagaaaatcgatgaagattgtatttttgcaccttaactccacattgctttattggttaatttatattctttccatgtaattcatgtaattgtatgtctgtgtgtgttttatgtgtcaccacctttcatgtttttgattgccctacaaagagaaaccaaatgagctgattactgactataagttctcagcctttatggacctaatcttatttttatttacttgagtaatgtttattctctgcatgaaccatgatttctcctgtgagccattccagcataagctgtgaatatgtattaacaaatatatacatttctatttttataatccataaggatatgcctgttttaaataacatacatattaacaatatctatcaggaaaaccctcaagacagcttctagttaaaacctttgttgctgtcctctcaaactatatttataaaaatttgctagggccaaatccatacttgcagaataattcatcaaattttatttttaagtgaaaagtaacctttcaggcatttcagcagcatacattgacaatctagggtatatatgtatgtatgtttcttattgtatgtctatatatgtatgtggggaggacaggagtgaatgttcacacacttttcttgcgtactcaactaaattggagaatgtttctgaagaaaattggatgaaattagctgctgagattgagtttctgccttaaaatctgaaacaaaaaaagggacaaattgctggtagatctactgactgtagccatcaccagaacacttagtttcttcccagacatgaatttcctgacaggctctgagccagaaacacactgtgggcgtgcatctggttcagccctggatatgcctccactgtggagggaagcattggaactggagttgtgcacagcaccgcagctagtgggcctggctgggggtgcagaagggcagggtagttctttccatttccccttgcagctacacttactttctccctgactaccaaatggagtgacggttgaagaatcaagctcataatatgatacacccagacagacccagaaatcttttgatttccccagcgagatacttaccactctctcttctctttcccatggttaaaacaggagttgtgttctctgtcgctgctaaattattcttcacttgagtgaagcaaatatttagcttccaaataaagtatattttgttctgaactggcagtttaagaggagataccgtagtctagattgtctttgaggtagaatatatgatggaccacatagtttaagattacaaggtactttccctcttctctcaggccatgcatttgaataaagtgcctcccttagcctgagctcctaaagacctcttgtacttggttgcaaactcagatctctagtctagtctagtctagtctagtcatgtgtgactgtgtactgagataccactagcccagtttgctgggtctctatgttttggaagttgggggtttaataatatttaatgtctttttaggatcataaacataaataggtttgttgatattcaggccttcagaatttaagggttttaaatatagcattcagattgtaattggtatgtttttgccatctggtccactcaattgtatatttttattttgcaaaacaacccaaaacttactttatgttgctttgttcagtaccttttgaattcccccagaagagttgttttcaaaacaaacattccagaatgaatgtcgctcttcaatggaacgtctttattgtgcttgaagtatttcttctctggttgtaattctaaattacagagtcatttgagctttctcccctcccgctagtatctttacaggagcagggaagagcagtagaggatgtataattttgggcgaagttaaattacaatttatttgaggttattcctaaacctatttatttggtgttttggaggagatcacacactaagagaacgttgattgcctcggctattgtgctggctggacactttggtcacttttgaagcatgttaataaatgtcactgattaaaanaaaaaaaaaaaaaactcgagggggggcccgagtacccaattggccctagaagaggcga

SEQ ID NO: 1911 - DNA, 1280 bp, Homo sapiens
ggcacgagccacaatattgtttttcatttactatcttgatcatagagtttggctggggaggggggcagttttagaggcttccacttggtgttcctcagaatgatatctcttactccgggggccaaggtaggggttagcttttgttctctttgtagtttagattgtatctcttgccttgttcaagttcacaaatctttttgtgtatacacatatgtacatgaaaatgatgttcatgctttttattattttacccttcattatttcattttttatagttctcatagctatgtctttcagttcactaatcttttttccacagtgtttaatctgtcattaatcccatccaaagtatgttttctctcagaaattgtaatttttaacctctaataatttgacatgggtttttccctgttatatctttcatatctttatttatcatggttttacttttaacctatttatgctttcatatttaaagtgggtgtttagtgggcaacatacagttgggccttccttttttatccagttaacaatctctgtctttttactggggtatttagatcatttacgttcaatgtattgatgtttttaggtttaaattactaacttactatttgttgtttattctatgtcttctttgttctccttttcttctttttctgctttcccttagagtagctgagtgtgtttatattacatattgtctcctttgttggcttattaactgtaaatccttgtcatttgattccttgagattttatagcatacatcattgtgagggattgcatatttatgtcctctccaaatttacatgttgaagtcctaatccctaagggatggcattaggaagtgtgacctttggaaggtaattacatcttgaaagtggaaccctcatgatgagattatgtgtcttatgagacaacacagaagagagtttgttttctctttctctgctctttgccatgtgaagacagaatgagatgaccatgcataaaccaggaaatggactctcactggacactagacctgccaacaccttgattgtgttttagagtccagttctagagactcctcagcctctggaacgtgagaaatgaatgtttgttaaggcagtcagtcagtctatggtgtattttttctagtagcctgaactgactgaaagaaaatcatgaacttatcattctaacttcaaggacattatatcacttactgtataataaaataatcttacagtaaaaaaaaaaaaaaaaaaaaaaaaaaaaaaaaaaaaaaaaaaaaaa

SEQ ID NO: 1912 - DNA, 3620 bp, Homo sapiens
catatgctgcctgccctgcaatctgcgtacaaatacgcatctgttgtataatccaaggcgaggtgatattaagctgacgcaattggcaatgctactggcagagatttccagtgttgcccaccagaaagatggcagcttctgccctattgttatgtgtggtgactttaattctgttcctggttctccactatatagtttcataaaggaaggaaaattgaattatgaaggacttcccataggaaaggtatctggccaggaacagtcttcacggggacaaagaattttatctattccaatttggcccccaaacctaggtatctcacagaactgtgtgtatgaggtacagcaggtaccaaaagtagaaaagacagacagtgatctgacacaaacacagctgaagcaaacagaggtcctagtgacagctgaaaaattgtcttcaaatttacagcaccatttcagtttgtcatctgtttattcacattactttcctgacactggaattccagaagtgaccacctgtcattcccgaagtgccataactgtggattatattttctactctgcagaaaaggaagatgttgctgggcacccaggagctgaagttgctttggttggtggcttgaaacttctagctagactgtcacctcttacagaacaagacttatggactgttaatggacttccaaacgaaaataactcttcagatcatctgcctttattggcaaagttcagacttgagctctgactctctttgatcacatactaattttctttccaatttgtattgtttttcaaagaatgtaaagttcttaagtgtatgcatgttgtttatttttgcactgtggagattctgaagcggttatgttagatgctttgaaactccatatcagaagaaataactttataacaattttttttaataatgaaaaatattttcctgacaagtgagctctaaattctctttattgtaaaagagatgtaaaggttttatattctaaatcctagtaaaattgacagtgatttttaaatataatgcatcttcctttgtctgcttagtaaaaaatttcatttcataattttggcaagctctgtagtggatccaaagtatctttgagttcttgcaaactacaagttgtttcctttccagaaggcttgatttcattaggagacccctctattgagttctaaatagtttatcttagaaagccttgggtcattcacaggtatccaaccagccattgtttagtttgtttttgaaggggtttgataatgctttttaagttgtacagaatgcttaatccatcttattactgtcctgagccatgtaatatgcctgcatcgtgttggggaaatgtttgggaaatataagccagcataacgtgtaaagctcactctttcaccctggaacagacaagaggtgggcttaatagaggcagagactggggatatacctttgtttccctagcatttttatttatttatttttattttattttattttttgagatggagtttcactcttgttgcccaggctgggggtgcaatggcgcaatctttgctcactgcaacccctgcctcccgggctcaagcgattctcctgcctcagcctctcgagtagctgggattacaggcatgcgtcaccactcccagctaattttgtattttcagtagagacagggtttccccatgttggttaggctggtctcgaactcccaacctcaggtgatccgcccacctcagctctcaaagtgctgggattacaggcgggagccactgcacatggcagcattttttaaaaattcagttttaagatctctggtttaggggagagattttattttactgaaccagttctatagaaatttattttattaggaaatttgtctttggaacaaagtggcagctataaaattatttttgttaagcctcagaaatatgaggaagcctgtaaaactctagtggggagatattaacttggagacctaatgctctgtaaatagtcatttaaactgttggttttagtggttttgtttctaaaatgttttcttttaccgtgatgcaccagtatgagatggtgctgacactttctatgaagtggttatgagcaggtttaataaatcctctatacaagtgtttgaatcaattttaaaacataaaaagtggaaatttccttttttgtagacagtaggacaaggaattatatgcatttttactaagtagtaattttacactgaattgtaaatgtttttacagtgagttttattaatagaatgcttcaccttaaattggaaaacaataatagtcttggactaagtctttgtactaaagcatttgctataattatttttaaaaaaacaaacagatgaaaacctcagagaaggcatgtggattataagatttgtctagtaaaaattgtaattgaatatgtttaaatatttaatttctcattttggggggtttttatttttttattttttagatggtgtctcacgctatcgcccaggctggagtgcagtggcgcgaactcggctcactgcaacctccgcctcctgggttcaagcaattctccttcctcagcctcccaagtagctgggattacaggcatgcaccaccatgcccagctaatttttgtatttttagtagagatggaattttgccatgttggccaggctggtcttgaactcctgacctcaggggtgatccacccgcctcgggctcccaaagtgctgtgattacaggcatgagccaccatgcctggcctttggggggattttaattacagtattaattatagttctaggatttcccacattttatagtagtagtttgcaggatattatgtgccctaattagcagatatagacattatcaaattataatgatagtataattatccctttttaatattggggaaagaaaaatgaaaattcattagttaattactgctttgtgttgtgtgaatttattaacaaataacattattacatataggtcattgttaacaaacaaacatccctgaaaacctctgtgaaaatttaattttttatatcctgattaatatattgtgactttaggcccatttttcatgtgcttcactttgatagagttaatccataaaattgctctttactttagcttatcaaatgaagtattattttgtggactggaggccaaaaagtcaatgtgagcttctcacaggtttttaaagctccactaaaagtaattatccacttgtctttacttttgttgaccagaatagttggtaactctgccagagcctgtacttacctgccaaaaacaattaaatctggttaatgcctgaaaccaaatctctcagtctcaagtgttatactatccaagttttaaatggaaaggtaaactgtggagtaatgaaattttggttttactgtaccttttgctatcaagataatattcatgtttgaaatcttgtctttatttggaatttagttactgtctgcttttaacctttgctttcctaaagaaagtttgagatccagagagttcaagggattggggaaagagaggcgtcaagtcatttgcactttgtacctgtaagttaggtaataaactattatactcgtaaaaaaaaaaaaaaaaaa

SEQ ID NO: 1913 - DNA, 1896 bp, Homo sapiens
ggcacgagtgaagatggaccagaagtccttgatgaggaaggaactcaagaagacctagagtacaagttgaagggattaattgacctaaccctggataagagtgcgaagacaaggcaagcagctcttgaaggtattaaaaatgcactggcttcaaaaatgctgtatgaatttattctggaaaggagaatgactttaactgatagcattgaacgctgcctgaaaaaaggtaagagtgatgagcaacgtgcagctgcagcgttagcatctgttctttgtattcagctgggccctggaattgaaagtgaagagattttgaaaactcttggaccaatcctaaagaaaatcatttgtgatgggtcagctagtatgcaggctaggcaaacttgtgcaacttgctttggtgtttgctgttttattgccacagatgacattactgaactatactcaactctggaatgtttggaaaatatcttcactaaatcctatctcaaagagaaagacactactgttatttgcagcactcctaatacagtgcttcatatcagctctcttcttgcatggacactactgctgaccatatgcccaatcaatgaagtgaagaaaaagcttgagatgcatttccataagcttccaagcctcctctcttgtgatgatgtaaacatgagaatagctgctggtgaatctttggcacttctctttgaattggccagaggaatagagagtgactttttttatgaagacatggagtccttgacgcagatgcttagggccttggcaacagatggaaataaacaccgggccaaagtggacaagagaaagcagcggtcagttttcagagatgtcctgaggcagtggaggaacgggattttccaacagaaaccattaaatttggtcctgaacgcatgtatattgattgctgggtaaaaaaacacacctatgacacctttaaggaagttcttggatcagggatgcagtaccacttgcagtcaaatgaattccttcgaaatgtttttgaacttggacccccagtgatgcttgatgctgcacgcttaaacgatgaagattctcgttcgaaaggcatttatataactctgcagccttcaaagctcgaaccaaagctagaagcaaatgtcgagataagagagcagatgttggagaattcttctagattttcagaacttgaagactattttctaatttctatttttttttctatttcaatgtatttaaactctagacacagtttttatcttggattaacttagataacttttgtagcagtggttatattgcttataatttaatgtacaatactattgaaactggtgagttctgattattaaatattctctgtaaatcagtaaacatgtataaagtatttgtaatgtttggtcataatttatttatgaagacagcaaaagactgatttcatgatggggaaaacaattagccaaagtttaatttcttacactgtggttgtcaagaatactgatttactataatgatatatacatgcaagatatttaacttaatatcttagacaagagttctgggtacaattttgggatctagttcccctggaaaagctgctgtatttttaatttttaatggaatgtagcttttaaaatcctgtcactggcatcaacaaaaggaattataccatgagaccttatagctgtacttaaaagccattcagttcagctattgggagttcatgatgaattagcatatgccagaaaggttgctaaccttaacatctgagagcagtaacactgattttatctgctgtatgagactttgtgcattttactttgaaataaagatttttttcccactgaaaaaaaaaaaaaaaaaaaaaaaaaaaaaaaaaaaaaaaaaaaaaaaaaaaaaaaaaaa

SEQ ID NO: 1914 - DNA, 1361 bp, Homo sapiens
agcatttggtggacttctgagcggtgtccaccttttagctgtgatgaacggtgctgttgtgaacacttgtgtacaagtttcagtgtggacgtgtgtcttcgtttctctcgggtatatacctaaggtggaatcactgggactatggtaactgtgtttactcatttgagcagccgccagcctgctttcccaagtgtctgcaccatctcacgtcccttcctgcagccttgggagttctgatttcgccacatctttgccatcacttgtttttctctgactttttgtttccagcccatgttgggtgtaaagcagtgtcttgtggttttcatttgcattttcatgatgactgataatgttgaacatctttttttgtctttcttggcgatctgtatttcttctttggagaaatgtctattccgattcttgcccacttttagttggattattgtctttttgttgttgatttatgagttctttacatcatctagatagaagtgcttcctcacatatatgattcgcaaatatcttctcccattctgtgagatgtcatttcactttcttgatggtgtcctttgaggcacaaaacttttaagtttttacgaagtccaatttatttttcttttgtcacttgggcttttgctgtcatatgtaagaatcttttgccaaatccaaggttatgaaaaagaaaaccttcaaaagtttttttattttagctcttttatttaagagctaaaataaaaattttaatagctgcatgtggtgtgaagtagggatcccagttcgcccttttgcgtgtatctgttcgttggcccagcaccgtttgttgaaggctgctctttcctcactgaacagtctcgacattcttgtcaaacatgagttgcccgtaggttatgagtttattccagaaccctcagttccactgcaccgatgcgtgtgtctgtccttgcgccactcccacactgtcctgttaccatcgcattgtaagtcttaaaactgggaatgtaagtcctttgacttttttctaatccaatactatgaacaaaatagatggcagatgaaattgaaaatttcctagaaaggtgcaaactactcaaactgattcaacaagaaatagacaatgtgaatagatatataacaagtgaagaggttgaattagtaatccaaaaacacccataaagaaaagccaaggaccagagagcttcccagctaaattctaccaagcatttaaagaattaaaaccaattctcacaaactctttcaaaagactaggagagtgggaaatgcttctcaattcattttatgagaccaatattactctgataccataatcagacaaagacattgccaaaaaaaaaaaaaaaaaa

SEQ ID NO: 1915 - DNA, 643 bp, Homo sapiens
ggcacgagacaaaacaccatgacacctattttcaaatgcttcccagggcaaccccagcgacctgcagggcagtccggaggtggggcagggtgggaaaggaggcctcctaacttccaatccaggacgctctccatgttgtctgaggcccttgtgatcccatctcttggcttcttcgtctcctctctctgttctgaccagtggcctctttcggcccagcccagctcatggctctcggcggccttcccaggccccgcttttgacttttggcagcctcttcaggcacagaacttgatctccagtcggcctttgcaggcccggcctcctgcctctcgaaggcctgcacgggcccggcctcggcctcggcctcggcctcacagcggactctccacgcccagctagctctcgcctcactgcggcctccccagtccaaagctcctgcctttcggccacttcggcaggtccagctcctgcctgccagtggcctctttaggcccagctcattctcacgtcggccattccaggccccgtgtttcccttccggcagcctcttggcctctaatttgtttatcttttgtgtataaatcccaaaatattgaattttggaatatttccaccattatgtaaaaaaaaaaaaaaaaaaaaa

SEQ ID NO: 1916 - DNA, 1323 bp, Homo sapiens
aggcccagcaccacgggcctttccccaggccagggggaggaccacctaaggattcaagggcagctcctgttttcttggttctgtgaacactcgagtctgagccagcccctcaggaattgcctcaaaagagaaaaacaaaaaaaagtcctccttcccaaggcctgctactccaaggtttggctccatcccttgcctttgggtcctgcctatttccccactcctggtctcttatctttggggccaccagtggggagtcacccgggccccaatccctctaaggcgctaagttgaaggaggccttcccagagtgactattggtgccaaagtcccagttcctgttggacttggggtaaaaacaggagatggtgagtgggtgtaaggcccaaatgcccagagaagttaactcgaacccatgggacctgtcccagcctgtcagtccctgatgagtgtaacttccttcccctgggggcctggccyttctctccaacccagtggccatgctttctcacccagccttgtgcccggcctgcatttctgtatatattgctgtgtattgtgtgtatgtatgtattcctggacaagtgtgttcatctgcagcccttgcctgaggataaggtttaggattgggtaaagatcagaataccagggccagctaaggcaacgactccctccccaaacccttgggacctcagccagtcccaaggctgccctgacaatcaggcaggctccccaccgtgaggccaagcctcctctgccactgccagcatggcccaagggaggcttggccttgggcttgccagcctcagctctgccctgacaagggtcttgtatccagggcagaggcctgaggtgacccaggcttgctttgtggctgatgccagcaggcttggttctagtgggcaccactggtgggcaacctccataactggcccttaggccctaccttcctacacagctaggctataatgggcctgagtgagagggtagcttccccagccccaagcacaggcagaggggtggagagcaatttttggttttatttttgtttctgaagtggtgcctgtacctccagcccccagggggccttccctggccacacttctctgccccacccaggcatcgccatcccagcactttgctccatgtcacccgtaagatgccctttgctgaatgtacctgagtgtatgtatttaaaaggactcacatgggcatcagagaatttatggctctgtatccaataaaaaagatggtgaaactggwmaaaaaaaaaaaaaaaaaaaaaaaaaaaaaaaaaaaaaaaaaaaaaaaaaaaaaaaactcgag

SEQ ID NO: 1917 - DNA, 2083 bp, Homo sapiens
  misc_feature (1781)..(1781): n equals a,t,g, or c
  misc_feature (2057)..(2057): n equals a,t,g, or c
ggtgtccttctaatgccatctctgtagaaaatgtgccctgtaagtcagtttcctggaagctcttctgtgtgttgtcccttctccagcagtgggtcgattgtcagggagcccaggatggaagctaagtgcactggtcattggttgttctttcagtgcccttcagacagcccttgccctggtggtcttgtgccctccctgtctgtttggtgcctcttttataaattagtgatgacttcaggaaatggtcctggatttcaaatagctattcctggagacattctaattctgtggtttaaaccttaaaacaaacaaaccaaagtaattccctggatattggtggctactggtgtgaagagcatggtgcggcgcctgttacttggatgagctttgatcaaagaatggcatcaaatgataacagacattggaggtataagtgattacaaggagaatcatagatctaaataaaaatggaatggtggttaatactttaattgatcgagatgatacagcaatatttttattcatatatcagtacaatatttaacttttaaaggaagtgatattcatcttagcagaggtctcttagcaccatatttgcaacattggatgttatccattgagccttgttttggggaggaaaaaagacaccaactttcttgagtaaattgttctctgaaggtgttttacacaggaatacaaatttgcctgaactcaaaagggtcttgtttacagtactttaatcttgtttttcacttcataagccctctgtaaactgaaatacagagctacaggcaaacctcattttattgcacttagctttattgctctttgaagatactctgkttttttttttttattcaaattacagatttgtggtaaccctgcctcaaacaagtctgttggtgccatgtttccaataacaggtgctcactttttgtctctgtgtcacattttagtcattatctcaatatttcagactttttcattactggtatatctggtatggtgacctgtggtcccagatctttgatgttactatkgtcattgktttggggccccataamccatgcccatataacgtggcaamccttatcaataagttttgtgtgktccgattgctycatgaaaccagctgttccccctctctctccctcttctcgggcctccctattgcctgagacacccaatattgagattatgccagttaataaccctgcaatgcctctaaatgttcaaatgaaaggaagaatctcatgtctctcactttaaataaaattctagaaaggattaaacttggtgagaaaggcatgttgaaagccaaaatacgctgaaggctagacctcttgcaccaaacagccaagttgtgaatgcaatgaaaagttcttgaaggaaattaaaagtgctacttcatagaacacatgaataataaggaaaacaccttatttctgatatagagagagttttaatggtctggatagaagatcaaatcagccacaacgtttccttaagccgaagccagagcaaggctctaactctcttcaattctctgaaagctgagacaggtgagggagctgcagccaaaaagctggaagctagctgagggtggtttatgaggtttaagaaaagaagctatctccgtaacataaaagtactagacgaagcagcaagtgctgatgtagaagctgcagtgagttatccagaagatctagctgggataattgataaagctarctacactaaacaacacattttcactgtaaaccaarkagccatctyggaanaaagatgctgtctaggactttcttagctagagagtacgaggcatcgccttttcttaaagcttgaaaggacaagctgacccttggtaggagctaatgcagctagtgacactaaattgaagttagtgctcattttcccttctcaaaatcctacggcccttcagaattatccttaaatctactctgcctgtgctctaggaatggaactacaaaggctagataacagcacatctgctgacagcatgatttactgactattttaagcccactattaagacntactgcttagaggcaaaaaaaaaaaa

SEQ ID NO: 1918 - DNA, 917 bp, Homo sapiens
ggcacgaggctttccggtacaggatacagctgtgcttctcctactttgtatttgccatatacggatagatacaaaacctcatgactgatttttccctatttattttgagtggctctgtataccattttcatgtattacttcatttttctgtttttcagttatgttctctgttttcgtatatttttggaagctagttctaagtcatgttttgtaggaaataagcaatcttaaatacatgcataggggatttctttcttctgaggatccttaatttcttctatttttaagattcaaattgaatgattaatcagtaacagtttatgttttaaataaaagtctttaaaatgttaaatatcagcctttcatttctgatatttggtctttgaagaggaaacataatgcaatagtaattcataatagtggagggttctttcctcacatccttgaaagccaccagtcttattcttcagcctggctcttgagctattgctgtattaattttaaataggttgtgatagcataagctgatggaagcctgcagagatctcactttgaaatggtgatacattacatgggaaaagattagagaggtgttttatactgcacatcggtgaggcctaataagaaagtagaatagacgtaaaccattgttttcatcatcctttaagacagggatttcagactcaagaaccaggcagctacctatttaaatgagtcaagtgggccctaatgtaagacaatgtgatgggtaaggattgattctgagggaacaggagcaggcatgccctctctaacagaggccgtcagttctgctgtacctgaaatgtgggcattgttgctggcgattccacacttacatctaaaatttcctgattttttaagaatgacaataaccaatttaaaaaaaaaaaaaaaaa

SEQ ID NO: 1919 - DNA, 1014 bp, Homo sapiens
  misc_feature (820)..(820): n equals a,t,g, or c
cccacgcgtccgatttgagatatttccttttgattcagacgtaacactgtgctttcaagcttaacatcctattattttcctatatatagctagtgtttatgaaagtttctctactccttatttttaaatccatataaataaagcatttattggatttatactgaggttgaattaaagaagtgtaagtttatttttagcatcgtgagaagtgtctcacttaaggtagtttttaatctggttgtgtttgcaatgaaacaatattagacagttttataattgatttctttctttttcctaccatttcatcagcaagtcccttcagctctttcaaaataaaccctgaatctgatcattgtggtctgaatcactattatattttgccagaactgctacaatagcctccaaattcttttttcctcttttcttacactcaattaatgaaaattttaccttacccaagtaaaatcagctatgcccagtgatcttttaaagacmaatcagattaacattcacctgctgaaaacccttcagtgaatttctgtctcttctagaataawwtctaaagtctttattgtggcctccaatgctctatctagtctggcccatatctatctctaactgtatctttgatcaatctctatcttaatcattgtgttccaggcacactaaccatctcgctattccttgaatagcatatttctgtctggaatggtcaactaacagcaaagaggacagtgtggttggataggaatgagagagggaggaagagggtgatgaggttacagaggtaattaggggaaagattatatggtcttatagnccgtagtagtacttttagatttttctctgaaaaaatagagagccattttagggttttgaacaaaggactgatatcttccacttgccatttaaaaggatcattctggctgttgcattaagaatgactatagaggctgggagtggtggctcacacctgtagtcccagcactttgggaggccaaggcgggcagatca

SEQ ID NO: 1920 - DNA, 1720 bp, Homo sapiens
ccacgcgtccgaaactttgtgctggaatcatgataactgcatctcacaatccaaagcaggataatggttataaggtctattgggataatggagctcagatcatttctcctcacgataaagggatttctcaagctattgaagaaaatctagaaccgtggcctcaagcttgggacgattctttaattgatagcagtccacttctccacaatccgagtgcttccatcaataatgactactttgaagaccttaaaaagtactgtttccacaggagcgtgaacagggagacaaaggtgaagtttgtgcacacctctgtccatggggtgggtcatagctttgtgcagtcagctttcaaggcttttgaccttgttcctcctgaggctgttcctgaacagaaagatccggatcctgagtttccaacagtgaaatacccgaatcccgaagaggggaaaggtgtcttgactttgtcttttgctttggctgacaaaaccaaggccagaattgttttagctaacgacccggatgctgatagacttgctgtggcagaaaagcaagacagtggtgaatggagggtgttttcaggcaatgagttgggggccctcctgggctggtggctttttacatcttggaaagagaagaaccaggatcgcagtgctctcaaagacacgtacatgttgtccagcaccgtctcctccaaaatcttgcgggccattgccttaaaggaaggttttcattttgaggaaacattaactggctttaagtggatgggaaacagagccaaacagctaatagaccaggggaaaactgttttatttgcatttgaagaagctattggatacatgtgctgcccttttgttctggacaaagatggagtcagtgccgctgtcataagtgcagagttggctagcttcctagcaaccaagaatttgtctttgtctcagcaactaaaggccatttatgtggagtatggctaccatattactaaagcttcctattttatctgccatgatcaagaaaccattaagaaattatttgaaaacctcagaaactacgatggaaaaaataattatccaaaagcttgtggcaaatttgaaatttctgccattagggaccttacaactggctatgatgatagccaacctgataaaaaagctgttcttcccactagtaaaagcagccaaatgatcaccttcacctttgctaatggaggcgtggccaccatgcgcaccagtgggacagagcccaaaatcaagtactatgcagagctgtgtgccccacctgggaacagtgatcctgagcagctgaagaaggaactgaatgaactggtcagtgctattgaagaacattttttccagccacagaagtacaatctgcagccaaaagcagactaaaatagtccagccttgggtatacttgcatttacctacaattaagctgggtttaacttgttaagcaatatttttaagggccaaatgattcaaaacatcacaggtatttatgtgttttacaaagacctacattcctcattgtttcatgtttgacctttaaggtgaaaaaagaaaatggccaaacccaacaaactaacattcctactaaaaagttgagcttggacatattttgaatttttgtaagtgaagatttttaaactgactaacttaaaaaaatagattgtaattgatgtgccttaatttgcataaatcataaatgtaaaaaaaaaaaaaaa

SEQ ID NO: 1921 - DNA, 1730 bp, Homo sapiens
  misc_feature (455)..(455): n equals a,t,g, or c
gggtcgacccacgcgtccggaaggatggaaataggacccttgagccgattactccgtgatggctcagactgcatgcaaagactaggatggggctcttgctctggctcagtgttgggcatacttcccctcagaaggcccccgccaaagagcttagattttggcttgggaaaaacattacccctcttcagtaaccctgaagctctgtatttggtatttgggattcaggtaggtcagctgctcatgttgmctggcccaagtgtgtaagaacaaacagtaatgccagtcattttcccactaagatgttccagtgggaaggggggctggtatgaaaaagagaatttttttttctctgtgtaatgataactttgttcacgtagtaagaattcagttcttactattggtgtgaatagggggtaaatattatttttatttaaaagcaaaattaaatactttcntgaacctcatccatgtttgcaagtagatgtctactgtggttgccttttttcctcaagagaatattttaataaacttgtaagtaattttgttacatttttctgtctgcctgtgtactatgtattaaaactcacatgggggctttcatgataaaaagataaactgttaagcagttggaaattttcagtgttcttccagtggacacctgccttggggcaggagcttctttgtagtcattattgatagaatggggtcacacacattgtgctcctgcattaagggcagctccaaggtttggcatgagactatgcatgtgtgtggacacggaggtttctcagtgagaaagagtcctaagacagtgaagtggaacgargccttaaaaatcatctagtcagctgacttccagtttcaggttctcaggctccttttggtattttaggaagcccacattggactagagagagacttcagaccaagatatcatgtttatgttcttttagctagaattgtgttaaggcaatgactatctcctacagcttagaagttctgaagtacatggccaggagcggtggctcamacctgcaatcccmgcactttgggaggccgargcgggtggatcacccgagctcaggagtttgagaccagcctgggcaagatggtgaaaccctgtctctactaaaactgtgaaaaacacattagccgagcatggtgatgcacgcctgtaatcccagctacttgagaggctggggcacaagaatcacttgagcctgggaggcagaggttacagtgagccaagatggtgccagtggactccagcctaggcaacagagcaagactctgtctcaaaaaaaaaaaaaaaagttctgaagtacagttatatatgtatttgattaatacaaaagtagagaagttaatcactccttaaaaaatgcagtttgggaggccaggcacaatggcttatgcctgtaatcccagtactttggaaggccgaggaaaggcggatcacttgagtccaggagtaggagaccagcctgagcaacatggtgaaaccccatctctacaaaaaatacaaaaattagctgggtctggtgacgtgtgcctgtggtcccagctacttgggagactgaggtaggagggtcacgtgggcccaggagattgagacttcagtgagccatgattacaccactgcacttcagcctgggcagcagagtaagaccctgtctcaaaaaaaaaaaaaaagggcggccgctcttaaaagatccaagctttacgtttcc

SEQ ID NO: 1922 - DNA, 2018 bp, Homo sapiens
  misc_feature (672)..(672): n equals a,t,g, or c
  misc_feature (1609)..(1609): n equals a,t,g, or c
attggctacaaacccactggtataagcagcagtgtgccttctctctaactgtggacaagtcgggcatgtggcgggtgaggagcccccaaataactcttgaactggaaaataactctttagctatatactggcagaatatttgaacaactctagcaagaaatgtcagtttagggatgcctcctctaaatgggggcttagaatataacattttgcaggaagtcctttctgatacatagctgactagatgaaggaccagattaacaagttcatgagttgtaaatataaaagttgtgtaccacgataaaaaagaaaaagaagtatggctgcactgttgatggctggtcaaacagcccccaagaatcctggggtgactccaatactgccaccttttctctgtgggtgcagttgcctgcggatgtgtgtgcacatctgtgcctcggtatgcacactcgagatgcccgctctcatagacggtgcagagcgtcactgcattcctatctgattaatgtgaccttagtgttgtagatacactgtgtcactttcatcctccctcctccccacaaaagatgccacgagaactcgtgaactgtgataagcaatgaacagaataactgttgaagaagcacctcatgaacctccccagagaaacgggatggaggagcacccagggtnctcttgctctcttgcctgcgctgccatttccttccagcctgggtttctagctctttggggagattccccgttttgtggaatgctttctgtgtttcctacttctggatgcctaaggagtggccagtcatactcctggctgaccactgccaggcaccgtggttttcctcactgaactcaaggagtcaccctccgtggggaggccacactcacagctccaggcctgccatttagccttggggcttggctgtaaagttgcccaagaggattacaggagctgccagccaagtttaatttggccaccttagagaactgcagcaaggccctatcagcttcccattagacaaacaactgcatttaaattaaataaagtttgcacctctagggagtgctgacctgaaaataagaaccttctgtctgtgattatagagtacacttgcttttattaattgctgattcttagtttacaaaaaaaaaaattagaaaagcattaccatttactttccaaggggcaagagattctctacaatacccttcccccaaccctctcctcaaatttccaaatcctaaatactttgaagaaatttgtgtgactgtttaaaattgagtatttccttctaactattgtcttttgaaaagggatggttcaccaggccagtgatactctatggactgcattttgggacctctaccccagcaaggatacaggttcctggggtcttgaagatgggaaaagttgtctcagaatttacccaaatgtcgttctcaccataaaagatatacttgtagaaatgagaagcttcagtataactcaaaacactggacgcagcaataactataaacattttaatttcaaaaacaaaggtgtgtgcgatgttgtgtgcacagtaagggttgcggggcttggagaacaagcacgcgtccctgtgaagcccgcagngtgctggcggcccaccaatcgcctggactacagtgaggagcattgtgtgactccgcggtggatttccatgcaccgaatggactcagtttctaaactcacatcctaacgtatcctggcttttcacagaatactggagacatgactgcatgcatgatcacggttcttgttgtgaagctgccaccatgttacgcttaacagctgcataaatattataaagaaatagggttttcttgacacttagatttaaccttaatgcatctgcccagctgatggtatcagacgtgctgctgttcatttctttttcatggtaacagtaatgtataaagtgccgatgatgtaaaaaaaaaaaaaaaaaaaaaaaaaaaaaaaaaaaaaaaaaaaaaaaaaaaaaaaaaaaaaaagggcggcc

SEQ ID NO: 1923 - DNA, 1020 bp, Homo sapiens
ggtggaaatgaaataaatttgtacatgtaaagcacaagaacatggaaggtgcttactaaatgttacttatctttactttctctgccttggtcctctcatacccactcctgattttaggtgattgggtggaaatggccattgaacatcatactctactaacaaagaccatttgagagttagattaatctctttcccgtttcaacaacaggaagaagccccacaaatcaagtatttcccttgttctataccttgtcattttgttgctactcccaccagccaaagagggaggaaagtttcttggtataattaaaatgttataggctgggtcgggggggctcatgcctgtcatcccagcactttgggaggctaagacgggaggatcgcttgaggctaggagttcaagaccaggctgggcaacatagtgagacccatctctacaaaaaaaaaaagatagccaggcatgatggcatccatctgtagtcccagctacttgggaggctgaggcaggaggatcacttgagcccgagggtttcaggctgcaggaagctatgatcatgccactacactccagcctgggcaatagagcaagactgtctctctaaaaaccaaaaattgttatagaatatagagttgaataacttttctggaatgagaaagctctcattttagatatccattcattcattcattcaatagtgtgctggatgccargaatttaatggtgargaaaatagacatgatctctgccttctgargctcaaratcctccctctatttttaaaaatcaggtttattgaagtataattgatgtacagtaaaawttactgtttttagtggaaacttctgtgggttttggcaaatgtgtaaccaacacaattaagatcyagaacatcctgtctctcccctcccaattttcttgtgctcctttggagtcaacaactctcccccaaccccatggcctccatgactttttcaaaaaaaaaaaaaaaaaaaaaaaaaaaaaaaaaaaaaagggcggcc

SEQ ID NO: 1924 - DNA, 957 bp, Homo sapiens
cccacgcgtccggagactgagtggcttaaacaaaagacatttattttctcacagtcctggaggctggaagtccaagaccaaggtgttcgcagggttggtttcttctaaggcctctctccttggcttggagatggccctggttggtcttctgagtgcaggtgtccctggtgtctctttgtgtgtccagattttctcttataaggacactggtgagattggatgaggggccccctgacggcctcatcttaatgtcatcacctctcttatctccatatccattcacatacgggccattgcgagctaccggggattaggggttcaacacataaattgggggtgggggggtgcagctcagcccataaacatgccccctctggctcgctctcccagggcatccatcgtagcacttagaaaaatgatcacttcttttttggctttgtggtggcgtgtgtgtgtgtgtatttgtatatacacacatatatatataaatacacagacacacatatatacaaacacacgcattcattttcgtccacagttcctggctcataactcccacagcccttgttacactcttttgttacaacattgggtgtgtcaggcctcaggagacaatcactctaacctcctgcccttccttttacctgcccaagacaggactctaatcttccctacctttctgatggtgggtcataaaactcattccagagacggtcccaccccatatcctgctagaaggaatgctgctgtcatgaagcttccataaaaaccaaggggactggattcagagagcttccagataactgaacatacagaggttctagaagggtggtgcgcccagggagggcacaggaagctccatgcccttccttcatacctcaccctatgcatctctttatctgtatcttttataatatcctttataataaaccagtaaatgtaaaaaaaaaaaaaaaa

SEQ ID NO: 1925 - DNA, 1034 bp, Homo sapiens
cccacgcgtccgttttatttaatttatacttaagtttgaatagccacacatggctagtggctatcatactggtcaacatgggctatctaattctgatgtacagtctctgcatcatcattccattttctaaagtgggtttctcccacagcagttgttaaaacaaggatttggatacaaagagattatttaagaggtgatcctagacagcaggagagggattgaggaggtgagatggagaaggtgaatactagtaaaagactacattgatatgctgtaggcacttgaggtttctgtttgtttgtttgtttgtttttttggaaaccttcgagagacttatggaaaacactgtataattgtttcattgaggagcacggaactgatcatgtttattcaccaactctcatgcctttttggttgaaggatgctcctaggggcattcacacctgctctgaactccttcttcatctccagcctgcctcccttatgggccatttcatgccactgtacctagataaagccttagggccaagagattcaggtgcttgaggctgggtctatccttctgagctgcaaataacttccagggtggatcaagggaatgtggggtcaggatagattatattgcctctcatttacaaccaaccatattagctcatattagtgttttatctggaataggaggagaagcatttgagactgttagaaaaaaggttctgctatttaaaaaaaaagttttgaaactgtagctctaaactacattcctacctgttttcctgaccacctcaattactaacttgtatcgtgttccatattatttctagcacagcatggattctctaacattcttgcagtctgggccctgcaaggtagctgtaaaaatgctgccctgggactttctcagtggagacataagaagactcaagcattccagaaagtgtttgtttggttggcttttattgatgtatataaaaagattagagacagcaagagaagaaaatcagagagaacctatacttggttaaaaaaaaaaaaaa

SEQ ID NO: 1926 - DNA, 1150 bp, Homo sapiens
ccgggtcgacccacgcgtccggttttggtacaagttcacagagaatcaacgttcatggtcggtgtgatgagagactgagatgtgaattgctcagtagagagttggcggtggcgtatcccagagtgtacttagaaacatgaaaacttctttgaaagggagctgatcacttttggaaaagatttacagttcttaggaatgcaaatatttgtttcttttccttttcatctaaaacatttaccagataaagttgagtccagagacaactaactaataagagaataattttaatatgtttttccattttggtgtcaacattgcatggattttttttcttgttccaagactggctttttccagtggaaacttagcagttaaaattaatttgttccaaatgaaatattgcatctgaaattaggctggaattgcagtagacgttcctggttcttgcaaaccagaggacattcttgaagctgtgtggtcccaggctctcccctctctggtttcctgtgttccctccctgcagcctcagactcgccctccagggctccactgtgcttttccaaactctcatcctttcctcccaggcgtcctgtgcagcacgccactgcctctcacttctcacatccacagctcctgcttggtcagtgttcctagttgagtgtcagaaattgaacaacccaattagctggtatttcatttgtaccaacctatgaatggaggagtagccttaattcccttgggggcttccacttctaagagaactgttttccgtccaggtaggcagacctgtcatggctgaagcttcatcacctggcctggtcatagcccccaggccctgtaggcaggacaggggcttggcagattggcatccttcccacaaaagcatgaaagtaggatgtctgtatgtagcgacaacaaatacaagaataaggagagtttaacaacattctcaaagttggtggaaaagaaaaagaatcaatgaaaacatcaccctaaaccagctagtgctttctgtttacagggatcagaccccttcccacttaaaaaaaaaaaaaacaaaaaaaaaaaaaaaaaaaaaaaaaaaaaaaaaaaaaaaaaaaaaaaaaaaaaaaaaaaaaaaaaaaaaaaaaaaaaaaaaaaaaaaaaaaaa

SEQ ID NO: 1927 - DNA, 1761 bp, Homo sapiens
ccacgcgtccgaagagaccttgggtaataagcttgccactgagtggctgctttatgtcctcaagggattgtaccatatcaagcactcagcattggtgtctgttgctaatggtcaggcattcagtagtggtggtagctagatcagccttggagagagagagcccatcatttcaggccatcacgactaatccattcatttatgggccctttgtaaggattgagatggctgaggacaggggctgacaggcattcattagaccagtcatcctgtccatatgcttattcagtgcttcttctgccacacgtgctctctggtgggctctagtgtgagacacaaagatcaacacattatgtgcccattcttatagctccagccacatgcctcttcctcagacatgcttggtttcaatcctctagtgttgttcccttgaggcccttgaccaagcaaccaagccattctccaccacctagaagtctgtgtatattcttacttttggccgcttctctccagacacaaagcagatgaccactggacttgaattggcacccagagttattttgggtgtgtctttagtgcagcaccagtccatctttttagctcacgccagcatatcatgctagcctaatccttataaagcccttttcctgctccttttctattctgtcaactgtctgtggagaaatccccaaggggccataggtattatgtctggaattggttctctccgaggggttcttggtctcgctgacttcaagaatgaagccatggaccctcgcagtgagtgttgcagttcttaaagatggtgtgtccggagtttgtgttttcagatgttcagatgtgtctggaggagtttcttccttctggtgggctcgtggtctcgctgacttcaggagtgaagccacagaccttcacagtgagcattacagctcttaaaggtggtgcgtccagagttgtttgttcctcccggtgggtttgtggtctcactggcttcaggagtgaagctgcagacctttgcagtgagtgttacagctcataaaggtagtgtggacccaaagagtgagcagcagcaagatttattgtgaagagtgatagaaaaaagcttccacagcgtggaaggggacctgagaaggttgccgccactggctcgggtggccagcttttattcccttatttggccccgccctcatcctcgtgattggtccattttacagggtgctgattgccccattttacagagtgctgattggtccgtttttacagagtgctgattggtgcgtttacaaacctttagttagacacagagtgctaattggtgcatttttacagagtgctgattggtgcatttacaaacctttggctagacacagagcgcttattggtgcatttacaatcctttagctaggcagaaaagttctccaagtccccacccaacccagaagtccagctggcttcacttctcaatcctccttctaaacaggacaccacaagtgttgttgggaattggccgatgaccgctctagctatttcctgctggataggggcaaagaaggggccctgcagttgtagtgtcctccagaggggaactctttaggccagtgaaagggccagcaggttggtctggggtcctcagtagaagttgttagttgagctcatttggggttccatttgtaagaccatctgtagcttgatggcctcaattctagaggaaacaaatttgacaaggagattaaaaatacagggtccaaaggcaaaaaaaaaaaa

SEQ ID NO: 1928 - DNA, 616 bp, Homo sapiens
  misc_feature (610)..(610): n equals a,t,g, or c
ccacgcgtccgaaaattagttaggcgtggtggcacacacctgtaatcccagctacttcggaggctgaggcacaagaatcgcttgagcccgggaggtgcaggttgcagtgagccaagatcacaccactgcactccagcctgggcagcagagtgagaccgtgtcccaaaaaagagaaggagaaacagagatcatgtggaaaaagttattttttatttatttacttagttttcagtttggtttgagactcgtgttttaaaccagagggcatggttactgagggataacatcaatagaactcctataattgaggggataattatcaaggtattagatgattcactggctattacaaagaacacagaaattatgaaacctggttctgtaacttatagtttttcatattatttttataccatggataactcttctatgtgtattcataggtgtaagattactggcagtgtcatatgaaacaacatattacattttttaagcctggaaagcatctagtatggctgtgcacgtagtgatgacattgactttttttacttaaagaagagctaccacttcaaataagaaaaaaaaaaaaaaaaaaaaaaaaaaaaaaaanaaaaaa

SEQ ID NO: 1929 - DNA, 573 bp, Homo sapiens
gctccaaactgttttccatagtggttgtactgatttagatttccaccaagagatatgtatgagagttcccttttctccacattcttgccagcatttgttattgcctgtcttttggataaaagccatttgaactagggtgagatgacatcttattgtagttttgatttgcatttctctgatgataattatgttgagcactgatatggtttggatctgtgtccccaccaaatctcatgttgaattgtagctcccagtgttggaggtggggtctgctggagggtggttggatttctcatgaatagtttcatactgtcctcttggtgctgttcttgtgatagtgagttctcatgagatttggttatttaaaagcgtacagcacctccccgctcactctctcttgctcctgcttccgccgtctaagatgccttactccctctttgctttctgccatgattggcagtttcttgaggcctctccagaagcagaagctgctgtgcttcctgtacagcctacaaaactgtaagccaattaaaactcttttctttataaaaaaaaaaaaaaaagggcggccgc

SEQ ID NO: 1930 - DNA, 1384 bp, Homo sapiens
cccacgcgtccggaggaattgctatttaagtggaaagtgcttgaacagccaaatgagcacctgtcatgtttattttcactttgaaaagtagaaacatgacagtatagtttccactgcctatccaatatgaacttctggcattcttgttatcttctcaggaactgcactgtttgcttcttgtgttcaattttttttttttttccagggatgaggatgtatctctcctcctgaaactttcactctaaaatatgcccccaaatactgacattttcaagcttgtgcttttttacttgatatctgattttttttaaatttttatttaatagggagaaggtcatgacttatggaatttactctaaggatagggatctgagcaggttcctgagtacttgaaaggctttatttacctcttacacttttttgttacatccaggtttttgctcatttctctatcatttgtgtcttgaactttacctgaaatgcatgtcttgagtgcctactaaggtccaggcattgtgctggcagatttgatatatttttgtttattccttattacaggactattacatagtagactctcattctgacactcactttttttttccagaaaaaaaaattaatggagattgattgctaatgggtacagggctgcttttaaggctatgaaaatgctctaaaattagtttgtggtgatggttgcacatctctgaacgtactaaaatacattgaattatatactttcttttttcttcgttttgcagcttttgctcaaaggagaattagatatttaaaatgagtgaattgtatggtacatgaattagatctcaataaaactattttaaaaaaagaaactaaagcttagagaagtataatatcttgttcaatatgacactacctggtaaagcttttgtccaaatttttctgagaccaaagctattctttcttccactgacgcatgctatctctactaattatatagccacggtatcctttttctttaaaaatgtaggaaaaaatggctgggtgcggtggctcacgcctgtaatcccagcactttgggaggccaaggcggacggatctcttgaggtcaggagtttgagaccagcctggccaacatggtgataccccacctctactaaaaaaaaaaaaaaaaaaaaaaaaattagccaggtgtggtggcgtgcacctgtaatcccagctactcgggaggctgaggcatgataatcacttgaacctgggaggcagaggttgcagcgagtcaagattgcaccactgcactccagcctgggcaacagagtgagactccgtctcaaaaaaaaaaaaaaaaaaaaaaaaaaaaaaaaaaaaaaaaaaaaaaaaaaaaaaaaaaaaaaaaaaaaaaaaa

SEQ ID NO: 1931 - DNA, 706 bp, Homo sapiens
gcccacgcgtccgtgcagagagactgggtgctccgagctccactcaggtgaaagaatttgcggcaattgttgacgtgaaagaagaatctcattacatcttggatccaaagcaagcactgatgaagctcaccctaggtactgcaggcagtttatttccccaagcattgtacattttgcttgacttcatatgggtaaattttattgatggctctcattacatttagttgtggggtgatgtcaccttcgtagctcattttaagtctttagaccaccatcagtcataattttcaaagaagctaattttgtctattaaatggaacagaaacttcctcactctgaattttggataagtttgtcatttagcccatggtgggggtaagagtcccactttctaaattggtgatttctgtcacatgtctaaggtagaaccagctgcaggcagtggggacttggggactagaacaggcagggaggtggagagctattctggtgggatgtcctaggggctgatgaaagtgagccttgacagcagctttgttctaaaggagcttaaagagaaagcagtggccgggcgcagtggctcacgcctgtaatcccagcactttgggaggccgaggcgggtggatcacgaggtcaggagatcgagactatcctggctaatgtggtgaaaccccgtctctactaaaaatacaaaaaaaaaaaaaaa

SEQ ID NO: 1932 - DNA, 419 bp, Homo sapiens
ccacgcgtccggaagaggaggtttgtgttgccttcagatgactgttgatttaattgacaggcagcttttcttcattgtgtgctttttgcttttgctcacaaaagtgcattcactattctatagtatgttgaaacttttaaatggaaacggcttttcattaacaaaggaagcattttcttccccccttccatgccttagctttctccgctaagtcttggcttcttcagcagctgtacctccaccagaaatgacaaaaggtgcaattgtgctaggagatggcgatgaagatatgccagtggagttttgtgtgtgggctgctggggactgttttccttctgtgtttggttttgttttatttttgttattccagaaagttgagagcacatctaaaaaccaaaaaaaaaaaaaaaaaaaaaaaa

SEQ ID NO: 1933 - DNA, 1025 bp, Homo sapiens
gccaagcttcaaacatagatctcctgactccattcatatgaccctataaactgtctcaaaacaaaaagataaattaatataaatatttattgaatatgtctttgtagagaaagcataataagcataaagggcaatgcgttaacctttatcacaagcaaccctattggaatgtgtcaacttatcagaatgaatcaggccagaatatcaagtataaatgaagcctgtagttaactgaaagttgcatatcaatcaggcactccagtttctctcctcaaactctgaatattcaatgaataagataaagaaatggctaatttgattttacctttcatttttttgacctaattctaaggtgactactcactcctcaagatttaactaatgttgctttatttttatccctctggggagacagaagagatgattgggaaacacatgtttgaagtttgtaagttctgctgctttcaaccccacagatgtctcttactgcccacttggsscctkgtgattaagcaactagatttggagccagtcaggcttttgtttagacattttaactttttcttgctttccttgcaaactcctcagccttcagactggttggaaagtaaatgtacaatcttacataaattttcaggtaatagcatttcagctttttccccargattttttgcttgggaggagacagattagactggattcggagtcttgattttgcaaaggtaacaaaagacatgtttttttataagacttttcatcataagtttattttattcaacagaagcaaaatctaatataatggaaaaaataaagatctgtgataaatctgatctgtgtkgataaacacaattagaaagatttaaagattaagtattgaaacaaactaccaaaatattttaatactgatttgtaaaaatttcagtacatttttcttctttgcttaattctactgggtcctgtttttcatcaaaacattctatcatgttagtatacaatagccaaaaaaaaaaaaaaagggcggccgc

SEQ ID NO: 1934 - DNA, 1390 bp, Homo sapiens
  misc_feature (1301)..(1301): n equals a,t,g, or c
  misc_feature (1308)..(1308): n equals a,t,g, or c
  misc_feature (1327)..(1327): n equals a,t,g, or c
  misc_feature (1347)..(1347): n equals a,t,g, or c
  misc_feature (1355)..(1355): n equals a,t,g, or c
gttgaggtgagtcagtttctgatgcagttgggctccaccgcatgctaggttccagcccacttatgctcatttgggctaccacatttgtaagatctagcattgcttgctctctgtctgctcttttttccccaaggaatacctttctgtaactctcatctctccaaagtcctggaaatctacctcgatgaaggatgaagagaaagaagacgggaatcacatcaggcatttagaacatagcccataattaaccactcattttgcccttctggcatgctgcactcacccaatttgtcacaaagagagcagtacgggttggtgatggcactggtgatttaaatgaaaaatggctctttcttacttattctaagaagccaagttgatttttttttatatatgttaccttccagaccctgcagatggagaaggcccagagacattaagctcagcactctctaaaggagcaacagtttacagcccttccagatacagctaccaggtgagatgagaaattgctggtctctagccataggagtgtgttctgggtcccaaattgtcctggtcatcctttgccattgagatgctgtctttgcatatagtttcagcagccttggraaataagtcatcatctgcttgtcctcaggtaataaattatgccagaagatgaatacggtgatcaaagacagacattttactgcctttggtttccyaaaargawtacatggttaaaagatgaagaaaaaagaatgtagggtattataaatgttcaccagccatttaagggacttgttcgcgtccttattcgtttcctcccaactttgtctagctcctgcagtgtgatagtcctcggacagaatcacaaagcctccttcagcagagttcctcccccttcagaggacatcctacacagtctccaggatacagttatcgaactactgcactgagacctggaaaccccccctctcacggttcttcagaatcatccctctcttccacgtcctattccagccccgcccaccctgtgtccacagactcgttggccccatttacggggacaccagggtattttagcagccagccacattctggaaacagcactggcagcaatcttccaaggaggagctgcccttctagtgstgctagccctamcctgcagggaccctcagactcgccaacctcagattcagtttctcagtccagcacaggaactctgagttccacctcctttctcagaactctaggtcgtcattggcatcagacttacggactatcagtctgccagtgctgggcagtagctgttacangcctcanggtatctgcggttccaatnacagactaccacacgtggantgggtggnacataccgattcagcatgaaggtagagtagactaa

SEQ ID NO: 1935 - DNA, 783 bp, Homo sapiens
  misc_feature (14)..(14): n equals a,t,g, or c
gactcactataggnaaactggtacgctgcaggtaccggtccggaattcccgggtcgaaccaccgtccgcggacgcgtgggttttaagttgtcgtcttgcctctgtgctcttgaagttttgagccctttgcatttggcagtgtccaggcattcaggcctggagcccgtgtagtgccagtgcctccctccacgctcttggcctggttgacctcacctaaaccctccaaaaagcagatggtcagactctcttcccttcaaactcttctctgccctgactcacacctgggccatttcatccagtgagactgagggaggagcgagggagtccatgtttcccctccatgacgccgggacaggaagctagactcagtctcttccatatggccaggaaggggagtacctgactgcccatcttggttttgggagagagaaaaaccagtgctcagtctgggaaatgaggttttgggggattgtgataaaatagaggacaggactctgcaggtcaaggacagaggtgcatcctgagggcgcactgcagtcagggccaagtggctcactctttgcagctttagcagcaccttggatatagttgctgctccgtaaacgtgttgattgacagaggtgcaggtaaaaacctcagaacagttgggcttaaggatgctacaaaaaaagctctgggatgggatttaattttttttttttttaactgttgttatcagcctggccaacacggtgaaatcccatctctactaaaaatacaaaaaaaaaaaaaaagggcggccgc

SEQ ID NO: 1936 - DNA, 909 bp, Homo sapiens
  misc_feature (909)..(909): n equals a,t,g, or c
ggctggggtttgccattttgtgtcttttttagtgttcttccaaattaaattttcaagatcaaatatgggactcattgtcctgtttatggagctttttttcttttggttgactattcttttgtttcctacagtcttcaacaactgttagtgcttacaatggatacatcatgcatcttaattgataggatggatatgataataccttttttggtccaaggtcccgctcattaaaaaaaatagtttataaagctgaaaagtttttatttctattttttgtaaaatgattttcatgataggattttatataaaggggaagggttttttgtatcatttttataacatttttgaaatgagtacttattctctttcatcatctattttagactcacagttttatgagtaatgcagtaaaggtcatgtggcacattagtaaaatatgttctgaacacagaaactattctccttatcacaaattaaattttatgttaagtttgaagagcactggcctggggtatactttgctgtgaaaagatcattttggtcacttaaattacaatagaaatatttgtgttaagaaaattaagtaaaaattaggctgggcacagtggctcgcacctgtaattccaggactttgggaggcctaggcaggtggatcacctgaggtcaggagttcgagaccggcccgaccaacacggtgaaaccctgtctgtactaaaaatacaaaaattatccaggcgtagtggcaggagcctgtaatcccagctccttgggaggctgaggcaggagaatcgcttgaacccgggaggcggaggttgcagtgagccgagactgtgccactgtaccccagcctgggtgacaagagtgaaactctgtctcaaaaaaaaaaaaaaaaaaaaaaagggcggccgn

SEQ ID NO: 1937 - DNA, 766 bp, Homo sapiens
  misc_feature (758)..(762): n equals a,t,g, or c
ccacgcgtccggtctcagcaacaagagcaaaactccatctcaaaaaaaaaagaaaaaagatggcttgccctggcattggcgtttgtccttcttgtacacacaaaagcatcatgctttgtacactgttcgtttttgtttcgttcactgtcttcacggtaaagatgaactaagagccactgagaaggctgtttatgggaaccagaaggttgtttgcttcccttaagttcgctcttcctggcacctggtgcccttgcagcccatggggaatgtgatggtcacgttttctcgtctctcctgcctcatcccatcagccagttcactgctgtgcctgaactcctgtacagggtgtctggtgcatgtccacataacaaaaagatggtactgatcattgagtttatctccaaaaatttttttcaatttgattgtagaaaatacatttttaggcggggcatgatggctcatacctgtaatcccggcatttggggggccgaggcgggcggatcacctgaggtcaggagttccttacagcctggccggcgtggtgaagccccgtctctgctaaagatacagagactagccaagcgtggtggcatacgcctgtaattccagctactcgggaggctgaggcaggagaatcgcttgggcctgggaggcggaggttgcagtgagcagagattgcatcattgcactgcagcctgggcgataagagtgaaactccgtctctaaaaaaaaaaaaaaaaaaaaaaaaaaaaaaaaannnnnaaaa

SEQ ID NO: 1938 - DNA, 712 bp, Homo sapiens
ccacgcgtccgggcctccaccacaagaaattggctccaaacctattcccattacatcatcacccactaatgtcattacaccagaatgaaatctgctttgaggcttgtattgttgttttccttccatttctttcccctcatcatttcctttagaaggaaaagggaaggaaaaaaaaagaaaaaaatcagagacctgtaaacatttaagagtgaattggacatccccacaggctaaacctagagttgtcagctttcattccattctgctgtgatagagtgttctgcccagtatgtatccacatggagcctggaaagtaacaagtctggtcatgtgacaactggctttggtgctttgctttcagcccctcagaattagttcctaatggctcacatagctccctgccagcatcccgtcactggcacgttaaaccttttcaaataattcctcagaatagagattcttaggagagcactaaatttctccattctttgtgtttaattaaactgttcttgcattttaatatttgccagataagcgcttaagacattacgatacaggttgagtatccttaatctgaaaatctgaaatccgaaactttttgaccctgacatgacgctcaaaggaaatgctcattttcgattttggatttcagatttgggatgctcaaccagtaagtataatggcaaacttattccaaaaaaaaaaaaaaaaa

SEQ ID NO: 1939 - DNA, 680 bp, Homo sapiens
cctactttgccagtacgatctgttcctctctctctctcgctccaaaagactaatctgcacactctgttacagcacttgtctaattgtgctgtagcgtttatttacatgtttgtttctcctctagccagtgagcacctctcaagcagaattatcttccttgtttctctggcaccctaaatatttgttgaattaatagtccttctcttcttttgtaattttgctttctgtaatagaagcttaattttaagtatagttatatcagtaatcaaaatgaatcacacactgagaaatcaatgtggatgccctttaagggttctgttattttttttattgccattgagtaaaataagatactctgtgataaagtatattagcattaaagtgttcaaatctgatctttattagtaggcctcaagtgaatccttgctgacatttaaggtttatgacatttccttcacgttcgttcttgactggaaggcataaatggctgacagtaaagagcaattaataattttccaagtaaaacattttcagggacatctgcctttattgctccccagatgagagtacagcctgtttcttatgtgttccaaagatgatttccctatcagctttttggtcagttaaccaaaaaaaaaaaaaaaaaaaaaagaaaagaaaaaaaaaaaaaaagggcggcc

SEQ ID NO: 1940 - DNA, 1004 bp, Homo sapiens
ccacgcgtccgcccacgcgtccgcagtgttgtacagcagatctctagagcttattcatcagttaaggaagataagctcaggaaaatgtatttttaatgtgaaatgtcaaaaggacttaggaaagaaagtcatgttttcttcttgctgttcagtaatctagtcattaccaaacaatgttatcaatgcataacatataaacatttcataattcattttcatttctagaggaaactagtgagtaaaaacaatatcttcaggtagcagtgaaaggaagcagagatcatggccgtttggatttgagtgaattctttcaacacaaatcaatgattttatagacatatataggtttttgtcagggttccttagcttttgcatctcaaaatctatttttgctagggaactgtataatagctcatctgtcttaccctccttgtctcagagcccaggcttctgtgccttttccaatctgaaaagcctcctccttgtctctgtccttttgagcctcatgtaactttttaaaggcccactttaaattccaccactctataaaaagcttctccaactattctacctttcaatggctctcagtttcctccataatactttggaccttttagctgatcctgactctcttgcactacagtgtaaaggttctgtatttatgggctgcatactggcatgatgcttctcagttatgtatgatatcatagtcgctttttcaggacaaaactgtgtcacagtgttacagcaaaatctataacacagtgtcggcatgtaaattcagctcagtgaatgcttattaaacattaacgtaatccttgttgctttctttattcaaccctacagtgaaattttctgggtgcttggagtaactaaaatatatttgcagatatttaatttcaacttttacacattaaacaagtagaaaaccatgtcttcaaaaacatattctttaaaagtgattgtttagggcaaaaaaaaaaaaaaaaaaaaaaaaaaaaaaa

SEQ ID NO: 1941 - DNA, 1305 bp, Homo sapiens
  misc_feature (329)..(329): n equals a,t,g, or c
gcggaacgstggtgtgggtttttaaaaaacaaaacaagatacatgctgacatttctggtttggcaggcagagcttgttctgctccccaccctcccttttcccatagtaaccatttataggacatctcactgttgtctactctgtgttgcctctgcttccctgcctggtagatctaggaatcttaggatttcttagttttagctggtgatccgtatctttttcttaattccattgtaacttcagcttttcttattgcttgtaggaaggctgtttccattgaatacaaacaaaataaaagcttttattcttaatcttagagataggatgtntgtatttaaaaataattgtgctgtcaaaattctgtcaagttggcttttaccacattagttttttttaatgtggtttatatgaccctgragtaccttgtcttctcactgttaaattctcaactgagttgtccctatttaaagtgtgagactgtgccagtttgattttaaaatattgcaagtgcgttatggcaagataaaactgcaaagaaagaaccttcatgtccctttgattataaatgcttttggcacttgtttctactttttcctaatgttttttgaggaaagaacctccaactctccagacaggtctgggggcaaatgactaaaacatgaactgaggccctgggctgtctctgtgaggatatcccctctattctctctgaaatgtcccagcatgtggtgcatttcttgttagtgtggactcctctgtatataacacatcttatttatcttctgtgcataacatgaagtagtgccctaatgcaattccaggatgtaattcagcatttctataaaaatacagtgtttttctacatttgcatcaaaaaataaccagataattatatttattaagaaaatagcatttttggctgggtgtggtggctcacgtaatcccagcactttgggaggccgaggcaggcagatcacttgaggtcaggagtgaggcaggcagatcacttgagatcaggagttcgagaccagyctggccaacatggtgaaaccccatctctactaaaaatgcaaaattagcctggcgtagtggtgcatgcctgtaatcctagctactcaggagactgaggcaggagaatcacttgaacttgggaaggggagattgcagtgagctgagattgtgccactgcactccagcctaggcaacagagtgagactctgtttcaaaaaaaaaaaaaaagggcggccgctctagaggatccaagcttaccgtacgccgtgcatgcgacgtcatagctcttctata

SEQ ID NO: 1942 - DNA, 813 bp, Homo sapiens
gaagaaaacgtgaccgtaaatatctgtaggatataggaaccagagagtagatggaacatgactagtaagagacttaaatccaggggacctcaggaggtaatacaaaagaattttgtattacggaattgtttacctagaatttgaactcgggagagaatccctgtgtaggagtatatttctgcaaagaaagtgcttaaagaaatggttcttccttcaatctgtttctttgatttgtatcagattagggaaggggaagctatttgttggacttttcattttggtaaaatctgaatgagtattgagaatggctcttgagacagtagtgcactttatattgctttccttactggtttttatgtatgatttattaataggcaaaaatctcattatggtgagcttaatgacaaatcagtttgttttaaacacattttattaaaatacatttagtttaaaaagtaaatttccaaactaccagctgaatacaactgtccagattcttgcaaggaaaaccaaatgctagagaaggccaggcgcgatggctcactcctgtggtcctagtattttgggaggccgaggcgggtggatcagtttagctcaggagttcgagatcagcttaggcagcatggtgggaccctgtctctacagaaaatacaaaaattagccggaggggaggcatgtgcctgtagtcccagctactcgggaggctacagcagggggatcgcatgggcctgggaggcggaggttgtagttagccaagatgacaccattgcattccagcctgggtgacaggagtgaaatcctgtctcaaaaaaa

SEQ ID NO: 1943 - DNA, 1694 bp, Homo sapiens
ccacgcgtccgaagtaatttggaaaattttaacattcctagtgacttaagatttgattaatagccttgttggtagtattttatatattcctaaatactattgtaaaatactccctcaataaatcctgcatgcctttaaaagtccctctcaaaataatctgtttattcggcaggtaattgccaatgtgttttttggtgggaatctttcatcggttttccacattgttgtaacagtgatggtcatcactgtagccacgcttgtgtcattgctgattgatgcctcgggatagttctagaactcaatgtgagtacgtgcaaagatttaccccttcactctaaaattctctttaaaagataatgattacatttaacataagatgtattttccttaacaaaagtgtcacttttgaagtgggaatcaaaatatgtttgtaatagtaaatatttcaatgatgattctgtgcactttgtgggactatatagttttaaagtagtggttgtttagagacatatggggtcgtcacaactgggtaggcagtgctgttggcctctagtggataaggccagggatatacatcccacaatgtgcaggtctctcacacaaaaaattatctgatccaaaatgtcaattgtgctgaggttgagaaaccctggtttagagtactttgcatatctcatttactataacacataaatgttactaaaaatagctataaattaagtggatttggactttgctgaataataatattctagtgaaatttatgagaaatatgaaaggattcaagttatatccattcacttgctatgacaaaatttctttttctttaaatatttttctttctccagatctttcttttatagtctgcactgccatcaaccaaatagaagtcctcataatatcacagttgaattaatcccagctctgtttcaactatcatgtatttaagttctgctttcagtttatcggcattttcctaccagagcaagtataaattccgttgcttctaccttcttgtcttctgtgtaaaactatttcccatttacttcccaaaatttatgttcagctctagtcaatctaattttttggcctgtgaataagccatatcaattctttccattattctttgtcctatctgctttttatttccgataatgattatttttctttcatttctgtccaaattttacaaaaactttaagatccagtgcaacttctaattcctttattcacattcactgatcatatatttattgagtaattactatgtgccacacaatagaatataaggatgaatgcaataagaaaggacctgtgcattctcacaaataaacataaaagttcaactgcaatataggtgatgaagacagaggaggccaggaacggtggctcacgctgtgatctcagcatttttggaggccaaggtggatggattgcttgagcccaggagttggagaccagcctgggcaacgcggtgagaccccgcctctacaaaaaattagccgggtttggtggcatgtgcctgtggtcccggctacttgagaggctgaggtgagaggattgcttgagcccgggaggtagaggtttcagtgagctagatgcaccactgcactccacctgggcaacagagtgagacccggtctcaaaaaaaaaaaaaaaaaaaaaaaaaaaaaaaaaaaaaaaaaaaaaaaaaa

SEQ ID NO: 1944 - DNA, 865 bp, Homo sapiens
ggcacgaggtgaggtgtgccttttaccttctgccatgattgtgaagcctccccaccacatggaacggtgacagattgactgggatcccctcgcacatcctcaacagctccccatcagaccggcagattaaccagctggcccagaggctgggccctgagtgggagcccatggtgctgtctctgggactgtcccagacggatatctaccgctgtaaggccaaccacccccacaacgtgcagtcgcaggtggtggaggccttcatccgttggcggcagcgcttcgggaagcaggccaccttccagagcctgcacaacgggctgcgggctgtggaggtggacccctcgctgctcctgcacatgttggagtgatggtgcctccagcaaccgctggggagtgtgtccctgagtcatgtgggctgaatcctgactttcactcagagcaggtggttttttgtgtaggtttgttttttatttttgatgatcttcagatggaaggagaaaacagggtttccactagacattacttgaaaggccagattactcagcagatctcccatgttggctcaacaattctttgtttttaattgcttgaagattgcattgttgtaattgttcagtttttaaatgtgtaatggcattttaatagactagtaaatcacagtggttcaaaatatatatccatatatatatatatccatatatatatctcatgtcatcacattacaggcaggtgtctcatatgttaaacatttacctgaatgttgtctgaggactgaactgtggactttactattcataatgataaaataataaaatgcgaattactatttataatgtgcctcactcatgagaaaaaaaaaaaaaaa

SEQ ID NO: 1945 - DNA, 337 bp, Homo sapiens
ggcacgagccagctttaaaaatataaatataattcttttcattttagatggaaatcatttatgtcacattactcataaatgtcgtggtggtgcatgcctgtaattcttggagatctctcaggcagatgtcacccaagtattctacataatatgatttccatctaaaatgaaaagaattatatttatatttttaaagctggtatactgcttttgcaagttattttttttttaaagcaaaggtattttaaaggacaagtaacaagggacagagtaactattaaattaattatcttcttttaaagtgcaaaaaaaaaaaaaaaaaaaaaaaaaaaaaaaa

SEQ ID NO: 1946 - DNA, 1777 bp, Homo sapiens
ggcacgagactccatggattttgatgacacgtggcaccctgccacccacccttctggggctgtccttcctgtcctcacagctttagcagaagccctgccaaggagtccaaagttttctggccttgacctgctgctggctttcaatgttggtattgaagtgcaaggccgattactgcatttcgccaaggaggccaatgacatgccaaagagattccatcccccttccgtggtaggaacgttgggtagtgctgctgctgcatccaagtttttaggacttagctcgacaaagtgccgagaagctctggccattgctgtttcccatgctggggcacccatggccaatgctgccacccagaccaagcccctccacattggcaatgctgccaagcatgggatagaagctgcatttttggcaatgttgggtctccaaggaaacaagcaggtcttggacttggaggcaggatttggggccttttatgccaactattccccaaaagtccttccaagcatagcttcctacagttggctgctggaccagcaggacgtggcctttaagcgttttcctgcacatttatctacccactgggtggcagacgcagctgcatctgtgagaaagcaccttgtaccagagagagccctgcttccaactgactacattaagagaattgtgctcaggataccaaatgtccagtatgtaaacaggccctttccagtttcggagcatgaagcccgtcattcattccagtatgtggcctgtgccatgctgcttgatggtggcatcactgtcccctcattccatgaatgccagatcaacaggccacaggtgagagagctgctcagtaaggtggagctggagtaccctccggacaacttgccaagcttcaacatactgtactgtgaaataagtgtcaccctcaaggatggagccaccttcacagatcgctctgataccttctatgggcactggagaaaaccactgagccaggaggacctagaggaaaagttcagagccaatgcctccaagatgctgtcctgggacacagtggaaagccttataaagatagtcaaaaatctagaagactagaagactgttctgtgttaactacacttctcaaaggacctctccaccagaggtagcttcaaactctccagcatgtaataattctatcacaaatctctcctgaggcttaccaacatctaaatgactttgcatttggggagattcaatgatttggtttgtaaagcaagggtctgctgcttggttttcccaggaaaaatgaacaaagatggagagagtccagaaacagaactacatatatctggaaggagccttctcctgaaaattttgcaggacagttccacttacctaaatcagatgaaacacacacacaaaaatgagtttgtaagcattcacaagggtgaaattcaactcacctgtgatttacttataaaattaatctcttcataggaattatgtgtggacttcatgagcctcaaggttttagagggatgtgaacctgcatgtatattttctgacagtggagagggctctggtgcattgtgtcaccaacagatctcctagaccatggcttattaccaagccctccacagtgcaaggggtgctactggggaatgggtgggtttaaatcctgcctctgccattcactagatgtagccttgagcatgttaccattagccctctgcctcagtttccctatttgtcaagccgaagtaaaaagcagtctggaaaaatcgcaaaaaaaaaaaaaaaaaaaaa

SEQ ID NO: 1947 - DNA, 1940 bp, Homo sapiens
catccgcggcgcgggagacgagccggccgtcccgggccggggggacccgcccgccatggccaccaaggctcgggttatgtatgattttgctgctgaacctggaaataatgaactgacggttaatgaaggagaaatcatcacaatcacaaatccggatgtaggtggaggatggctggaaggaagaaacatcaaaggagaacgagggctggttcccacagactacgttgaaattttacccagtgatggaaaagatcaattttcttgtggaaattcagtggctgaccaagccttccttgattctctctcagccagcacagctcaggccagttcgtcggctgccagcaacaatcaccaggttggcagtggcaatgacccctggtcagcctggagtgcctccaaatctgggaactgggaaagctcagaaggctggggggcccagccagagggggctggagcccaaagaaacacaaacactcccaacaactgggacactgccttcggccacccccaggcctaccaaggaccagcaactggtgatgatgatgactgggatgaagactgggatgggcccaaatcctcttcctactttaaggattcagagtcagctgatgcaggcggcgctcagcgaggaaacagtcgtgctagttcctcatccatgaaaattccccttaacaaatttcctggatttgcgaaacctgggcacggaacagtatttgttggccaaacaactagcaaaacccaaagagaaaattcccatcattgttggagattatggcccaatgtgggtttatcctacctctacttttgacttgtgtggtagcagatcccagaaaaggctccaaaatgtatggtctaaagagctacatcgaatatcagctaacacctactaacactaatcgatctgtaaaccacaggtataagcactttgactggttatatgagcgtctcctggttaagtttgggtcagccattccaatcccttctcttccagacaaacaagtcacaggccgctttgaagaggaatttatcaaaatgcgcatggagagacttcaggcctggatgaccaggatgtgtcgccatccagtaatctcagaaagtgaagttttccagcagttcctaaatttccgagatgagaaggaatggaaaactggaaagaggaaggccgagagagatgagctggcgggagtcatgatattttccaccatggaaccagaggcacctgacttggacttagtagaaatagagcagaagtgcgaggctgtggggaagttcaccaaggccatggatgacggcgtgaaggagctgctgacggtggggcaggagcactggaagcgctgcacgggcccattacccaaggaatatcagaagataggaaaggccttgcagagtttggccacagtgttcagttccagtggctatcaaggtgaaacagatctcaatgatgcaataacagaagcaggaaagacttatgaagaaattgccagtctcgtggcagaacagccaaagaaagatctccatttcctgatggaatgtaatcacgagtataaaggttttcttggctgcttccctgacatcattggcactcacaagggagcaatagaaaaagtgaaagaaagtgacaaactagttgcaacaagtaaaatcaccctacaagacaaacagaacatggtgaagagagtcagcatcatgtcttacgcgttgcaagctgagatgaatcactttcacagtaaccggatctatgattacaacagtgtcatccgcctgtacctggagcagcaagtgcaattttacgaaacgattgcagaaaagctgaggcaggccctcagccgctttccagtgatgtaggacagaacgggccttgaagagaatgccgcgtgctttctcctgacttggggcaatgcaattcaaaactttttttcccctattattcagaaaaaaaa

SEQ ID NO: 1948 - DNA, 1469 bp, Homo sapiens
ggcacgaggaaaagcgttctaggctttcaaagtaacattgcatgtgaggatggagaatgataaaacgattcctgccttcaaggcatcgtcccggtgtttgtcagctgtggggcaacagcaccctctgtgtcagcaacctgcatgaagagcatcatccctgcaagtcctcaaggcctggggaggcctcatcccctcctcatttcagcaacagcacacaggacaatacgctctagaagaactctttgacttaaaggtatatgattgtatttgttcctttaacatgaacgtgagtctggagaaacagctacggccatcccagccctggccaaggggaaaatgccggaagactccagggtgggaggaagcgcgtcccaaggcccaggatctgcgaggcgacttggggaaaacgcaggcaggacctgctgaagctcacacccgtggaccacccagactgcctgccgctacaggatgccctccgcatctcccaggacttctttccggcatcagtgtggacattgaccccactggactgcagtcacagtggactcccaaggggcaggatccacctctgatgttcagtgaagactaccagaaaagtctgctagagcagtaccatctgggtctggatcaaaaactcagaaaatacgtggttggagagctcatctggaattttgccgatttcatgactaaccagtgtggttgaggagtgggcccagggcaccttcaaactcaaccccaatgatgaggacatccacacagccaacaagtgccacctgaaggtggtcacggacctcaggttgtggatgtggcagacctgcttcacgctctcgggcctcctctgggagctcatcaggactatgggggattgggcagaggtcaggttcctgctccagcgtggctcctggactggcgccagatgctggccctgggggtttcaatccaagcataattcagtgaagcatgtgtttggcatgggacccagctcactgttttaggtcagcccaagactaccccgtcggtcattctgttcctgccgtcctgtgagagccccaagccaacaaggcccactggtgtgtctcatgaataactttatccgggaatcttgatggtgacctggaaggcagatggtaccctcatcacccagagcgtggagaagaccacgccctccaaacagagcaacaacaagtacgtggccagcagctacctgagcctgacgcccgagcagtggaggtcccgcagaagctacagctgccaggttatgcaagaagggagcaccgtggagaagtcagtggcccctgcagaatgttcataggttccagcccccaccccacccacaggggcctggagctgcaggatcccaggggaggggtctctctctgcatcccaagccattcagcccttctcgctgtacccagtaaaccctcaataaatatctttgtcagccagaaaaaaaaaaaaaaaaaaaaaaa

SEQ ID NO: 1949 - DNA, 1013 bp, Homo sapiens
  misc_feature (10)..(10): n equals a,t,g, or c
  misc_feature (13)..(13): n equals a,t,g, or c
  misc_feature (41)..(41): n equals a,t,g, or c
  misc_feature (150)..(150): n equals a,t,g, or c
gaagagcatntcntccgtggcagaaacctgaaaatgccccnggggagacacatgcacaagacagtgagtgatgcagccatttcccacgtatctcacaatgtacttctctggtcttactaggactaaatgagtatctcagtccataatcanagggagaagaaccaccacagaccacatacctggggtcttgaaaataattccatgcatgtgggactttcagaagctgtcccatgtctgtccagaagggccccacaatataatggggggactttgtatgtggctaagcatggagcaggggcaggatkttcagtcccactcactcccttggccaagtgcccttgtgcagtgaacaaastgcacaaccatgctgggcagaagcattttatatcagtccccttcggacttagtctcacaggcatcatttgatgggggatgggagatgaagtggttcttcgttttctagatactttattctataagttggatcacctcaagcaaatgcgtgagtgcagctagccaagttctctatctcacagtcttcatatggctggctgtcgctgatgagtgagtgagctacgaaatcagcttaaagcacaacatgttattttgaatttgaataaaataggraaaggcagagtgcattgtgtgaccatggggtaagtaagacactctccctttctccttctcagttttcctgtcataaaaggacmaactactatctaaggtctccgtagttaaaatctttttgttgttttttttttatttgagacagtttggctcattccccaggctggagtgcaatggtgctatcttggctccctgcaacctgcgcctcctgggctcgggcagttctcctgcctcagcctcccagctactcgggaggctgaggcgggagaatcgcttgaacctgggaggtggaggttgccgtgagccgagatcgtgtcactgcactccagcctggcaacaagagggaaactccgtctcaaaagaaaaaaaaaaaaaaaaaactcgag

SEQ ID NO: 1950 - DNA, 1265 bp, Homo sapiens
gggcgtgcaggaattcggcacgagctgagaccctcaccccatcacaaaacaagtcagacagttatggggcgggcacagagggtcaggttctgtcaatggcggatggggggtgccctgggttgggcatccaggggtcctgggtgaagttgatctgcccggacctctgtgacctctttgcccaccatccccagcctcacacgccaaggattacacagtggagaatctcatccgcatgggcatggcaggcttggtcctggtgttcctcgggattctgttatttgaggctcagcacagccagagaaacccccaagatgcagccgggaggtgaacagcggagaggacaatgcacccttcagcgtggtggagctcagggacagatctgatgatcccagaaggctctggaggacaatctaggacgtccagaggggggtgagatttcaggccacacactgtggaaggtaatcatgtctgatcacaaattttgggtctccaccttacttccaatctatgttgtgaatgcccagttgagacccacggaaaagagctcatgggtgagtgtgaagtgcttctctgtcttaagttcccagagatccttgcctcttggaggccagcaaacactaactcttgaggaattcatgacaatatcatctgattcctccttcccagcttgtatggcagtctcccaccctcatgtgttcaatctgatgatcccaggargttctggaacaaaatctacagcctatgctttctggactatctgtcgatcattcctgaagagagggatcaatgttgaggtattcatttcacmtgatgaaaatgacaatatcaaatgtcagaggtagtagggctcacgtagaaatccaatacatccatggtaggactgcaaattacttgaatcaatttggggaaaatatcagaagtacccagtgaaaaagaagaaacatggccgggcgcggtggctcatgcctgtaatcccagcactttgggaggctgaggcgggcggacacgagttcaggaattcgagtccagcttggccaacatagtgaaaccccgtctctactaaaaatacaaaacattagctgggcgtggtggcaggtgcctgtaatttcagctactcgggaggctgaggcaggagaattgcttgaacctgggagacggaagcaagttggcgccagttggtgcagtgagccaaggtggcgccattgcactccggcccaggtgacagtacgagacttcatctaaaaaaaaaaaaaaaaaaaactcga

SEQ ID NO: 1951 - DNA, 2122 bp, Homo sapiens
  misc_feature (845)..(845): n equals a,t,g, or c
  misc_feature (848)..(848): n equals a,t,g, or c
  misc_feature (1100)..(1100): n equals a,t,g, or c
  misc_feature (1745)..(1745): n equals a,t,g, or c
ggtgcgtgcgtgcctgatacacatggagccgggctgcttcacacatctggtgaggtcgttagaaggtcagataaagaagagggcggacttgctaaccaagctgttagaagaaataatgggagagaacattccttcatttcaggaggacacagagcaggctaggtctgccgcgaagactcctatagagagaagagtattcttaaactagattctgatggacgcaacaccagttgcataatggttatgacaatcagtgcccgggtttttgaccaggcatttcatggtcacccccacgctaatggaaagtttctggatcttattttgttatagtgagtgatttgtagttttcagaacggaggccaggccaaacgtattccaaatgaaaagagaataggtgtcaaatgctwwaccttwtatcttcgtgttggcactgttgccatccccgccctctcccgacatccccgcccttgaccagcatcyctggccttgcccagcattgtctatgtattggcactcttgccatccccgccctttcccagcagagtctcactgtgtcaccccggctggagtgcagtggcgagatcttggctcactgcagactcactgcaacatccacctcccgggttccagtgattctcctgcttcagcctcctgggtagctgggattacaggcacgcgccaccacacctggctaatttttgtatttttagtagtcacagggtttcaccatgttggccaggctggtcttaaactcctgacttcaggtgatccaccctcctcgtcctcccaaagtgctgggattacaggcgtgagccaccatgctcagccctactcttgtatttttnttnttttttttttttttgaratgragtcagagtctcaccytgttgcccaaggtgragtgtascggcttgatctcagctcactgcaacctccccytcccaagttcaagcgattctctgcytcagcctcccgaatagctgggattacaggcatccgctgtcatgcctggctaatttttgkatttttagtagagacgggggtttcaccatcttgaccaaactggkcttgaactcttgacctcgtgatccagctgcctnggcctctcaragtgttgggattacaggcgtgagccaccatgcctggcctcttggaatatttaataagctaaaaaattcttatacacaggtagattaattaggtagccaggagtggcccctgaaagtatgtctggcaaaacctagaactgcatcctagccatcactgtaccttctgccctccctgctgtctcctctgccagttacagttaaaaggttgtgggtgaggacgctgggcagagtcccaggcgtctgctgtcagctccccagcccggcctgcctgccgagccatctgggcgtcccacggtggagagtgtggtgcttgtgacgcggtggtgctgggagccatcctggtggcagatgtgggctctcactgcaagtcagtgtaagtccccagggactgtcagcagcacgtcctgctgcccctctctctgcagaagccctggtaacctgcgtttggaaaaatctctaaggatttctgaggagctgtcaggccatgtccttgtccaccctgtgtggggcacggcttcgacatggctctgctcccgtcgtgggctgagaaggagcaggtggggctgtgccttggaaaggaggccctcccgacatgcctttgtgcgaggtccctgtccatgctgtctccatcccggnrccttacggcgatgggtggccacagagcctattccaagagtctggtttagggctgggtcttcccatcttcacctctgagtcttaggcgatgcgtgaccacgcagccccttccaggagtctggtttagggctgggtcttcccatcttcacctctgagtcttaggcggtgcatgaccacgcagccccttcccggagtctggtttagggctgcgtgctcaagagtctggtttggggctgggtcttcccatcgccctggaggaggcttttgtctcatctcatgattcacattaaactctgtgccatgaagcttaaaaaaaaaaaaaaaaaaaaaaaaaaaaaaaaaaaaaaaaaaaaaaaaaaaaaaaaaaaagggcggcc

SEQ ID NO: 1952 - DNA, 643 bp, Homo sapiens
ggcccttttggttagcatcattgactaatactgacccaaacagctctaattcttaagccccctccaaaaaaaaaagcatacatatttttatttgaaatgaaattattgatagtgattttttttcatttcttgtaaatatttgcaccaggaagccaaaggggggaaaaatcatgctatctgtactagaaaatttaacctgtattactgttatctaatatgctttagtggtcttcagactattcactaattaagcatgttctttaataccaccaaataatattcattgttatgcacaacaactgcaaagagattgagtcccaagatctacaaaggattgtgagagttggtggttgagatttgtcacaatcagaatgggactcaactggtacccacagtcttacatttactcaaatttaatccagttcaaaattttactactgcatgcttttattcaaatgaaccacaaatgcatgatttaaagactgctgggattacaggtgtgagccaccgcacctgaccttaaaccagcccttttggttagcatcattgactaatactgacccaaacagctctaattctcagccctactccaaaaaaaaaaaaaaaaaaaaaaaaaaaaaaaaaaaaaaaaaaaaaactcgag

SEQ ID NO: 1953 - DNA, 608 bp, Homo sapiens
agaactagtggatcccccgggctgcaggaattcggcacgagctcaaactttaaatgggtaagatgcccggctaattttttgtgtttttagtagagacagggtttcaccgtgttagccaggatggtctcaatctcctgaccttgtgatccacccgcctcgacctcccaaagtgctgggatcacaggcgtgagccaccacgcgcggccagggttctttttgtatgcttttctctctgctgcatttgggattttgtgcatatgagtctaacttaatacttttccagatggctatccctatccctgggcagttggttaaaaagtcgtttttcccctcactgatttgggtcgcagggactgggcctgttcctgtgtcttctggtgcttatcccaccctgttttcattacagtaagtttcccctgagctcataaagctggtcctctttcactttcttttcatggtttttttggctgttacttgcttgttaatttttccatatgagcatggtagttccagaactgtggtttttactgggatcgtattaaatttacaaattgtatcggaaaaaaaaaaaaaaaaaaaaaaaaaaaaaaaaaaaaaaaaaactcgag

SEQ ID NO: 1954 - DNA, 1277 bp, Homo sapiens
ggcacgagggcaagcgcgctgcggttccggtggcgccatgtcgttctgcagcttcttcgggggcgaggttttccagaatcactttgaacctggcgtttacgtgtgtgccaagtgtggctatgagctgttctccagccgctcgaagtatgcacactcgtctccatggccggcgttcaccgagaccattcacgccgacagcgtggccaagcgtccggagcacaatagatctgaaggcttgaaggtgtcctgtggcaagtgtggcaatgggttgggccacgagttcctgaacgacggccccaagccggggcagtcccgattctgaatattcagcagctcgctgaagtttgtccctaaaggcaaagaaacttctgcctcccagggtcactaggcgggcagcccacacccaccccagacggccaccacactgaggccacacgttggccattccaccttggagttggaaccctgggcgtcgagacaggaaggcagggcgcagtggttgaaacatcaggacactcccaaggccccggctctgaacaagaccttttcgtttcttggaaaagagactcatttgctgatggttcatgccttctgctgggacaggcctgggctgtgcagccacactgtcggctgacttagccccctgctcactctaggtgcctccaggaggtgagccctgggtgcagctggtctctgaatgacgttacaccctcaccttcttttcctggccctgtctctggactctcccctgtgaggcccaattccaagacagactctcgtcctcaccgaagcttaggcccacatctcccaggctgcttaggagacagaatggaaacggaggccgcccctgccagccgccctggccctggtcactgcatgatccgctctggtcaaacccttccaggccagccagagtggggatggtctgtgacctgctgggaaggcaggctgatggggcacacccttggcctctcgtccacgaggggagaaacctaaaccctgtttcacaatctgtgcggaagtagcttgcctcacttctgcttaggaaagcggctgttgctccataactctaaccagcacagggctgaggcctgcagtgcacacctgcagggaggcccttcccaaggtgtggtgactgtgccttactgtacatgctcggaggcctggccatataggagggtgggtgatgctgaaatcaccccccatcttaagtaattactttctggagtaatcaggtggaaatccatagacaaatgaaaaaaaaaaaaaaaaaaaaa

SEQ ID NO: 1955 - DNA, 1982 bp, Homo sapiens
  misc_feature (666)..(666): n equals a,t,g, or c
ggattgtaacacatgacaaagtttgagaactactgacaggaagagtcctgctgctgagttctaggcccagttctgtcactggctcactaaatgacttcaggcatgtccctctcctattttgaacttcagttttctcttctgtgaaatgaaagccttggactaggcagcgtctaaaggctctgtcactccgtaattgtgtgactttggtaactttgtttgacttctccttgcttaagttttctcatatgggtatggtaaggaaaatacctacctcacaggattttctaacaattttgtgattattaagtatgatgactgatgactaatatatgacagccagctcttacacagtgctttctatatcctggactgttgtaagtgcttttaatccccgcaacaatcccatctccattttacaaatgaaaaatagaggtcacacggctaatacgtgtcagagtttggattaaaacccagaaaaatctgtccccagagacaatgattttaactagcatgcccttttgctcaataaatgttaattccctcaccctttccacacacacacagtctagctgaccattcatagacaataatcccactttcacagtccatccaacaagatcttaaaaaaaccatgaaaatctctaggtttcttttgcaaatagtttncaagcatttaaaaaaaaaaggtggggggcggggagggagtggccaaaatggctgactaaaagcagctaggatgagtggttctcatggaggggaaggaaaggggcgagtaaatacagcgccttcaactgaaacatccaggtacccacattgggtctaatcaaggaaacaactcgatccacagagaatgaagaaaagcaaggcaggatgacagcccacccaggagcaacatggagacagaggaacctcctccacccagggaagtcgtaagtgaatgtgcgatcctgggaaaccacgctcctcccatggatccttgcaacccttgggtcaggagatcccctggtgaacccactccaccagggccttcagtctgacacacagagatacatggagtctcagcagagtagccgcttgagcacgtgcagagacccagcagctttacatactccggccctgggtttcccagcaaaagtaactgcaactcctgcaaagcgggagattagacccctgtacatacccctaggaaagaggctgaatccagggggccaagcggcacgatctgcgggccccacttccactgcacctcacaggataagacccactggtttggaattccagccagccaccagcagcagtgttgcacctacctgggacggaggtcccagggggaagggcaggctgctctctgggacagagctcccagaagtggtaccccagaacagcacagcacagctgctcttcagaagcatggccagactgcttctttaagcaagtgcccaatctgttcctcctcactgggtgggacttttcaaccaaggcctccagcaacccctactggtgttctctggctgacagagatttgaattctccctgggacagagttcccggagggagggaggggccaccatctttgctgtttgggcgacttagctgttccggcctccaggctttggagagcccacaccaaccaggggtggaagcagtgccccagcacagcacagctgatctgtgaaagcatggacagactgcttctttaagcagttccctgatcccgttcctcctgactgggtgagacctcccaaccagggtctccagccttgtcctgcaggcgcatttgggctggcaacaggtctgtacctcgctgggccggagctcccagaggaagaggcaggatgacatctttgctgtttcacagccttcactggtgatagctccaggtactggaaaatccaaggagactaggaactggagaagaagcccagcaaagtacagcagccctacagaaacatggccagactgttaaaaaaaaaaaaaaaaaa

SEQ ID NO: 1956 - DNA, 1600 bp, Homo sapiens
  misc_feature (95)..(95): n equals a,t,g, or c
ctccattaagaattcattactaatagcagaagattttaaactatctctgttggtagatgaagtgattcttgcatagatagagagagccatttgtnaccacagctggctaagtccccctccttccttcacttagtctgtattagtttgctagagctgccataacaaaatatcagagtctgagtagctttaacaacaggaatccactttctcacacttctggaggttggaaacccaagatcaaggtgctggcagggtgggtttcacagagagctttcaaggaaggatctgttctgggcctttctttttgacatgtagatggctgcccttttattgcctcttcatctgtgtctgtgtgctcctgatgtctctctctgtgtgtccaaacatcatcttataaggacaccagtaggaacggattaggtcctaccctaatggtcacattttttacttgattttctctttaaaggctttatatccaaatacagtcatggtctgaggtacaaggtgttagggcttcaaacatacgaatttgtgggagtcaattcagctcataacatagtccatgagcttgtactaattggaagtgaggattaggtttttagttgtttccttccttccaattactctagatctttctccacttccagttgaccaatcccttcatgctgccagccccacatttgacttgactgcctttacctacactctccagtctttgttattctttccttcctcacatccaaatgtaactctgccacaacccactagacctctattaggaatcatttgaaaactaaaaagtaaaacatctatttgacccccttgacccatgctttctggctgcatattaaaaataatagcaaaaatcatgattacttttgcaccaacctaatattaaaatcatctggggtgttttataaaaatacctatgtctgggccctaataccagatcttctggtttggttggtggagtgaggcccgtgttcctgatgatctgaccactctcatacatttctgtctgtgcttctcttagcctaaaatgctctgtgctttttttccaactcatgaattcttatctattcgaatttataggtggactgtcacttcctcaagaaagcctccatcagttaccccagggtagtgtattagggtcagtctagcagagcagtaggtaacgtgaactaaaggcatagagacctgagtgtgaatgtcttactttgatctttcttaaccaggggactttgaacattttcttaagcctgttgagcctcattgkggtaatcatgaaaagggaaagtcttaaagcatgtcacatagggttgatgtgagaattaagaaaattaccatatgtatgcttcctagctggtagtacatgtccatttaataatctctccttctggtggcgggcacctgtaatcccagctacttgggaggctgaggcaggagaatggcgtgaacccgggaggcggagcttgcagtgagccgagacagcgccactgcactccagcctgggcgacagcgagactccgtctcaaaaaaaaaaaaaaaaaaaaaaaaaaaggaattcgatatcaagcttatcgataccgtcgacctcgag

SEQ ID NO: 1957 - DNA, 1818 bp, Homo sapiens
  misc_feature (1007)..(1007): n equals a,t,g, or c
cccccgggctgcaggaattccccacacctagcctacattctttttaaattttttgtttttagttgacctataatacttgtagaaagacaaagaatacagtgtgatgtttcagtgcatatatgcattgtataaggatcaaatgagggtaattatatccatcactaagcatttatcatttatttgttgtggtaatattcaaaatcttctcttctagctatcttgaaatgtctatcacattgttatttgctgtactcaccttactgtgtaatggaacaccagaacttattcttcctgtctgattgtaacttaatacccattgaaacaacttctcatggtcccccccttcccccatactccccagccataggtaaccactgttctattctctgcttctgtgaaatcaacttttaaaattcaagggtgaaattacacagtgtttgcctttctgtgccttgctatttcacttaacataatggcctttaggttcatccatattaccacaaacgacggaagaatattctgtttataatgttccattttgtgtgtgtgtatacacagacacacggcattttctttgtccattcatctgtagatgggtgtttaggttgattcatgtcttgactattgtgaatggcactgcagtaaacatgggagtgcaattatctcttcaatatactgatctcatttcccttttgatttacacccaaaagcatagggaacaaaagcaaaaacagacaaatgggattacatcaaactacaaagcttctgcacagcaaaggaaacaaacaatatagatcgaagagacaacctgaagaataggagaaagtacttgtaaactttatgcatctgacaaagagttaatatccagaacatataaggaactcaactcaatagaaaaaaaattcagttaaaaaatgggcaaaagacctgcgtagacatttctaaaaagaacacatacaaatggctgacagatatatgaaaatatgcttaacatcactaattatcangaaaatgcaaatcaaaaccacagtgagatactacctcaccccagtcagaatggctgttctcaaaaagacaaaggataacaaatgttgggaaggatgtggagaaaggggaactcttatgcacttttgatgagaatgtaaattagtacaactattatgggaaacagtatggaggttctcccgcctcccccagaggcaggttctctctctgttgcccaggctggagtgcagtggtgtaatcatagctcgcttggcctcaaacttatgagctcaagtcatcctcttgcctcagccttctgagtagctgggactataggtgtgtgccacgtcatctagttagttcttaattttttatagagacagtgtcttgctatgtttcacaagctggtcttgaacttctggcctcaagcaatcctcctccattggcctcccaaagcactgggctttataagcatgagccaccctacccagctggaggttcttcacaaaaaaagattggctatatatccaaagaaaataaataatacattctttcatagcaaaagagaggatcagcatatattaaagagtgcttattttaccactgaacaagttgtaaaagtagacgttcttaagctcatgagcctgtggtaaatactaggtagtcactcaaaatgtgtagatttcaagcatactttggactttggaagtagacacatgagattgtagcacggaatcctaaaatcctaggccaaagaagacttttagaaatcatagttcatactgtttcttttatgcaggatttagctaatccatcttagaaaaaaaaaaaaaa

SEQ ID NO: 1958 - DNA, 1264 bp, Homo sapiens
  misc_feature (1101)..(1101): n equals a,t,g, or c
  misc_feature (1136)..(1136): n equals a,t,g, or c
  misc_feature (1152)..(1152): n equals a,t,g, or c
  misc_feature (1156)..(1156): n equals a,t,g, or c
  misc_feature (1159)..(1159): n equals a,t,g, or c
  misc_feature (1170)..(1170): n equals a,t,g, or c
  misc_feature (1175)..(1175): n equals a,t,g, or c
  misc_feature (1197)..(1197): n equals a,t,g, or c
cgtgtgtgtgtgtgtgtgtgtgtgtataatcattgataaagacaaactaattttttgatctaaattctaagttaatttcgtcacttgttatgtgtgtcttatttttattttgtcagaccacagataatttgtttcttactccttgactaccttcttctttttagatggccaaatgtgatgcttgtaagcgacagggtaaactcagtgagtccttgaaatggcgaggggaaatgaaacatttctgtaacctgctttgtatcttgatgttctgtaatcagcaaagtgtatgtgacccgccttcacaaaataatgcaggtaaaattaaccttaggtactgaatggagtctttggtcaatactaggaactactgttcttttacagatcaggaactgtgtaaacagttgtcattaatttcatgaaacctcagtttccttgtattctgtatcaataacatttagctttttttgttgaacaccttatttcactgtcgtccgtgtgaagagaccaccaaacaggctttgtgtgagcaacaaggctgtttatttcacctgggtgcaggcggtctgagtctgaaaagagtcagtgaagggagatggggtggggccgttttataagatttgggtaggtaaaggaaaaaggggggttgttctctggcgagcaggagtgggggtcacaaagtgctcagtgggggagctttttgagccaggatgagccaggaaaaggaatttcacaaggtaatgtcatcagttaaggcaggaacaggccattttcacttcttttgtgttggaatgtcatcagttaaggcaggaaccggccatctggatgtgtacctgcaggtcagaggggatatgatggcttagcttgggctcagaggcctgacaccttagattaaagctgagtaaaaatgagtttttgattaaatagatttctttgagaatattgaatcaaataaactctgtaagaacttaaatttatgggaaaggataacagttaatggtttgtaattgagtataattggcttccttaaaaaatcctttgagactacttataacaaaagacataaagtcaaaatcacaggccttttaaatataccatgtgcangccagatgtgatggttcatgcctgtaatcccaccncctttggaatgctgangtgngangacggcttgangccangagttcaggggtggagtgagcngtgaccacagcacagcaatcccagctggatgatatagtgagaccctgcctctaaaaaaaaaaaaaag

SEQ ID NO: 1959 - DNA, 1366 bp, Homo sapiens
  misc_feature (758)..(758): n equals a,t,g, or c
  misc_feature (858)..(858): n equals a,t,g, or c
gaattccgtaacataaactgtggttctcagtctgttagctattcagatttttcacaatggtttttgatacgtaatgagaaataacctactaagtaaataggaccccttgctcaaagaagtgtgaaaagagcatttccttgctttcctgacatgctaggaagcaaggcaagcctaaggattcttctctgcttattcttttttctccctaggcacagttcgagtgacaactgctgcccatcttgcactgctggtggctaaaaacatctccttctttcccagcaatgtggagcaattttctgagggcaacattgatgtgtggtggattgtgcatgatggggggatgctatgctactaccattcctactgaaacagcacaaggtattttatacaactttttttttacaaaagtctttctcccttctgtcctggttcacaggacagacaaattcttcctctgattataatagtgttggggtttagaatcagaagagttggaagttattctaggctttcccatgatcccactttcaaacaagagaaatcattgtctttgtatttgatacctacttatctccaagtgaaattcagccaattaataaagttccatatgagccctaggggaaaacaacaagtgaacacatctttttttaaaaaatactgaaaacttaaggtatatgtatatgtgtgtattgcacgcatatatgcgctcattccgtggtaagactaattaaatgagatttaaaatagtaaatatatantctgcatgttgtcattgatacactgtctgaataaagtaccctcttaacgtatcgtgaaccatcttttcttttgccagtgttttcttgttatgaaattaangactccttaaaactgtattaaatgtggtgtttagtcaatcttttgccctaatacaataacatagcaagtrggaagctaggacaaatagccttatactacatatagcaaggtcttctagmccacaatgtctaatgtcttaggaaataaccttttttgcctccttgctctaatttttcacatgtgtatgtcactctctcaggtgtggcgaaagtgcagcatacggatcttcacagtagcccaattagaagacaacagtatccaaatgaagaaggacctagccaccttcctatatcacttacgcattgaggcggaggtagaagtggtggagatggtgagaaagctgagtttgagatacaagaggttcattcccccattcctctccctgtcttccttgaatcttttctggtttgggaaatttttcagatctaaatgtggattaatcccctagtgccaaaaaaaaaaaaaaaaaggaattcgatatcaagcttatcgataccgtcgacctcga

SEQ ID NO: 1960 - DNA, 2077 bp, Homo sapiens
  misc_feature (936)..(936): n equals a,t,g, or c
aattcctaagatgatagcagtaatgaagagaaatggaccttgagtttcagaaacttgtattctaatggaccttcaaaagatggcaagtattgtgtctggaattggtgggttcttggtctcgctgacttcaagaatgaagccacggaccctcgcggtgagtgttacagttcttaaagatggtgtgtctagagtttgttccttcagatgttcagatgtttctggagtttcttccttctggtgggtttgtggtcttgctggcttcaggagtgaagctacagaccttcacggtgagtgttgcagctcataaaggtggcgcggacccaaagaatgagcagcagcaagatttattgcaaagagccaaagaacaaagcttccacagcgtggtaaggggacccgagtgggttgctgccgctggctcgggcagcctgcttttattcccttatctgaccccacccacagcctactgattggcccattttatggagagctgattggtccattttacagagagctgattggtccattttgacagggtgttgattggtgcgtttacaatccctgagctagacacagagtgctgattggtgtatttacaatcctctarctagatgtaaaagtctccaagtcctcactagattaactagacacagagcactgattggkgtgtttacaaaccttgagatagacacagggtgctaattggkgkatttacaatcctttagctagacataaaggttctccaagcccccaccagattagctagatacagagtgctcattggtgcatccacgaaccctgagctagacacagagtgctgattggtgcatatacagtcctccagctagacataaaagttctccaagtcgtcacctgactcaggagcccasctggcttcgcctagtggatcccgcgccagggccgtgggtggagctgccnaccwgtcccgcacggcgcctgcacttytcagcccttggcagtcaatgggactgggtgccgtgragcagggggtgatgcctgttgggraggctcggtccatgctggagcccaccgccagggggctcggccatggcgggctgcaggtcccgagccctgccccgcggggaggtggctgaggcctggcgagagttcgagtgtggcacgggcagtctggcactgctgggggatccggcgctccctggcctgggtgctaagtccctcactgcccggggccggccggcttctctgagtgtggggcctgccaagcccacgcccacccagaactttcactggcccacgagcaccacacgcagcccgggttcccacccgtgcctctccttccacacctccccgcaagcagagggggctggctccatacttggccagcccagagaggggctcccacagtgcagcagcggactgatgggctcctcaagggtggccagagcagacgccaaggccgaggaggcgctgagagcgagcgagggccgccagcacgttgtcacctctcagtatgagtgtgttgtagtgtatgtgtgaaagggagttttgcaatgggagtatgggatgatgtgttagtcatagttctacagagaaatagactatctatctatctatatctcagagagagagagagagagagattgagtgtaaggaattggctcatgcaattatggagaccaagtgccaagatatggagacagcaagctggagactcaggagagctgtggcgtagtagtttctgtccaagtccagaggcctgagaaccaggagagccagtagtataagttctagtctgaaagctggcaggcccaagaccaagaagagcccaagtttcagtttgagtcccgaagcaggaaaagactgatattccatttcaagcagtcagacaagtcttatggcagggtcagccttttagttctcttcaggccatcaactgattggataagggcgactcacattagggagggcaatttgcttccaattcagctgtttatctcatcaaaaaacaccctcacagacacacttggaataatgtttgaccaaatgtctggacactttgtgccccagtatcaagcttatcgataccgtcgacctcgag

SEQ ID NO: 1961 - DNA, 1993 bp, Homo sapiens
ccagatatcaagataagaaaggtttgaaatgctcagtgttaaaataggatcacaggtcattgtaaaacagtcatttaaacaaagtgataagtcagtgatttttaaaaagtcaaaacctgtgctctttgattagcaggagactccatcaaagagtaagtttgaggagactgtatcaaagagtaagactccatcaaagactcacttttccaaataagacctaataaaggcagcatgagctcaagaaaatctctctctccctccttttcttttgtagtttactcaaaagtaaacaaaaccttttactatctcctgttaacactacctgaaaatcttgttcaaaagagaaaacgaaatcctacctttgtatcagtatattattaatattaaacctaattttaataaaatcttacaataaacagatccatctgatcccagtcagctttgaccagataagattttcatgaatcttttataaactcttacaattttaatttttctttctccaactttttagttttagctatatcatgtaaattttgaaacaatctttaacctctaaactaggcaaaattacttttcctttagcaaaactcacaccctcctctcttttttataactttcttcaccaaaaacacatcctactttcattgtatactttgcatacaagagtgtttcccatgtatctagtacttttaattacatatattaactacgattttaactcttagtagttctaatttcaagtgaaaaacctagaaagtaagtagtagttaactggtttatgtctgtatttgtagacaaatcatttcatggtttcgtagaaagatatttctataaaatataattgatgcctacttttttgtttattaacagatctaaagattattaacagatctaaatatatttagcttttttataccatgtaaaaacaaaataccaaattatgtaaactaaactaaaacatatctaataattaatgtttttgtatcttaatgtatgtagaaatgactcaaacattttatgattatctattactttattaaacctaacatgacttcaaaactttaaactactgaaaagaattttgaaactgcaacacagatacccttcctaatgtcttcctcagtcatactgagtcgcaactacccacgtggcacccaagtatgattatgaaggggcagggcctatctgagtcctgattttacacacccataatggagcccaggacagaggacagaactgtgaagataatgtctgactcttcccaccatagccaggagacaacagccaggccagagggagtaccacatatgtctgcagtcctcacttgttagagcccagaatctaatgagtctaatacataagctcacagacaagtcaaataagcatcaaacatatcacagaagcaatagttttatgagcttcagacatctagtagagaaagcctaaacctttctgaccagcagacccaggcaaaaatgtctgattgtgtttaaaactgacaagtctgaagacattctaattttattttaccaacaattaaaaagctaattttatttctcaaagattactaaaatcacattaacttgaaaaatatttgggattattaagctatgagcattaatttgtcagtttggtaccatgtaaacaatatacaaacagatctgtacacatatatacataaaaatacaaacataagtgaagatttcatagctttgatataaaaattctagccatgagacaagtaaaactcgctattttaaaaggacattggattcaaagttcataaatagaacaagttcaagtttattgtatatgcctgaagcccttaccaagttttaaataacaagtagcaaatttatatttcaagcacagagaatttaagctttccaaaaggccaattcaattttacgttatctttggcaaaaatcatgttaacagaatccaaaagagtaaaacataaaggcctttcttctacaaaaaaaaaaaaaaa

SEQ ID NO: 1962 - DNA, 1932 bp, Homo sapiens
cgcctccatgggtctgcaagacttttgctccgtccagtgccaaagccttagcagatcctggcatggatgcctcaggctgatggcaccggccttgcaatgagacgagaacccaaagctcagttatcagtgtcctgtcttgctgctatgagctttttgtactgataacgaccatttctttactgagcgccttctgggttctggcagcatcctcggcacccacattatataatttaaccgtcacaacggccagcccaggggtgctgctataccacttcacagagaggaaactggctctcagaggcttcagagcctgtccccagcttcaggtgtggctccctgagttgggggcttcctaggtgaggtccgaggaaacctgctggccaagtgacctggcagggtgtggccagtgtggccagggccgccgagcttgctttctttccctgcagcaggaacccttctggggctgtgatcctgcgatggtgcctgggtgggagtgggggtggggggcgggatggtctccctacctgccagcttcttggtttgaggtgaggacagccccggaagctcagacttggctcctgtccatgtacttggggccatgagctctgcagggaccttggaaagagagagacgggtggtgtagggcaggggaaggcattgtcttcaaacaggaaaaagctgagaatggaaacaggcgaaacttaccaagtgtaacatcacctggaactgaaggagggtgggaaggttttaattattttaaaaatagagatggggtctcactatgttgcccaggctggtctcaaactactgggctcaagtgaacctccttcctcggctcccaaagtgctgggattacaagcgtgagccactgtcccagcagggaggtgttttttttaaagctgattcactggaggcagggtgggcaagtggcactgctggtggccacccctcacagtccctgctgcccccagtaccgcctggcacccatcccccgggcccgccacgactttgcctgcgccagcctgatcttcgtctgcatcctgctcgtccatgtcctgctcatgcccaggtcagttgcagggaggggtgtgggggtccggcctgctgggatccaggctggaaggtgactatgaacctgcaaggagctgtgtgatttgggctggaaggggtcggctgctggggtcctagcaactggaccaggggctgtggcagcacaccttgagttaccaacacttctttttaatagaatgtgtgttttctgccacaggcctccctactccctaacgtctctctcctcagccacctgtcatatgtgtggcctgcatgcattttggttgacagcccttgccttaggtgtttggagtgctaggaggatagactctgaaaactgtaggcgccatcctttttctcttatatatagggaaattggggcacagaggattaatgatttatccaaaactcactgagattcatgcttctggctctagggccctgctggtggggtatagggatgagggtgaagtcagagggaagggggatctaaggtcagctacttggtgctttctagaagagcagttaggccgaagcatcgaccaggattgtggttttggctatgcttactaaagacataatagggaggctgtgcgtggtgactcacgcctgtaatcccagcactttgggaggctgcggggcgaatcactcgaggtcaggggtttgagaccagcctggccaacatggtgaaaccccgtctctaccaaaaatacaaaaattagctgggcgtggtggctggcgcctgtaatcccagctactcgggaggctgaggcaggagaatggtgtgaacctgggaggcggaggttgcagtgagccgagatcatgccactgcactccagcctgggtgacagagtgagactccatctcaaaaaaaaaaaaaaa

SEQ ID NO: 1963 - DNA, 1541 bp, Homo sapiens
  misc_feature (282)..(282): n equals a,t,g, or c
  misc_feature (335)..(335): n equals a,t,g, or c
aattccgcctttgattccttccctctgaagacagacaaaatcctgacttaggcagtattttttaaaataccaagggtctcggaaacctagggtttgataagtaagaggaacagatcaaattctaaatctcctttgtccacattgtcattctccagcttgttgttcttttcagtggtgaggtaagaatataactcctacttaatgttcctgttccttaggtgaaacactaccaccttttgttcaaaagttagatgctggggttgttgctgttgttgttttctncttttcttccttactttttagattttgatggagacgtggtaggaagtctgggnctgggaaatgaggtgaaaaagaaaagcaattagtttgtctttatacaaaataaaaccttctaaaaaaccttattatcacaaaaaagagctctacaaatctagatagttgttttgaagaagagaagagaattgtgaaaaacatgtataatttgggagggctgggcacagtggcttatgcctgtaatcccagcactttgggatgctgaggcaggcagatcacctgagatcaggagtttgagaccagcctgsccaacataatgaaaccctgtytctactaaaaatacaaaacattagctgggtgtggtaacacacgtctgtggtctcagctactttggaggctgaggcacgagaatcgcttgaacccaggaggcagaggttgcagttagctgagattgtgccactgcactccagctttggtgatagaacgagattccatctcaaagctaaacaacaacaacaacaacaataacaacaacaaaaacatgtataactgggaaaaaactgaaagagaatgcaggatcataaaaatatagcaaacaaagtgagtgggatttaaaattagtggaataagaaataatgggtaacaatgaagaacataatttaggtaatagtatagtatcttgggagccctcctggaagtatctagttatggacagtgagcagcagaaacaggatgtaactcaattcagcatacttgatggttgtggtaaccctagaaaatgactccaggaaataggtgagaatccaatcagattgagaggstaatgttcatgacaggggtgccctagcagacaggcaaagctgaatagaaattcaggaggagaggaattttggctatttagtaaaattatgagcagttggtcataggcaaattttatgagtaggtagcccttctgaagtcttaggcatataattaacctaggttggaattataattagacatcaaagtttaaacttttttatctgaaccgagatgcaaaagtaaattggttctgtgttctggagaattgtaaaagaattccttaattccttagcaaaatttggaagtcagtatcaagtggtgaggataggaaagttgaagagactgtggaccaggcaagaccttatcagttgatttaggaagcagcagtgacagaggccagacaggtaacaagaaaaaaaaaaaaaggaattcgatatcaagcttatcgataccgtcgacctcga

SEQ ID NO: 1964 - DNA, 934 bp, Homo sapiens
ctcgaggtcgacggtatcgataagcttgatatcgaattccttttttttttttttttttcagtggagaagaagggagagagagaggaagtagctggaggcaggaaacttgtactgatccatgcacctctctacttgttctctttgtcatcaagggcaccatatagctgaaaggcaggaggatagggagagggccacctcttcatatcacttctgtgccttggaaagctcttctccctggataccaccggataaagacctacacttctctccttgttgtgtgcacctgttcactggagcacatgcgcccggacatgctctcagaccttgcttcctggccatgagctttaaggaatggtctctgaaaatgcactacttttaagagctgggtctgaagcagagctaactggtctgcagggcaatgacacccttgacctcggsctcattagctccatcctcttacctactgagctcacaaccaccaacatcmtaatacttgagagaaagctcattacagcgtatgcggtggcacatctgtatttacttggtttgcgagcagctctcagagtaagccagctttctctattgctgagctcctgcaaatgagaacaacaaacacacctactgctgagtcaaatcaggccaaagggaaaagaggaaggatctgtgaggaggagagaccataagcctccaatcacactcaggaataaaatggggctaaattccaaatgagattaacaaaaaaaataatgagagaaagactaagagacagaaagaaaacccatcacataccctttgtatctgaaaggcaggctaggtaatatattccttgccttaatgtcaagcttcagtaaacccaccagccactccagagaagaggaggtggtgcatttccggcttgcataatagccaccagccaccaccggaattcctgcag

SEQ ID NO: 1965 - DNA, 1625 bp, Homo sapiens
aattcccaagaaaaatctgaactttggcttgagtttccaggacttgtagtcaagtatttatgtgggttgtgaggggataagagaatttagggtagctttatacagtgttaccatttattcttttttgttgttttatttttttcttatgtttggttggtgtcaccatttattcttttgtatgctgtttagcctctggagagggcatctctgtgtttatagaagaaaaatgtgactctcatgttgtacacagccctagactggacatcaaggtcttctaactgtcctaagcttcttaggaagatattgtctatgtattttagtttggaatcagactggcacaggactcggcatgcactatcactcttactgttctattttttcagcttggatttacactgggcaacgtggttggaatgtatctggctcagaactatgatgtaagtggccatatccatgacttccttgattccatgtaactgttttagagtgacttttctttgtttgaggtaaggtgtgacttccagcataaatgtagtccatatggctgaggcaaaactcctgaatattgtagaatggtttgccattgkttgaaaaagtaatccaactcatgaaacagctgtcctccatatcaccacaagagggcaaaatcccttcagtttagctgggctcatgatcatcctcagctgtggcttgttagccgagagtaatattaagttgggctcttaaaattctttgggaaatcatgtgataagtgagaatttaaaaattaattggataatattttcaaccccactatccagtagtagagatgacttagaattttggagatgcatctgggtagggggactgaaaaatatagatctatattccatctccaaaattctaagtgtagcacatttggggacagagttttgtgaagttgtattaacctcactttataggtggtgatgttgaaaaccaggtggtgcagcagcctatgaatggggattctggacaggagtttgaaaaagacaagcaagggaaacatgatactaacttgatttgttataaagcttttcatatgacaaagggaattcctttgtcaaccttcgtttgagtcatacagttttctaggcaaaggctacattatgtcacatttattgttwatatgcacaacctttacttggcaccagatcgagcggaagtgggtatacaaaagtagaagtgggtttcagagaaggagcatacttatctgacaacttctgatatctttcacatgcagttataaggctaagaaataccactattggccgggtgcagtgctcacgcctgtaatcctagcactttgggaggccgaggtgggcagattgctcaagctcaggagttcgagaccagcctgggcagtgtgacgaaagcccatctttacaaaaaatacaaaaattagccaggggtggtggcatgtccgtggtcccaactacttgcgggattgtggcgggaaggatcacttgagctctggaggtcaaggctgcagtgagctgtgtttgcaccattgccctccagcctgagtgacagagtgaaaccctatcttaaaaaaaaaaaaaaaaaaggaattcgatatcaagcttatcgataccgtcgacctcgag

SEQ ID NO: 1966 - DNA, 2128 bp, Homo sapiens
gcgccgcgagggggcgactcccggggcaccgctggctcctggcgggagctctgcgtcttccccgcggcaccaggcgctctcagcgggctggccggttccacgccgcmagccagccmcgtgtgggracttcggtctagtatttggacccgaggagataatwctgtgtgrraaattctctcccttcggttggaaacagtaacaaactggaaacggatgaggwgttatrgacgtgcttggaratgcaagaaaccttcagattacgagccgttgacgggaccagttgtatttcacgtttttcgaattaagctcagaatcagttttcagaatgacatgtgatgcgtggtgcgtggtgtgtgtgcctgtgtgtgtgtgtgtatggatataattcattcatttttgtggcgtcagaaaggttatgtcgagcgttgtagcggcttcttaatttacattcacggcatacaactgaagaggagccattatttattttttttcctagcatttgctgcgactacacactgccggagcgtttggaaatgttgtttgctgttaccctgtatttgtctataaaattcttactgtagggaatggccaagtggaccatcagttcgtcctgagatcttctcatgtctctcacgtctttgaaaatggcctgtgaacagactgcatcatatgtaggatgtctggcaaaatagtgtacagcgttcttttctcaaatgagaggaaatgtgtaccttttcgccgcgttgtgacaatgtaaatgttaagaattagtctaaagatgaaaattctttggccaaaacaagataagccttatcgatatgaaaactggaaaacatcacatgggactggaaatcctgtgagtgggtgctcatgacggaaaccctgacagaccttggattccagcatcgctggtgaaaatcagaccttatcatggataagggttaagatgtaaggtgtctcacccagacgccatctgttccagctgtcaatgcagaagccaggaaaggagagagagctggccaggragaattccagcttttttttttttttgagacattcatgtgaatttctctgcgaggggaaagaagmccaattattttccttggatgctgtcccttcttttggaattaataagatggcttcactcagtgagaggctgtaaagacatttcactggaaacaggcagtaacagtggccagttgtttctgttaataccatcaaaatatccctactcttgtttgtgccttgaagaaagtccttcatttaactgagacatctgagcctgcgttgcggattctgattctctaaatactcctgcaagaatccctttaatttttcactgtgcaactcaagaaggacctttctagggtattgtcaggatacgtatgctaatgatattgtcaggttaggtgagaatgattgatcactcccttaaaatccttttttatgatgttaaagctgtactttaagaaagataaaactgccactgtggcgttgcaagtctgagctagctcaagcaaacaaaggaaattgcgttaaatttgcccaactctattttctcatcttcatatagcaagactctccaaacagcaagtgatctaacctatcaagtattatgcaatagctgaatttccttgcaatggtcagtttaaagaactgttaacttagcagaggcgacgtctcgtggccaaggcccttagggtccactccatggaatcaggaccccttgctgctgctttgcgagtgttcatggaggaagaaaaatcacttggtgttctttttttgcatggaagagtcataataactgacttcagatacagagaaagtgggaagagtgagaaagaaggaggtgaggccagaggatttggaaggctaccagagagargcagccgaggcctgattgtggaaatgatgcttagacttgctttcagcaggagtgatgaagccagaatgagggaggcccagacgcccgggagaggtacaggggataggtgccatgtggtttgcaccaccgcagcaggctttgggtcccaaagacgcgaatggaaatagaagaaaatgcagttttaaataaaaaaaaaaaaaaaaggaattcgatatcaagcttatcgataccgtcgacctcgag

SEQ ID NO: 1967 - DNA, 1309 bp, Homo sapiens
attagcatatccatcatctcagtttttcatttctttgtgttgggaatgttcagtatcctcgctatctgaaactatgaaatgtgttaatgttaactatggccatcctacagtgccataggacaaaaatatggaagtcttcactagtttgtgtgtcatccttgcgcaggtgccatgctcatcttcccagtattattccagttttagtatatgtgctgcctaagcgagcatggaaattcattttagctgtaagtttgtgctgggcagattatccaataaaagtgcccttgtaatctaatagttctgaaatagccttgtgaatggcagatcccctgactgccctgtctgttctgcacccagcctgccagctttgccttttccactgatgtttttgtgggatgcagtggaccccagaagaacagtacctcagatttcaagcttgtgacccactagctcagcctggccaggttaaattggtgtcttaggttccctgtagaaagggtctgtgattgtcaacctggctgcgtgggagtaaagaaggtgatgtctgtgacaggcccagcactcagggactgagtcctgcactgatgcaggagctgtgtactcagcagtgtagtcctagcctccttccaagagtcatgaccctgctcaagatctgattttgcaaggcagccctttccagagcgagaagactatatagttagaaagccattccttatattgaggcaaaataggcctccctgtaaccttcatcttacagttttgtttctggtttttagagcaagagagtcaatctcataatctgcagcatgagaattctttttactcaccagtgaagcattcataacctctgtcaggcacctgcttggaattacaggtttacacagttaatcggaataaatcctgtcttccaaagcttacattstaatcatatawaattcagtaaaaagtgatgtcaggacacagattaaaaacaaaatcatgggaccaggcacagtgctcacgcctgtaatcccagcactttgggaggccaaggtgggcggatcgcttgaggtcaggagtttgagaccagcctggccaacatggtgaaaccccgtctctactaaaaatgcaaaaatcacccaggcctggtagcgtgcgcctgtgatcccagctactcaagaggctgaggcaggagaatcgcttgaacccaggaggcggaggtttgaactgagtgccactgcactccagctgggcaacagagtgacactccatctcaaaaaaaaaaaaaaaggaattcgatatcaagcttatcgataccgtcgacctcgag

SEQ ID NO: 1968 - DNA, 1686 bp, Homo sapiens
ccctttgtggccttccacatcaacaagggccttgtgaagaagtatatgaactctctcctgattggagaactgtctccagagcagcccagctttgagcccaccaagaataaagagctgacagatgagttccgggagctgcgggccacagtggagcggatggggctcatgaaggccaaccatgtcttcttcctgctgtacctgctgcacatcttgctgctggatggtgcagcctggctcaccctttgggtctttgggacgtcctttttgcccttcctcctctgtgcggtgctgctcagtgcagttcaggcccaggctggctggctgcagcatgactttgggcacctgtcggtcttcagcacctcaaagtggaaccatctgctacatcattttgtgattggccacctgaagggggcccccgccagttggtggaaccacatgcacttccagcaccatgccaagcccaactgcttccgcaaagacccagacatcaacatgcatcccttcttctttgccttggggaagatcctctctgtggagcttgggaaacagaagaaaaaatatatgccgtacaaccaccagcacaaatacttcttcctaattgggcccccagccttgctgcctctctacttccagtggtatattttctattttgttatccagcgaaagaatgggtggacttggcctggatgattaccttctacgtccgcttcttcctcacttatgtgccactattggggctgaaagccttcctgggccttttcttcatagtcaggttcctggaaagcaactggtttgtgtgggtgacacagatgaaccatattcccatgcacattgatcatgaccggaacatggactgggtttccacccagctccaggccacatgcaatgtccacaagtctgccttcaatgactggttcagtggacacctcaacttccagattgagcaccatctttttcccacgatgcctcgacacaattaccacaaagtggctcccctggtgcagtccttgtgtgccaagcatggcatagagtaccagtccaagcccctgctgtcagccttcgccgacatcatccactcactaaaggagtcagggcagctctggctagatgcctatcttcaccaataacaacagccaccctgcccagtctggaagaagaggaggaagactctggagccaaggcagaggggagcttgagggacaatgccactatagtttaatactcagagggggttgggtttggggacataaagcctctgactcaaactcctcccttttatcttctagccacagttctaagacccaaagtggggggtggacacagaagtccctaggagggaaggagctgttggggcaggggtgtaaattatttcctttttctagtttggcacatgcaggtagttggtgaacagagagaaccaggagggtaacagaagaggagggacctactgaacccagagtcaggaagagatttaacactaaaattccactcatgccgggcgtggtggcacgcgcctgtaatcccagctacccaggaggctgaggcaggagaatcgcttgaaccggggaggtggaggttgcagtgagctgagatcacgccattgtactccagcctgggcgacagagcaagactccatttcaaaaaaaaaaaaaggaattcgatatcaagcttatcgataccgtcgac

SEQ ID NO: 1969 - DNA, 2153 bp, Homo sapiens
ccattctaaggaagagcccttctttccaccccctttatttacttatttatttctctctctttatatcattatgaactcagggattcttaatttatgtacttattttgatgcttaaattgtcccatatgtggtctgtgagccacccttaacactggttcctttgctctttgatatgcctacatcatttttttagtacttttttgttttctagcaaaagttgtttgaagcttaccatactgtatttttttattgtggtaaaatatactttaacattcaagttacctttttaaagcgtgtggttcagtaacatccagtgcagttgttcctcagtatccacgggctgttggttccaggactcccacagatactaaaattcacactcaagtccgttattttatataagtgtgagatcttagataacctatgcatactctcccatatactgtaaataatctctagatgatttgtaatacctaacaaatgctgtgtaaatagttgttacactgtattgttaacagtacagtaacagacctgtctgttcagattcttcctggccttttaggggatcactgacaaaaaaacttagtgcatgttcagtacagacaaccatcctttttttgctttcgaatatttttgacctgagattggttgaatccatggctgtggaacccatggacacagaaggccagtggtacatttacagtgttacagagctgtcacccctgtcgattccagaatttttccatcattccattagcagctcctccccagcctgctctgctccggaccccggcagccactatctgcttcctgtctctgtggatttgtctacattagatagttcacagaaatggaatcacaatatgtgagcttttgtgtctggcttctttcacttagcgtgctgttttcaaagtccatccgtgctgcaccatacatgagcgctttattccatccatgctgtaccatacatgagcgctttattccatccatgctgtgccatacatcagcgctttattccatccatgctgtgccatacatcagcgctttattccatccatgctgtaccatacatgagcgctttattccatccgtgctgcaccatacatcagtgctttattccttttctggctgaataacatcacattgtatcgataggtcacatctggtttctccattcaccaaacattgggcatttgggttatttccaccttttggccgctgtgaataatgctgctatgaacatgggtgtacaagttttagtttgaacacctgcggtcacttattttggggtatatacctgggagtggaactgctgggtcatgcagtaacttgaagtttaagttactgaggaattgccggactgtttcccacagtggctgcagcagcttttattccagttagcaatcacgagagcttcccaccttctcacctacacctgtgatctgcctctttcgttgtagccatccctgtccatatgagctggtctctcatcttgccgtgatttgcatttccctgatgactgttgatgttgagcatcttttcatgtcctgattgaccatttgcgtatcttctttggagaaatgtctgttcacgtgctttgcctagtttttaaccgggctgtttatcttttgttattaagctataagagctctttatattccaaatgctagacccttaacagatctgtgatttgcaagtattttctcccattctgtgggctatctttttactttcttgatagtgtgcttctacaaaagtttttaattatggtaaaatcacatttattttctcttttgtaacttttggtgtcatgtctgagaaaccattgccaaatcaagatcacaaaaaattgacgaggccaggtgcagtgcctcacacctgtaatctcagaactttgggaagccaaagatcacttgagcccaggagttaggaacagcctagacgacatggtaaagccccgtctctacaaaaaatagacagattagccgcatgtcgtggtgtctgcctacagacccagccactcaggaggttgaggtggcaggattgcctgagtctgggaggttaaggctgcagtgagctgtgatggagccgctgtactccatcctgggcaacagagtgagatccgagaccgtgtctcaaaaaaaaaaaaaaaa

SEQ ID NO: 1970 - DNA, 1790 bp, Homo sapiens
  misc_feature (99)..(99): n equals a,t,g, or c
caaaaaatacaaaatagcaccacagtctccatctggtttatagcaacaraggtactttatttaatgaagcaatggttctaatcctggatactgccatgnactacaattccatccctcccagaggrgtggaggaagtcttgggtggtgtggacagaaggaagagaggagagggtgagtggggtatagggcccagggtggctccctactcctcaggctcaaaaggatgctcagtgggaacagatgatctcttgatgagtgcttcttcagtttcatagtttggaatcgttcactgtgtgctttttggggggttttcaatggaaattcacgttgctttgcatttctgtgtccgtctttggtcagttgtgcaagcctgctcactgtcatgtgaagatggcctttcatctggcttctctctcttaagtgagaaagattgtccttcaggggacatgacatcaataggtttctggaatgagggactctttctccccgtgttttgctttgtgttcacattttcttttctaatggcattgaaactttaaaaaaaatggattcaactgtttttgcagaatgtagaaagtattctgtgtccttggttaaagaaatccacttgtgaagtgtgcctggaaaatgaaagtttgtgttttttaaagaggaatatttgaaactgctttctatgcatgcttagctggagaaaagtacaggcaggcgtcccatctcccagccacttctcaaaggtgctgctgtgttttaaagaccaggtacagccagggcagtatttgcaaggacattcctgcttactttatccctttggttggaaagctctagatgattcccgcagctcctccagaccccgcctccctgccctccccagctggtctgggaagaggtggtctgctgacctgtggtatctcagaggggacgttcctcctcctccctgtgcaccaggtgggctgcaccctcctgcctattcaggatgtggatgccacaggagagcagcaggcagtggaaacttcagttgcactggttctcctggtggcaaaggcatgaagcacaggggtcgattaatccaggctactagaaagctccagagcaaagtgtgcgggtcccacaaatgcttggctggtggggtctggatcagtgctgagatagagttggcagaagaagcagaggcactctgcttgctttcctagccagtcctcccctacacacacacacacacacacacacacacacaatctcagtgcgccattctgtgcaatcccagtgaccaaatcccttccttgcccacctctatgtcagcaggactgaccacatcactcccccgagttcccaccaccagcatttcctccaacctttttccatcacaaccagttagaaccctacaggcaacaaggccttctagaatccgcttaacccttggctgataacaggcaaatttcagtctgctacactttgttaggtccagaaggagctgcccatactactttcttatgagcatgctcagtatggcatatggacatgtaatgtcacatctttgtggagtgtgattttcttttttyacatatttgtatgcagtagagagcctgttgtagaaaacgctccctgtatcttgctgtactgttaaagaaagctgaattccacattgccaacaaaagcgtgaaaatgttcatgaaccttcctccaggaaaagccattcaagcctgattatttttctaagtaacttcaattaaattgaagaaaaaagaaaaaaaggaattcgatatcaagcttatcgataccgtcgacctcga

SEQ ID NO: 1971 - DNA, 1319 bp, Homo sapiens
aattcctaatttttaatatggtgaccttacagaaaatatttcccaaacatccttttcatcctgtgcttctggaggactgatttgtttgagggaatcattctatgcattatatcctaaaatattctatgactggtttctgtccatgtttgtgggctttcatttttttaatgggatgactattagtcaaagtcagcttgtcatgactcatcataggctttctaacctacttccctgaatccgggtcctcattgtgaaatgcatgccatacgaaatttgaacgtagctttggaaaaagggactatttgtggagtaatggcattaatcaacatagaacatcttatttgaatcaacagttaacttcagtagtcatgtgaataaaattcttattgtctaaattgagacagcctcagatatttgcagatatttactttttgtctgatatcagtacatatttggacaaagtcatctaaataatagtttgtcaccaaataactacaaaatctcattttaaatgagtaaggagaacgtgtacagaagcaaattttcttcaaaatagttgtgggaagagcttatatgtgaaagcttatgactggttttgagggagaacttactggagaaaatggactctatgttaagtatggttttcagatagaattctttccttttttaatgagaaaaaaaaatccacattaatattgaaactgcacctgtaatcccagcactttgggaggctgaggacagaggattgcttgagcccaggagttcgagagcagcctgggcagcaaagtgagaccccatctcctaaaaatttaaatgtatttattaaaactgttctctagaagctttggactgaatcccaaaagtgtttataagttcaaaagccaaaagtatttgtaatttcaacaaccaaaaatggatttctttatgtaatcttggaattattaaaagtccttttagcttctagcacatatttgtacaaagagtttaaggactggtggctggtttggtttgttttttaaaaatgtttactgacgaggccgggcgtggtggctcacccctgcaatcccagcactttgggaggccgaggcaggcagatcacaaggtcaggagttcaagatcagcctggccagtatggtgaaaccctgtctctactaaaaatagaaaaattagccatgcgaagtagcaggtgcctgtagttccagctactcgggaggctgaggcgggagaattgcttgaatccaggaggcagaggttgcagtgagccaagatagcgcctctgtactccagcctgggtgacagagcgagactctgtatcaaaa

SEQ ID NO: 1972 - DNA, 1504 bp, Homo sapiens
tgtagtttcgtttttaaacatttgaggatattttaggtgatttaattcattgtagaacatagactgcatgatttcacttgttttagattgagattgttttgtagcccaggaaatgttttatcttggtgaatgttccatatgtacttgagaagaatgtgtattatattgttggttgtagtgttccataaaagtcagtttagctcattggtagtggggcctaaatcatctgtatcctaactgatagtgtgtggttgtgtgtctttgtttttctttgtcccatctgctttttgggttctttgattttcttctggtgtttcttcttctggattaatcaaggattttataatattcagatttatctcctctgttggggttttagctgtacctctttattttttaagaggctgttctagggattacagaatgcattctcaatttatcataaaatagcaagaatattataccaccttacatgtttcacatgtaataaaacatactttcatatactattttcatcctttgtgcttttattgtcataagttttgcttctaaatgtattatagttattgtattttgtgattatttgtgcttcagaaagttattctttgaagaaactaagaaatgagaaaaattaacatctacctgtatattcaacatctacatatatatttaccatttttgccattctttattcctacataaagatcaaagtttacatctcatatcattttctctcagtctgaagaacttgatttaacatttcttgtattgtaggtgtcttagtgacaaattcttcagcttctgttttcagcttttatctgaagatacctttattaatctttactttttctatatattttgtttgttcgttagagataagtctactctgttgccagctggatccatggccgatcataacccactgcagcctcaaactcctgggctcaagtgatcctcccacctcagcctcccaagtaggtgggactataggcacacgctaccgtgcctggctaattttttaatttttttggagagttggggtctcactttgttgcctgggctggtctcgtacccagggctcaagcatcctcctaccccagcctcctacggtcctgagattacaggtgtgagccaccatgcctggttatttaaaaaaatatgttttgaataatacagccaattctgtttttttaagctgtcactatgttctgtatagccaccaaaaacagggaattagcaaatactgaatcattgttcttaggggaaatacagacttggctcctgtaagcctcttgtcataatatttttgttaaccaatcagtatattaccttgttttatgtgtttttctatttaaagccacctggggtacaaaaatacagttggatagaaggaataagttctagtatttgatagtacagtagagaaattatagttaatgatttattctatatttcagaatagctagaagaattgtaatgtttctaacacaaaaaaaaaaaaaaa

SEQ ID NO: 1973 - DNA, 1645 bp, Homo sapiens
attccttactgtgaatagttgctttcatactacagcagcaatgttgaagagttgtgacaatgaccacatggcctataaggcctggaatatttgctgtctggctctacgcagtttaagtttgctgacccctgtgcaaacttcgtcaaaggtaactttgacttactgcgtactcttgattagtacccaaactctctaaagttagatattaacttagaaaaaattgataagtttcaaaaaaaaatttctctttggtagggaaggtaactccaagagttaacggttttcttgccttgaagggcgttatccagttttgtatctatctctgcagtcttatttcccattgaccagtcttttttccattgactgcatgtgtcagtttctcatgtcctgctttgagccacccattgtcattctgcaggtcccttcattaatgaattaaataaatcttagacacacgctcactatatattccaatgagagtgtttattgtatggagaattatatgttgtctccttgaggcttggcagtgcctcttgaatgtagtcatttaaccctcttgggcctcaggtaacttctctgttaagtggaaataattatccccagtaccttagccaaattactgtctcacccaaataataattggacatagttttgtaatttaagttaaaagatgttatgtttatgaaagagttttgttagctgcaaagcgctatttgttggatattgcttcttgaaaaaatacagatcttaggtattaaagaataggtagaagcctgttaggtatgaattatgaacagatattcgattctttgacttctccattcagaatagttatttttaaaaagcaaatatgtaaagatctttctgctcttaagcctaaccactcatctgatgagtgtactgaaaatagaagtggtttattgcaatatgtcagagaagtattctactgataaccacccatacatgaaatcttaaagaagtagttatgagttggaaatttctaggttgtaatcagaagagggagcaaatgacagaatacagctgtgcattgtttggaagtgggctggaaagaattcattgcctctttaattgaagaaaagcaaagagtgacactaatcaaagtaaaagaagggaagtactcatagctgaaaatggaactataaattgtttgctttttagagcaacatcagttctttgaaacccatacagttccttataatattccaaaacaaactgccatatggaaacctgtttagaaaggaataatagcactctaccctcctccccagccactaaattgaaacatacgtgaaaatttaatgtagttttttaatcaagctcagaaaattttttttttttttgagacggagcctcgctctgtcgcccaggctggagtgcagtggcgcgatctcagctcactgcaagctccgcctcccggtttcatgccattctcttgcctcagcctcccgagtagctgggactacagcttggctagtttttttgtatttttggtaaagacagggttccaccgtgttagccaggatggtctcaatctctcctgacctcgtgatccgcccaccttggcctcccaaagtgctgggattaccagcgtgagccaccgcgcccagcccaaaaaaaaaaaaaa

SEQ ID NO: 1974 - DNA, 1466 bp, Homo sapiens
caaacacatttctcactttttttttcctgaagtatataagtctgtgaataaccatggtggtaaaaacagaaaggagaaacagaacgagaaagaaagaaatagaacaatcaatagaatatagtaatattatcaagctatgtcttttgattaaaatgtattatatggtttaccttgattaaaatgcattatgtgtgcagttttctcaaaaaaattcttattgtgtttwattgttcagtcccttgtttattctcarctgtgtgtccagttactctatccatcttagactataaactcatcaaggcattaamcatgttgttttctttattcctgaatctcaacatctagttaatgccaggcaggctgtgacagtcaataaatgtttgctaattatgtgatgatgctttgggacataagaatgttgctttgtgtctctagggttttagtttatttttaccagatcaaactttagaattcgactaacactaatgtcagaagtctgtgtttcagtaaccatctacagataatggcacccagttgtccatgaggagatgccatttgcatcctgtgtgggtgacagctatgctttgattcctcttggatctgtaggactacttgcctgtaagacctcatgtattgttctgggggtctgccagagagggaagctagcctcagaacacggggaaatgaggcaagggggcttcagaagtggtcatgtcaggattctggcttggcaaagagaaaggcgtgggttgttttatgttccaaagctggagttatttcttctgtgaccctggcatgtcttcatacttaacagacaccaatattgtcctttccttggtttagccaaaaccgggggttagggtgggtagtaggaggtgaaggagcttttcttcagtatgtatgaaggggattgacgtaatatctgctttcataaactgaatctccagtgagccttcctttaaaaaataattgtatgtaaaaaccacataatgattckgtaattacagtgtgttggcacagttgttaaattataaatttaataagctaagatgagctcagtaagagtataggcttttcactggagtgaaaggacattacttgatgagatacagcagagaggaaacaatagactttttgtgtagctgcctgaaacttctgctaggtgaaggcaagccaataaatgaagaagaagggataatggattgcctaacctgtgaacttggtcaccatgttctttgaaaacaaagtgaaatgcaatgtgttgtctttggactgtctcacagtgcttaccctacatcagacaacccttgtctagtatttcacggattttgatttgctatttattttgcatttgccttcatgttgctatgttttaagccatgaaatgaattatttattctgtttatacaagcaaaaaaaaaaaaaaggaattcgatatcaagcttatcgataccgtcgacctcgag

SEQ ID NO: 1975 - DNA, 1828 bp, Homo sapiens
catcagtgtttaaaaaaaaaaatcaaccaggttgtggtaacaaggcattctatttcttcaaaaagactgtatgcctgtgtctgaggaacttacctattatccacctctgttggaactctcttttaaaaagtacatttatagattgatcagaattataaccatggagaattttttcttctgagcattttaatatacttgaaaacaacattgacttgaaaaatttcagaacatttttcagtacctagttttattaaatattacacttgagagacactttttaaaaatgtgttaatgtcaatatgatgagattttagcctttctccagaactaaggcattaaagaaaatagcaaatattaaaaaataaaactgttacttttttccttctttcttttcacctttaggttaatatccagtattatgtgttatccctttggataagtatgctttattttacctctgttaaaaattaaaataaatgattctattcatatttgtcagtaattcaaaacttatatgtgtaactgaacgcgcatgtaaggtatggttttatttatttttttttttttttgaggaaatttaaatgctaaagaaacaacgaaatgaaaaggtatcaggaaaaaaagatcaggaagttgtattcaggtacaaatctttttttaaataagtattttgttgaggttgaagaattgctggcaattaaaagaatagagctaattatggctttcatcattcattcatgtatttattgagcacctacttattatggtgctcaacacttgttactgcaagctaccttaatttcccaagagtggtgccttactctgttttttctgatatggtcttccaatcagtgtgtgtaacatacctgttgtttatcagccattgtaggtggctgtgtctgttgcatcatcataagaagtttaagctttgtgctctgataaattgtgttctgttaaagaggttagtaggatgaaaacagcaaaacaataattttttcaacaaattgtaaattataagaaaaagagttggtttgtgtacaacaattttaatgattcccttgttcatttttgctgtgaaatgcactgaaaaaaatcctcaaaatgagttatagttccctgtgttgggaaaattgacaaataataaaactagagaacaaacaataatgcttctgtctcttttacgaatggagagagaaagtttatattcagtagagttattgccctgttcatttgagaggggcatggattttctgtttaagtccttcagggaatcttcagctaggtggtaaatttaataagagtttctaaaaattgaaatgtttaacttttaaatattctggagatagaagaagaatataaaatgaaaccaggctgatctgcatgcagtggcatttacaactaactgatcacaaccaattatagattccttattttgtttattgtgaggcagagtctgactctgtcacccaggatggagtacagtgcatagctcactgcagtcttgacctcccaggctaaaccaatcattccacttcaccctcccaagtagctgagaccacaggcacacaacaccacaaccagctgattgttgtactgtttgtatagactggatctcactatgttgcccagactggtcttgaattcctgagctcaagcagtcctcccacctcagcctcccaaagtactgggattacaggcgtgaggtacctcgcccagccccagttacagatttctttgttccttctctctcccactgcttaacttgattagcctttaaaaaaaaaaaaaaaaaaaggaattcgatatcaagcttatcgataccgtcgac

SEQ ID NO: 1976 - DNA, 2746 bp, Homo sapiens
  misc_feature (2)..(2): n equals a,t,g, or c
  misc_feature (10)..(10): n equals a,t,g, or c
  misc_feature (26)..(26): n equals a,t,g, or c
  misc_feature (35)..(35): n equals a,t,g, or c
  misc_feature (2736)..(2736): n equals a,t,g, or c
cnccgatgtnggaccaatccccctantagccgcanactagatctctggaatttcctcgatattccaagaagccgcctggtaaaataccctctgcttctccgagaaatcttgaggcacacaccaaatgataatccagatcagcagcacttggaagaagctataaatatcattcagggaattgtggcagaaatcaacaccaagactggtgaatctgaatgccgctattataaagagcggcttctttacttggaagaaggccagaaagactccctgatcgacagctctcgagtcttgtgttgtcatggtgaactgaagaacaatcggggcgtgaaactgcatgttttcctsttccaagaagtgcttgtgatcactcgagccgtcacccacaatgagcagctttgctaccagctgtaccgtcagccaatccccgtgaaagacctcctgctggaagacctccaggatggagaagtgaggctgggtggctccctgcgaggggcattcagcaacaatgagagaattaaaaacttcttcagagtcagtttcaaaaayggatcccaaagtcagacccactcgctacaagccaatgacactttcaacaaacagcagtggcttaactgtattcgtcaagccaaagaaacagttttgtgtgctgccgggcaagctggggtgcttgactccgagggatcgttcctaaatcccaccaccgggagcagagagctacagggagaaacaaaacttgagcagatggaccaatcggacagtgagtcagactgtagtatggacacgagtgaggtcagcctcgactgtgagcgcatggaacagacagactcttcctgtggraacagcaggcayggtgaaagtaacgtctgacagaagcatgtgcacttcgggaagcaggcctgcatcttacctgtacagtatttgcattccacagatggarcggtttggagaagcactttttcatacttttgtgaaagtatacatgttggcccagtctctcgtatctgtacctttgtccctagtactgtaactgccaatctgtctgtgtaagctggaatctgtggcaactattaccctgtgttgtatttcccaagtgtctggatggatggagaggtactcaaacaagttactttcagttgtcctgctggattttaaaaaaatagaaaaagaatctcaaaactactgttttacatagattgtttgaagagtccttcctcttgtgcttctgtaccactttcccagctcttagatgtggtagctaaaggcacggaatttagacggccttgtaaatagggcatgaggaactcatctgtgtattgggatggtattagagagagaatcaggaaagaccaactcatgaagtgaacttggtttgatcttactcaactagaaagcttgaaaacatccctggggattctgaaggcttaattttgcaaaggaggatgcattgtctgaactttgcaacttcatccagtgcaagtttgatgcaagaatgtattaggacataaaatagaggctgaccttaaaagggccaggacagaagcggctgccagctctgaatctttaactgaaatgcacatggcaccaggaggtgtctctcatagttggttgctagcctaaaacatcagaatagaacccaaagggcttaggaaggcctgccaggataacaagaaggccctgtattcattgtgtttcatctgcctaggcctactcattattttagagaatgaatgaagcaacaaggaagagagaccatgactctatcgatgacactgtttatagaaacacaggagaggaagaatttggaatgaaaagcacttcgtcagaaccttctgtgggagccattgagagaaaagcatggtccagtgccttctgagaaaggccagagctttgggctttcctgctctgcttttgggtcgtcartttgccatctctggttctgtgctataatcagaattgtaattatgttctccagaggccaatttcattaactctgattaattagaatcagctagccagattagtaacctctttgtccagccttgatttacagtgcagggtaaagtgcagaccttaaaaacagctaagtacctagaagagctccctgcaagtgtaaatattaaggatgacctgtgcaaaattatacccacaccagcactagtggtaattattctaaattattgccaaaaagttttttttaatctgtctttcaagtttacagaaaagaaagcagtaaatgcattgatgtcattttattatgtacatatatcatgtgcattcaagctgtgtgacaagatatatcaatataaaaacaaggtatatactttattattttttgaaaacaaggatattgtgatcaattttaccctgtaaaacatatttctgtatttataggtcttaaacatgatgaattttttctattacaagtttatttaaaactgctttctcaagtcgttattgatacagcaagtgaacctgctgcagacagaagcagaggaaagccaagaacagcctttattggtgaagaaaagaatgaatgattctttgtaggcgccatcagccacttttagaagccatcagccagtgtgttgggaaaagaggtttgtcaagtgttggcctatgggaaggtggtcaatgaatgttttgatgaaatgaatgtttttgtataatggccttaaacttttctggaagtatttcaaataaattacattattaagtcatccaaaaaaaaaaaanaaaaactcga

SEQ ID NO: 1977 - DNA, 1507 bp, Homo sapiens
ccgatctttgagctttcccaaggagaagaagacttgatagaagacttgaaattagcaaaaaaggcctatcatgaccccatgctgaaactctccataatgacagaacaagagttgaatcaaatttttggaacactggactctctaattcctctacatgaagagctccttagtcagcttcgagatgttaggaagcctgatggctcgactgaacatgttggtcccatcctcgtgggctggctcccttgcctcagctcctatgatagctactgcagcaatcaagtagccgccaaagctctgctggaccacaaaaagcaagatcaccgagtccaggatttcctacagcgatgtttagaatccccctttagccgcaaactagatctctggaatttcctcgatattccaagaagccgcctggtaaaataccctctgcttctccgagaaatcttgaggcacacaccaaatgataatccagatcagcagcacttggaagaagctataaatatcattcagggaattgtggcagaaatcaacaccaagactggtgaatctgaatgccgctattataaagagcggcttctttacttggaagaaggccagaaagactccctgatcgacagctctcgagtcttgtgttgtcatggtgaactgaagaacaatcggggcgtgaaactgcatgttttcctcttccaagaagtgcttgtgatcactcgagccgtcacccacaatgagcagctttgctaccagctgtaccgtcagccaatccccgtgaaagacctcctgctggaagacctccaggatggagaagtgaggctgggtggctccctgcgaggggcattcagcaacaatgagagaattaaaaacttcttcagagtcagtttcaaaaacggatcccaaagtcagacccactcgctacaagccaatgacactttcaacaaacagcagtggcttaactgtattcgtcaagccaaagaaacagttctgtgtgctgccgggcaagctggggtgcttgactccgagggatcgttcctaaatcccaccaccgggagcagaaagctacagggagaaacaaaacttgagcagatggaccaatcggacagtgagtcagactgtagtatggacacgagtgaggtcagcctcgactgtgagcgcatggaacagacagactcttcctgtgggaacagcaggcatggtgaaagtaacgtctgacagaagcatgtgcacttcgggaagcaggcctgcatcttacctgtacagtatttgcattccacagatggagcggtttggagaagcactttttcatacttttgtgaaagtatacatgttggcccagtctctcgtatctgtacctttgtccctagtactgtaactgccaatctgtctgtgtaagctggaatctgtggcaactattaccctgtgttgtatttcccaagtgtctggatggatggagaggtactcaaacaagttactttcagttgtcctgctggattttaaaaaaaaaaaaaaaaaa

SEQ ID NO: 1978 - DNA, 1597 bp, Homo sapiens
aaaaaaaaaacaagtgaaattgagaccacatatttagatatagggcattagaagatccctgaagcttaagcctcattagcttcatggcaaatcttcccttgatcttgataatgctggtggtagggatgatgggggtgactattaacacattgagcactcatgtgcagacattgttccaagcagtttttatatattaatcctcgaaacaacccaaggcacggtagcagaggtacagagaagtcacacccaaggtcacacagtgggaagcagagtttttaggagagggaagaagggcagtatggaaaagaatactaaactgagagcagaggccttcatgaatgtcagcttcaccacccatctgtggggaacctggggggaaaatcacgtacctttttgcatgtacgtccttgacttcacctgtgaaaaaggaatattgatgcatgtcatgaatccttgactctgttgttctgaagktkagagaatgtgtaaaagtgctttgtgaaggtaaartgcttagaaacgtagttatattacacagctttctcttccacttcaatacttaaawttcaggcttaaaaattcatttagttttgcttttcatttcacttctaatgtgtctaatttatttcttggacatgatttttgttctcaggttacttgtctgcaagacttttttggtgatgacgatgtttttattgcatgtggaccagaaaaatttcgttatgcccaagatgactttgtcctggatcatagtggtaaggcaattcttcagctaattcatttttccatctttgtaacccctgaaatgaaggcttgggatttagccactcagttggtgcatgttaagaagtctgacatgttgaggaaagatagcattggcagtacaatttttgaaccaatgaaaataaagaataacatgaaagcatttgcctacttataaaaaaaaaaaaaaaacgtccttctcagcctgccctcgacaacagtgaccaacagacaggcagctgggtttcccaggccatccctctgttgccatcagcttgattggcttccccgagggccagcagggctgggggctccggrgacagcaggaagcactcccagccaccagtgcctgtcrcctctttcccctttgcccctgcttcatcccagctctgtgtgtggaggacaaagcttcttcctgcgtggctccaggaaaagatgtggctcacgtaggtggcacctgccaatagctttgtcaatcacagccccataggaacgtctggaattgcttgggagttggggagaactgtcaagaagagtgaagagagtgccaaagcggagatctgttcacctgggggccatggaggggggacccactaaagatcaagatcaaagattctccccatctcacagacaaggaaactgaggccagagggaggagagaattgctcatggctccagaactggtggcaagtttctctggactcttaggtttatttttaatatgaaatataaaaacagtttcaaatatcttattgagggagaagtaaaaacttatttaaacaaaaaaaaaaaaaaggaattcgatatcaagcttatcgataccgtcgacctcgag

SEQ ID NO: 1979 - DNA, 1294 bp, Homo sapiens
  misc_feature (668)..(668): n equals a,t,g, or c
catcttgtagtagcaatttcatatctctacttatagttgggacaattaaggctcagaaaaatggcaaagctgagattaaaattcaggattttctgatttctagccaatgtcatgctcattttctgtgttaattttatggctcagggtccagttaaaaacgtctgaagggagtggtaagtacaagagagatgggagttgggggtggggcttgaaggagagcacacctggccccaggtgacaagactgggctccagccctgcctcatcacagttggacatgatggccctgggtcatttgacttttgaggacctcaggaaaatgagggagcttaaaaaattctatggttcctaatgaaatacttagggatgaaattacagttctgggatttgcttgaagacacaatcagccatggtttgtcactgttgatgctgagtaatggatatttggtgttctattgtgagtctttggtacatgtttggaattttccatgaaaaaaccttctgcttctaaaatgcacaccttgattcttcccatcgccctcctactggctggtcctgtgcagctcactcatttctcaggaacagcagcagactcactactctgarggaaagaaagcccyttgctttggtctgtcctwatgtaccatattattagagactttccgacancctccccatttttwattycttaacagctaatacgatagctgtgcttycataataaattcaaagctgctctctatttctcaccagtttgaattgtagaaaagagtacaaaagattagagtactttaaaataaatctcagctaattatacatacaactgcattcactaaatgtgaatattttcaggctttctttgctaccaagtgccacctgctcatgatttaaatgggcacaaatttagttccattaaacaaaatgcagcaactcttctcctatagcgcaaactcctttaggtcctattttgaaactgagaagctaattccagtgttctcttgttagctctcggtccatgtcaaccaccccacaaggttgtttacttgaatagtttgcagccttgctttaaaagttctagtaggcaaataggtttgttgatgatgaagtggtttgtgttttataagagtccttatggtctagatggcatttgaacttgtggttccagtgattaccaggaccctgaattgaagaatacatgctgtggccttttcagctcaggaaactttttactttctattgccaaaaaaaaaaaaaaggaattcgatatcaagcttatcgataccgtcgacctcgag

SEQ ID NO: 1980 - DNA, 2284 bp, Homo sapiens
ccgaaaattatctgaaattcaaatttcagtgtccttaagtaaagttctattggaacatggccacacatttatttatatatcttcttgtggctgttttctgctacagctgcagcgtcttatactaaacagactgtaaggcccataaagcctcaaatatttactttatgggactcgatggaaactttactgacccctgatctcagtgtttcttttaagcattgcaaagatagtttgcaaaaatgctatgagagctctatgatggcattagatacctaaatgttagccagctgaaaaaaatttcctaaagtggtattaggcctaaaaaaaagtgattctagggctacttaaacaagaagtttttacagcaagagttacatcctctactcattttaatgtctaggtaagccagagctttaaatcctgtattaatttacctgtgaaaatatttcatattctcccttttgtgccgtgtgtgcgttggattccccagtgggtgtatagatgaatttataatttatgtggctggatggaagcctgggtaaatacaagcataaacaacatcaggcaatgccagtcgatagactgcgattccaggatgtgttctgtccaggcctgccgttcattccaaaggcttgcatttcaaaactgcaggcttggacctgggactgctggtaaggtggatggcagggttcacatctggttgggcttaggaaggtaccaggagagtgcaccttctagtacttgaaatgtccctccattttgaggacacaggagtggcctacctttcatctaacaaagacaagagaattgaaagctgattgtctttgtctttgaagggtttattgctttacctcttcacttcacctggctttggcacctctgtcatttcttcatttactgttttttctagcatacttttaacttctttttgtactttctctttccaactgctgtccacatgccacctgtgtatagaatcccaagaaaacataacccaccattagaattttagttgctaaactatataagaactttgagctgtagattaacatcctctaccttcctttggtgccatttgtttacccctttttccgaacaaaaaacaatacctgcccctgttccaaaggtgtcttactattccaataaagaatgcatgcctgggaataaaaagaagcttagactactgttccaatggagctaagtgttcaaagaaattcctgaattcatttcctgggggaaaaaatgtggttagtgacctggaaactactaacaacttataaaactcaatactctgatggcgactctgttcgctttacccctaagacatcttgaaaggaaagacttttgtcagagttgggcttctaaagttttaataggaaattgaggcactttctgtataattcaagccaaagatttttttttttctgggtttgaatgattggataattgcctcaattctctgttccatgtaattgagatcacttgactcttcttagtgctaataaagagatgttgggattcacggtttattaaccaaacttttcagtttgtggacctgtcattcaaaactgcaaacaaggctgatcccatgcaaaatagactactgcctttatgctgtactaagaatcagtccctcttaaaggatgcatttataacctttatgcaatgaggaaatttccaggtagccaattttctttatagtgctaccagccttcagcaagcttaaactctgccctgcaagcctgaaaccctgcttctctaagattctacataacaggagattaaacatccaaatgtgtataatcgcattctggacagtatgaagaagctgtcttggaatattgttaactattagaatacttaaagtgtgcacatcacccaatttaggatttcttggtaatagtagcctatactttagaaaattaaagaggaggaaggggccgggcacagcggctcacacctataatcccagcactttgggaggccgaggtgggcagatcacttgaggtcaggagtttgagaccagcttggccaacatggagaaacgccatctttactaaaaatacaacaaataattagccaggtgtggtggcctgtgcctgtaatcccagctactttggaggctgaggcagggaatcgcttgaacctgggaagcggaggttgcagtgagccaagattgcaccactgcactccagctagggtgacagagtgtgaccctgtctccaaaaaaaaaaaaaaaaaaggaattcgatatcaagcttatcgataccgtcgacctcgaggg

SEQ ID NO: 1981 - DNA, 1395 bp, Homo sapiens
gccttcctgaccctagatgggctttgtaaaaagagcaagtcgtgtgtgccagcctgtgcagcagtgagggcacaggcagcaccagggtcccgggtgtgtgggtgctgccccagcttgcagtgtggtctcctcggtgctggccacagctgtgggtccccaggaatattgtgctgcaggtcttagacagatttgggtactactggttctctgttcagcgtggcctggacagtccacagatggtagtagaccatggggtgttgagatgcaaggagactctgccgttctttcacattctgcttttgctcctgacagcttaggaaagctctctttgaaactttggtatgtgtggacctgagattgaatgtatctgaaaggttgctaatttctcactgtccttgcttcccaggacgccaggaaagcatgtgcagatgcaactctctctcaggtaagagcccactgagtcacgcagagccatctgcctgtgaggaggctagcacggcacccacacctggagcctcgggagggctctgcttgcattctctgttgcgcagtgaggatgccaagccactgcttttattaagaagtcattctgatggtaggcataggaaatagaggggcttattgagataaaaatgagatatctcaagccttgaataatcatctacctgttacagagggtaatagttgtaaaatattgttattgtcttaagatattttgaagctcctctcctcaacagaatctgcctcagaacttctatttctaatatccaatttgataatacctcaaaaagttaaacatagaattattgtatgactcagcagttctgccattaaatatatgcccaacaggattgaacactgcttttcaaacacacacatgtacatagcagcaccattcacaatagccaaaatgtagaaacaaccaaaatgtgcataaatgaatgagtggagaaacaaattgtggtgtctctgtgccctggagtattgtcagccattaaatggacgtcagtacagtcagaggctgcaacgtggataaaccccataaatattacgatagtgagagaagccaaacaaatggctatgtattgtttagttctatttatatgaaatatctagaatagtaacattcactgagacagagtggactagtggccagcaggggtgttaggggagagagggagaggaagtgaacagggagtgactgctgaatcaatgtctggtctccttttggaagatggtttggaactagatggtggcagtggttttacaacgagtgtactaaatgccactgaactgtagactttaaagtgattaattggatgttacgtgaacttcaccttattaaaaaaaaaaaaggaattcgatatcaagcttatcgataccgtcgacctcgag

SEQ ID NO: 1982 - DNA, 1229 bp, Homo sapiens
  misc_feature (710)..(710): n equals a,t,g, or c
aattccctccatgccaggctaactcttttggatttttttagtagagatggggtttcaccattgttggccaggctggtctacaacacctgacctcacgtgatccatccgccttggcctcccaaagtgctgggattacaggcgtgagtcaccatgtccagcccacatacacttttaaaaataatagtttatcttgataaaatctgaattaagctgttgtttttatgaggattgtttctgactcctgtttctcatttcccttttcacctcccctgtcagacacatacactccacgtccacaccacacatatgcacactgcggacttcaccactcacattcactttactttgttaatctggctgcaaggaaatttcttagcccttgacacagtatgtgaagagagttctgttggcagctcaccatggtatttcaaatgtgtgcctcaaattgagagtgccggttggaaataacaattcactctaagcagtgcttttcattgaaatgtaaattgccttatacccgttttcattcttgcggacttctcaggaggaagacaggttttatgttacaagcattgaagagaaaatctttctcctggtatctctttttttagtatgcaacaagattgaggatgattcatttaggcaactctggtctactctaggagcttgcatatctaacaatatgcagtattctcaggaattttaccagngtgggatcctggtactttgaggggagaaggataacttcawatctggatttaatttcygagttaataaaccgccatcaccctggaatgcccatttttatttgtttccttatccatttatgaactaccttaaggcatttatcaaatagtgacttaaatctaaaaataaaattaatgtcctttgtttggaatgcttttagagaccattaggacttaggagcagtgcagtggatgtggagagaatgaaagattcaacaataactatataaaaccctaaggtcccactcaagtggggcggcctggccaaaatgtagctcaaaacataatagtggctatgagaaaaaagctattttgttgtcattgttataacacccagcaaggaactgtataggttatagggccttttaaaatttttcagctggataccactttatttttattgtgactttcaaacacgaaaataccattatgttaaaaaaaaaggaattcgatatcaagcttatcgataccgtcgacctcgag

SEQ ID NO: 1983 - DNA, 1166 bp, Homo sapiens
cgaagcaatttgcttgcacatctgaatatccttcttgtgtctccattttcactcttgaaaactgaaagcaatttgacttttatttttgtttttctaaagaacagctaggtgaaaggaggttaagctgattgtcactctgcctgcccactacctactccccaccatggtgtttcatgaaacatccccaccacctgaagtgatctttttaatccttgtgatagtaaatgcattgataattaacaggaaaaacatgtttttaaataatctacaaatgagaacccaaatggtagtgttttgtttgacagaagtaaatcaaatattatggtttaaatataatgcaaaatttcaggacagttaatttgggcttcccttaccctaaagagggtttttcttataataaggagaagaggtgtggttcaaagaaaattaagagacaaaaccttcaggtacataatgcatgaaaatctttaaatgcctgcaaaaattaagttctgttataataccagccaattctgaattagccaatgccctaaaagcatctaacaatttaaggttatcttatgagtcctatgaaaacaattatttgttgctaaatttgagttttagctaccaacgccatgtttacgtgacaagaaattgttttggccctgtggtttatgacgtgctgctggataagcatttatgtaaaactgagtatttcaaagagaaaccatttacaattggaatttccacctgtgtggctgtttgcagacctacctctgtcttccattttgcatcctgtcagtgctataattagtttgatcactttgtcttgtttttcagtgtctacaattatagcttattcactatgttctaactatttaaaaataatgggccgggcgcggtggctcgtgcctgtggtcccggcactttgggaggccgaggtgagcagatcacagggtcaggggatcgagaccatcctggctaacacagtgaaaccccgtctctgctgaacatgcaaaaaaattagtcgggcatggtggcgggcgcctgtggtcccagctactcgggaggctgaggcgggagagtggcgtgaacctgggaggcggagcttgcagtgagccaggattgtgccactgcactccagcctgggcgacagagcgagactctgtctcaaaaaaaaaaaa

SEQ ID NO: 1984 - DNA, 2375 bp, Homo sapiens
ctttttttttttaagacaacagtaatttatttagctcctgattgtgtgaatgggcaatttgggctgggatctgcttgagtggttcttctggtcttgattggcctcattcatgtgttagctgccatgttggttgggctagtatgacttcagctaggaaagcatgtttctgcttcatgtggtctctcattctccagcatgctcactcaacatgttcatggctgggtaaggttccaacagacatttataaggcctcttgaaacctaggcttggaactggcatacagtcacttcttccacattctattgatcaaatcaagtcacagtgccagcccagattcaaatggtggggaaagagacttcatttatggaagggaggagctgcaaatttcattgccaagaggtgtggatacccagaaagatacatttgacaaaccatctatcaaagttactgtcagaggtatgtttttggaaatatcatttggagtgggatgtgtcctgtatgactggaatcgttttctatttgtaacagagaagcgtgcccactccttgcacccatagataacccaatgccgaaggatatgagagagagagatgtccagtttgtgcctctcccagcttcttgtccagagactccttggtttagattttgatacactacttagaaaaggtggagagtttctttaagatttcatccacagagggccgcacagagggatcatgggcccggcactcatcaatgatctcccgcagctctgaagggcagtcttcacccagtggctcctgctgccgcttcacagccaccagcttgcggatcttctcagaattacagccttgaaacgggatatctccagtggcgatttcccagaggacgattccaaagctgtatatttcagactttacatcatattgataaaatacatcttccagttcctgaggtgagagatatgctgtagatttgactctgtctgtcttttctctcgtagttcccaaactcatggaagtctgtgttttcctcaactcaaatcctgcaagcggtataggcctcgggctgcccccaggactaggaccatgcgcttgccaaatgtgaggtctttttccctatccaacagctccctcagggtcccgagttcacagtactccatgacaatggagaattgaggcggagtcactgtttcatcaatgcaaatcccaaatatacgcaggatgttgggagattcgaatttcttcatggttttgatctccttattgaaagtctgcctcactattgcaatgctgccagcctggagttttttgaatacttttatggccactggagctctgtggtattctcctttataaagtgtgctgacttcattttcccttagcagaatccacggggatcctgaaagctgctccttcttgatctccttgatttgctcttgcgggatctcctgcatgcattttggtggtaaatactgcctcaaagtttccttgatttctttcatgttgatttctaatcgtctcagtgaagcttctattttttcattatctcttcttagcatctggaaagctcgcctgtcttcgtctgcatcctgctgatcttcctgtgcccaggacgctccttggcttatgggtgaaacaggcatgcgttgctcaacctgaagtaacagcgagagctccttccagacatcactcagcttcctgttcacgtccttgaagagtattttgtcctggcttgctgttagaaacctgcagatattggatctattgctgaacttttctatctccccattagcctcctccagggcagccttgaagcggttcatggctgtggttaacttctcagagggcacgctcctctttccttggtcctggagcatctccagaggcttgatcaggccgaggacgcggtggcccaggcgccggcactgtttcttgcagtatttcatctcttcacaccgtttgtggatgacctggccaagggtgataatatgcttcaaattttccatgccttcgcgcctcccgaggggtgtgcgtccaatctgtcccgtgcacagttccaaaaagctcgctcttccaccttctttcccacgaccgcctcctgcccaggcgagaagtttgcaaacgcgaggcccgcgggagttcccctgcgccccctttcctggtgcccgcaccctgcactctgctgactgtaccggacgccacacgtggctggcggcgacaaggcgccccgatccctacctgagggaaaccccggccactgcagctgcacttgagcagggtccctccactcagccacttggatggctgtttctgtccagtgccctccggaggccactgcctcaggtctgtgatgcctgcagagaatggaattcgatatcaagcttatcgataccg

SEQ ID NO: 1985 - DNA, 1330 bp, Homo sapiens
tacacaagcctccacccagcttctaattgtctcactgagaacagacaaaactccagtagaatccttgaatgacagctaattgtctccagaaaaaatccaaaattgcctccctcccttaattgtagtgcagcatgattctgtttttctgctgggcccctatttgcttctttctgtgcaatgaatcattgaaagagtgaccaccacggacttggagaatctttgtagcttttagtctgtgtttgggtgtggctggagagacaaattaacacacagagccggaccttgaaggggaaggtcctcatttgtctcagattgggatcatttggggaatcagaaaatgtttatatcagaaaagaagagaagtcaatgtgtttcgcaggtttgtggttttttgaaggagaaacatctagattctagtcctgttcctctgcctccttcttaggtgatgttagmcaaaataattcacctytctgagtcaatttgcttatctgaaaaatagcawtaacaacagcactcattttactagggcatgtgaataamcagattttttcccattgagtggcaggtatttattgagtgcctactatgtgccaggcaccatcctactctctggggatacagcagtgamcaaamcagacgcacacctagtgatgagggatggagtaaagcccttagccgatgccagacagaggacatgagtcacctgtagtcgctgccactgctgctatttcatggctacattttgacccctgtggacccactgaaacctcctcactgcctcacaggcagaacaaggacagggtcttggccaccaagtttactcacttgagctgcatttagattattcttccagctaggccatgacagtaggtagtggcagctctctgtaaagatgaggggtccccagctcggacccctggtttcctccacctgcctggaccttacagtggtagccaggtgtgtcctgctgactgggaagctccttacctgggtgcttgaagtatggctccttagcatgtgtggagagaaggctattatgatagcaacctgcaggggtgggatgtgtaccagaccttcaccctggaactcccgaggaagtgcctgcagattgcctggcaggtcttattcgggtgatgtagagcagaacgctggggccaggttctgaagtcagacccctggactcaactcacgcacaactccttacctccaaactgtgkggccttggtcarsgraactgacttctctgagcttcattttcttcatcttaaaaaaaaaaaggagaatcacaccacctaccccatggagttgttatgaggcagagagatgtgat

SEQ ID NO: 1986 - DNA, 1470 bp, Homo sapiens
atatctccactcgcacgctgagttgtgcttcacacaagttttgcgcacggagtattccattaaatctactgaagcagtggggcaaggagaaaggagaggtgactgctgatgtttttaaagctctgacagtcacatatagattgtcccaggtacccctgctgcccccaagacactccaaaggcaaagatggatggtgacaaagtaaccttcatgcagaaacaagaacagtcacccccaacaacaagccctgctgaaggtgaagaatgccaccaggctgcctggcagttactgagtgcttattcctgctagcctattggagtcacgtcatatttgttacatggtaacttaattgtgccttccacgccttcacaaaatcagttgtacaagagaaggcacccaccacagtccatgtgacctttctcggtctgatttacatagtggggatgatgacactcgcgttgtagagtagttgcacgattaaacctggcacacagacataaagcactcaatgtctgacacatagtggactctcaagaagtttgtcatgcaggggacacttgaatgcccagtatgggccagacagcatcagctcatttcagtcccacagccctgtgagggaggaactctgccctgttttacagttagggaaattgaggcacaaaggctaagaagtcgatatccaagggcacagaatgattgggtgacggtgagcccaggcagtgtgacaacaaggttgctgccccacgccacctctgtctttcgtgggtatgtcggtgtgaggtgtaggcagccctgcactggcattcagcaggcgggactcccgggcaggctcttctgcgaacactcatgggccaccagccctttctggaacttgccttttttttttttttacctgaaagctacgtgaatcgttggtaaattggtgtaaraatggaactgagtcatctcaaaagttcctttcagttctaaaatyctgkgaattgaagcctactttttcactttaaatgatttattgggtttacagttctttacgctttctgattgaactgatttgaagttcttatttcgtgtgttggggaacacacccccaacccgtcacagcgtggccgtgggtgggagatrracgttaggctggccagtcactagggggcagcatcagcacgggtctggctgtccctggccttagggagcagtttctgcccctcctgccccgtcagaaagtctcggactcctctctgcttgcatgtgtaaagttttcattttcaggggccttttagtcaaaaaaaataaagctgtatgacttagtgctgaaggatatgaattaggcgtagctcttgggttggcagcataaaccaaggggcatcaacccaccaccgacaagctaagaatggtttttacatctttaaatggttgaaaaaaaaaaaaaaaaaggaattcgatatcaagcttatcgataccgtcgacctcgag

SEQ ID NO: 1987 - DNA, 1725 bp, Homo sapiens
ccttttttttctgttgttgttctacttctgggagacttcttcaactttgtattctaatatttctctgaatggaaaacaacttcatatatgattcacacaccacataattcacctatttaaagttcaatggtttttggtatattacattattagttttttaataattgtagtaaaacatataatacaaaacagttatcattctgaccacttttaagtgtaccattcagtggcaataacttagtgttgtgcaaccataaccacaaactatttccaaaactttttcattatcccaaacagaaactttaatcattaaacaataattatccatttctccactctgcaacctggcccctagcaacctctattccactttctgtccctatgaatttgccaattctatatacttcaaaaaagtataatcatacaatatctgtccttttcagtttggcttacttcacttatcataaggttttcaatgttcatttacatagcatgaataaggatgtcattcctttttatggtggaataatatcccattggatgaatataccactttttgggcttttgttatttttcattgacatatgataatcatgtggctggtgtctgcaatcccagcactttgggaatctcaggaggggggatcccttgagcccaggagtttgaaaccagcctgggcaacacagcaagatctcatctctacaagtaatttaaaaaattaggccaggtgcagtggctcacgcctgtaatcctagcactttgggaggcggaagcaggcagatgacctgatgtcaggagttaagagaccagcctggccaacatggtgaagccccgtctctactaaaaatacaaaaatcagctgggtgtggtggcgcacgcctgtaatcccagctactcaggaggctgaggcaggagaatcgctggaacctgggaggcagaggctgcagtgagctgagatcacaccactgcactccagcctcagcaacagtgccagatatctcaaaaaaaaaaaaaaaaaaaaaaaattaggcaggtgtggcacatgcctctagtctcaactactcaggagactgaggcaagagactcgcttgagctcaggaggttgagggtgtagtgagccatgatcgtgccactgcactctagcctgggtgacagaatgagagcccatcacacacaaaaaaaattgcacatatttatggagtacagtgtgatatttcgataacatggatacaacgtataacaatcaaatcagggtaattagcatattaatactctcaaggatttatcacttctttatggttgagaagactcaaaatccattcttccagctaatttgaaaatataaaatgaattgttaattatagtcagtctatagtactattgaacactagtaacttatccttcctatctaactataaacatatagatggtcaataggcatatgataaaatgctcaacataactataaacttcagggaaatgcaaatcaaattttaaaaaaatttttactgttggccaggcgtggtggctcatgcctgtaatcccagcactttggacagccgaggcgggcggatcatgaggtcaggagatcgagaccatcctggctaacccagtgaccccccgtctctactaaaaatacaaaaaaaaaaaaaagaaaaaaattaaaaaaaaaaaaaaaaaaaaaaaaaaaaaaaaaaaaaaaaaaaaaaaaaaaaaaaaaaaaaa

SEQ ID NO: 1988 - DNA, 903 bp, Homo sapiens
  misc_feature (302)..(302): n equals a,t,g, or c
tttagtcctgtgagtaaagctttggttttgatgactgtctcagggaaaggtagaaaggtgcttggtggcagtgaacttcctgctgcagaagtgggtgtgaccccagtgctggagaatgggctgtgagccgagtttcccgcacctgcatgagtgagcgccatggtccttctccacagagcgtcctgctgtcactttggtttgtgttaactttgacgcctttcttgtttcttactctgctttcctgcatggagcacacagccccggctccctttcagtctgcatggcagacacctggcctctrnaggtccagttcattctgtgtcccctttcggtcgtccctatgttccgtcaggtgattgagggtgaaggtcggccttggcagcccagtggaaagtcccttgactcctggccgtcagtggcagtctccagcctttgggargaggaaacttctatttaacaagraatggaattgactttgccacamacagccagagcgatgatttgtagagccaacctgctgagacattcaaagcatcagtcgtagggtcaggaccgccaggtgaggtgtggctccacctgcagcagcctggggcaggttgcctagcctctggctttagcatccccttctgtgaaatggggaaagtgatgggacctggatttgtagggtggttgtgaggacctacaggggtttttgcaaaatacttagcccagggctgactaaaagattcagagacgctgggcatggtggcacacacctgtagttccaggtactcgagaggccgaggcgggaggatcacttgagcccaggaattaaagtccagcctgggcaacatagtgagaccttatttcttaataaaaaaaaaaggaattcgatatcaagcttatcgataccgtcgacctcga

SEQ ID NO: 1989 - DNA, 1773 bp, Homo sapiens
cagagaaaggaaaaaattcttagcacagtacttattacaatctgatttcttttctttgtttttctgtcaccttttactaggatgtatgctccatgagagcagagcttcatggtcttgtttgcctctctgctgtctccacaatgactgcagcagtgtctggcacagagatgccaaacatttgctaaaggaatgagtagggaatcaggttctgttttgtcttacaccccccagtgcctaccactgtgcttggcccataacaagtgcccagaaactggtgggtactctgaggccactctgaatataattgctattggtagatctgtgttctcatcctagaatttagaatgggaaagcggtttagaactaagagtctttcaagtgtttcgagccaaactgcaaagcttttagaatattgtctctgcagcctgaaactgactattacacaggttcccccagttcccattcaagagcgaagtctagatgtttagaattctatgcctaaatagcagaacggaagcctcattttattttgattaaattcctattttaatacatacattgcatcagtcagtgagtcagtgagtatttattgagccccttcaggatacaaagtagtgctctggtagagctattgagtttgaaatattagtcacatttttaaaccaaaaccaaatccccaagtagttgaaagtgctgttcaaattgtcagagtgcagttcctgtagactgtattttgtgagatgggcttttactttatatgttcccacttgggcaggaacaaaagtttggtaaattactgaggtattacattttaccaaaatgaaattttgaagtgatccttcatcattagctttcttcctgtccaattgttgagggagtgtgtgataattacagcatcttttgagtaatttaagattttgggatcttgtgctgccaggacagggtaaagaataacacttgccttcactctttgacactagtgttcaaattgggcagggaaagaaggggtattattgttgcctcccagatcccaactctatccaaagtactgtctcctttacttctgtgagctgacagggttgcagaaacacataaaatcctagactatcttgacatcaccaaccgtagagtttgtgaaggtaacgtgtcctctacaaattctcatttgttttcattgtttgttactcttttttgttcagatttctctgttgacttctgcagtgaaccacctcaaagccaatgttaagtcagctgcagacttgattagcctgcctaccactgtagagggacttcagaaggtaggtgccatgtgtgggtacagagacttcagaaggtaggtgccatgtgtgggtactatttgccataattctagcttcttataagttttcattgaaagcctagcatttgaaatcagctgctccaagagggcagtaatggagtgtatcactgtgtcctaaagaattcagaacaattttgttttggtctggttagttaggcctttaatttgcaacaggttacctcagctgtgatttatatgggttcatacctttttatttggctctctgagtcccagaattgctctgctggcactcttgtgttagcatatatgggttcgcttttcagcttgctttttcagttcaccactcacaatatcttcatcaaagcagaccaattgtacatgatagttaccctaaatctctgttactttccataattaagaaagttaaaaaaaaggaattcgatatcaagcttatcgataccgtcgacctcgag

SEQ ID NO: 1990 - DNA, 2218 bp, Homo sapiens
ttttttttttttttttttaatacaactgaaccaacaaatttatttagttagtgctgataaagacagcagccttgagagacaagcagtaattacctggtctacttaatgatgccctttgttatattttacaggcaaaaagaatgattcctcagcagtcattgtgaaattttgtgggccacaagtattgtgcacacatgatccttgatttagagtcaacctgatgtccattatagctgtggaaaggcagcaggcagttgtgtcgctcttcacaataaggaacacatcttgctttcagcatgtgagaggaacaaaagcattgatgtaaatgtgcctcaaagtgagaactgaaaacattaacataaaataaaaaagtcaaataagactaagttcttacaactacctataaaaattgaattattacaactaaagcagcaaatcaaaacatctgctgaggttttctggtagaacaacaacaaaattagttggtgcccatgttcagtaagtcactaccattgacaaaactaaatccaaaataggaaattgaaaagtgcataatgaaattaaatcttgtatcaagtatttgtggaaaactggaaatgtttctctggtatggttggtgaatgatgatttggaggaggtattaaagtttatccgatccagctttggcctggtgttccacgtagaaaaggatgtaggccttcgccttcaccacagtctcctcgtcagtcagtgttacagtactgtcattgaagtggaaccagcggccttcgtgagttgcgtatgctgtgtaatgtccagaaccaaccccggaaccatggtgcaccaccacagcggcgaggtcatacaggcagctctccgggccactgttctcaggctctagtaagtagcatttcatgtctaggcctctcagtggaaattctacgtatgtatcaactttatttcttaaatatgctgtccaatgaaatcttttcaaatgtaagcatagcaccttgggtagtttttgaatccaaaacttttttgtggacttttgtttctttttgcatttatggcacatatataactctgtctcatcaagttcttctaagtcggtaaaactgcgaagacaatctcgtaacgaacaaactggtccattttcttgattcttagagcgcttacttctgaactgacttggaatatctaatgaaaggtctaggaatggatcaaactttctagattctgtcccacatatgaggcagttaacctcattttggagaatgcctccgaatatagccgtgacaacagtagatgctccatttatgcaacacttgttacttgcagacagagtagaattctcctgcagaattgctgagcgggaaacaccgttgaaaccgccctgaagttccaagtgtaggtggtccaaaaggtagcgcatgaattcatgggcgtcctgctgttgatagcccctaaagtttggcataatcttccaaacaacataaaataaggactctgggctaaatgcagtctggctgccttgccataaagcacagagtgtctttctaaactcttctaccaaagacacattgttatccccttggctcctggtgtggtatgtccgccttcctgctgttttcccattccttaactccacggcgggcagttctttgaaataacagcaaaactgctcaatgttactgagtgactgaaggatggcattcatgaaacatgtgttccccaaattccgaaggcctgtggcacaaatggcagtggtgctcccatttacttttaataacttgctgtttagtgttgagttttccaaaagttttcttttcttatgcctgtcagctgtgaaagctgagttttccaagttctgtaagtgttctctgactttctgtaccagtcccagcttggtgtcattaaccacaaaatcatcacagcgataacagtatgtactgtagctactgcaatccatacatactgtgtgctgaactttatcttgcttttctgatttcttatggttggttaaaggtacttgtgcatcttcataatgtttttttgcatggccattcacatacctctcaaaatctaggagaggaatctgtctcttcaactgcagaatttaagtgcttctacttttcttcttttttaaaaaaaagttatctgtacaaagtattttcaggttccccaaatccttccacagtggacacttgaacaagtcaaacagacccaagcggacgcgtgg

SEQ ID NO: 1991 - DNA, 1119 bp, Homo sapiens
  misc_feature (1075)..(1075): n equals a,t,g, or c
  misc_feature (1077)..(1077): n equals a,t,g, or c
  misc_feature (1094)..(1094): n equals a,t,g, or c
tcttacgcaaccagatatgctatgactgtctggtactttgatgctgaagaaagggcagaagccaaaaagaaattcaggaatttaactaggaaaactgaatctgccctcactgaagactgaccgtgctctgaaatctgctggccttgttcattttagtaacggttcctgaattctcttaaattctttgagatccaaagatggcctcttcagtgacaacaatctccctgctacttcttgcatccttcacatccctgtcttgtgtgtggtacttcatgttttcttgccaagactgtgttgatcttcagatactctctttgccagatgaagttatttgctaactccagaaattcctgcagacatcctactcggccagcggtttacctgatagattcggtaatactatcaagagaagagcctaggagcacagcgagggaatgaaccttacttgcactttatgtatacttcctgatttgaaaggaggaggtttgaaaagaaaaaaatggaggtggtagatgccacagagaggcatcacggaagccttaacagcaggaaacagagaaatttgtgtcatctgaacaatttccagatgttcttaatccagggctgttggggtttctggagaattatcacaacctaatgacattaatacctctagaaagggctgctgtcatagtgaacaatttataagtgtcccatggggcagacactccttttttcccagtcctgcaacctggattttctgcctcagctccattttgctgaaaataatgactttctgaataaagatggcaacacaattttttctccattttcagttcttacctgggaacctaattccccagaagctaaaaaactagacattagttgttttggttgctttgttggaatggaatttaaatttaaatgaaaggraaaatatatccctggtagttttgkgttaaccackgataactgtggaaagagctaggtctactgatatacaataaacatgtgtgcatcttgaacaatttgagaggggaggtggagttggaaatgtgggtgttcctgtttttttttttttttttttttttttagntntcctttttaatgagctnaccctttaacacaaaaaaagcaggg

SEQ ID NO: 1992 - DNA, 1955 bp, Homo sapiens
  misc_feature (1106)..(1106): n equals a,t,g, or c
gtaattttaaaattttcaagtagccacataataaaggaaacaggtgaaatttaatgacatatttcctttaatacggtatatccaaaatattattatgtcaacctataatcagtataaaaacctgttactgaaatattttatagggcccatctcagttcagactagccacatttaagtgcttcatagccacatgtggctcatggccatccatatttggacaatgtactttagactattgcatctgtatactcttgtgccgtcagctggggggtggggtgtgtgtgcgtgtataccaaggcagtgagcatctgagctttgaacctcaaagaccaaaatgccctgcccattttcctgcttatcagctgaggaatctttacccacattgacacatgggcttgttctgacccaagtgcatgcaggcttccagagcagattcagaggcctaacttagtcctttagctttcctcccagcacagaactcccaaggttatctgcaagtaggccttgcctagagagactgagttttcaagttgtcagttttcccaaattgtcctcaagcatcttcctctggaatcaccttactgtttagtaaacattcagaggacttgctacacatctgggcagtctgcattgtaattcatatgtgtttacacatttgtgtcttcatctgctaaagcacctttgaaccatattgtaattcataatatctgaagcaattattatgaattgtagtaattcataatattgaagcgattcataatatctgaagcaatccccagatacgggttaggcatggccctgctctgagcaggatggcaaaagtggcagtccgtgacgcagcccttgttaccccaggctattactaaatggtggtggtggttttatcttaattaaaatgacatcaccaacaatgggccctttcctgtctgccaggaaaagttttctgtagtgacgcacgtgttgtgtgtgtatgtgtgcgtttgaggctatattactcattgctacggcagttcaaaatgacttggaaaaaaacaatgaacgctggtcattgatatgtatactgacatgtttaagggaagttactgtggtctgtaacttatgaaatncatwaaaatatgatgggtggagtgacggacacatggacagatatgaagcaagcactgtaaaatattagtggtagtttttgtatgcccatactcacggcaccattattcacagtagctaagagatggaagcaatatgtgcccatcagtgggtgaatgatcaacaaaatgtggtatattcatacagtggaatattattcagcctctaaaaggaagatacgctgacatgtgctgcaacatggatgaatcttgaggacatgatgctaagtgaagtaagccagtcactggaagmcaaatactctatgctyccatttatgtgaagtatctagagcagtcaaatgcatagaaacaagtagaatggtagttgccaaggmctgggggaggaggaaatgaggagttgtttaatgggtatagtgkttcagttttgcaagataaaaagtcctgtggattggttgcacagttaagttatgtgaatgctgtatgccaactcaactgtcactctaaaatggttaagatggtaaatcttatctttattttaccacagttttttttaaagcatggtaaacaccatttcccaggatgtaaatcggtactaaaaaaaaagtgctccaaagtaagatatatttgggaaacacagggataactaaggttagataggtgttctttattgcaggaattctaagagcatttaacaaattaatttacactgggaattttcagtgtggagggtctggctcatagcatttcacaaacattatacttcagagtcccaaagcctttaaataaaatgttaatggtagaaactcaaaaaaaaaaaaaaaaaaaaaaaaaaaaaaaaaaaagggcggccgc

SEQ ID NO: 1993 - DNA, 1528 bp, Homo sapiens
aattcccgggtcgacccacgcgtccgcatgattacactaatgcattccagccttggcagcagatcaagaccctgtctcaaaaaaataaataaaaataaaataattgctgtgaaatttctattaacgtttttgggaaaaccagaggcttctgtgtgacatgtgaatcacagaggagaaatcatgaatctttatagccttgtgttaacatgacttccttttgttgatagagtggtttattagtctcaagacctttgaaatggcacatgaattgcttggacagattatggagacatccacccttctttagagatttaagtaagtagaaccagttagtgtgcctcttctgtttctcaccttgctcaatgcagaatgaacttggtgtatatccaccagaagcacctgcttatctactgtttgctgtcgttgcaggtatctgttgagattagctgtaacgagttgtatgtaattttataactaactgaattaagaaaagcctttgtaagattcagtatctgcttcaggtcattgaaatgtaaaattagaaagtaagctgagggcaggggatttttttctgttttattccatttattccctcaccacctttgccatccaccaccaacagtttcttttaaatttagcatccagagtagacctttgacaacgcaaatcagatcacttcatttgttcattaaaaaccttcaacaggtttcacattattcttaggattatatttaacatccttatacagtaatctccaagcctctccttgatctggtaccctctttccatctctaatctcttctttaacactcctatacttacttactcagccccaggcacattggcatatttgctgttgcctgaacatgcaaattccttgaacttgctgtttccttgcctgaaactctctttcctcagatatctgcctggccttcctcttaacctccaagtcttgtctcaaatatcattttttcagtgaggccttgcttggccagccctttccctcactatatcctgctccccaacaattgatttttacttatccatataacttttatccccctgtgtgctatatattttacttatttcttggttcattggctgtctccaccaaaatgtaagtgccatgaggacaggaattttattaatatcagtttgttcatttctatacctttagtgctttaaacagtatttagcacacagtaagcattcaattaaatatgtattggactgggcacagtggctcatgcctgtaatcccagcactttgagaggccgaggcaggtggatcacctgaggtcaggagttcaagaccagtctggccagcagggtgaaaccccatttctactaaagagaccaaaatcagccagtcatggtggcatgtgcctgtagtcccagctactcggtaggctgaggcaggaagatcgctagaatccaggaggcagaggttgcagtgagtcgagatcaggccattgcactccagcctgggtgacagagcaagactctgtcttcaaaaaaaaaaaaaaaaa

SEQ ID NO: 1994 - DNA, 2069 bp, Homo sapiens
ccacgcgtccgcctcgtgctcatcagagcatgccaatcctaagccattggacatatgtagactggtttttgttgttgctatgtacatataaatatatatataaaatgaacatagttcatgctttcagataaaatgagtagatgtatatttagattaatttttttagtcagaacttcatgaaatccacaccaaaggaaaggtaaactgaaatttcccttggacatatgtgaaatctttttgtctttatagtgaaacaaagccagagcatctttgtatattgcaatatacttgaaaaaaatgaatgtatttttttctccaaagaacagcatgtttcactcaatggtgaaaaggtggaaacatttatgtaactttatgtgtatctgtcttgatatctactgacattgtctatatgaggaaaatgattactggtcatgctcctgtgagttttttgggaaggtagggtcatttctccctgcctgctttgtgccaactagcatgttgcatctacatgcattatgagtctggttaggcattactttaaacatacataaagagacagtaggacattgtggctgagtctacccagctcaaggtaaaggagaatgttgctaattttttagcaaactagaccagcattattactcaaactaaaaatatcacacctgaaaaatttaatttaggacctaaaatgtctagattagctttctgctttttttatttgaataactcattcagttgtgaatgaattcctctttatttggtgccacagtcaccaaatgacaaggatttgccactttcccaccaaattgtgagtgcttgtaatttaggtctctctaccttaaattcagtataaggaaacgtaattatgattgattttttccaaagatgacaagctgtgttgaaatacattttttcttttgaccaattgacagaatctaataagctttaataatcttccccttttatgtgaaaagttttgagaactgtgaaatgtttaggaacaaactgttgaaatccattggaagggaaaaaagaaagtggtaccagtgttaccagctcaactaaaacctgcaattctgcatttcaactcttcacttcctcagcctacaaatagctcattagatgacattcacgcatgctgggtataggcaaggaaagtaattttcaaagtacatttgcagttctctttttcagagatgattctatgatagtgcctctgaaagttgatgcagcatttttgcctttccaaaaagtatttatcctcactgctttttgcagtacttgtattttcacagatggattatctggggtaattttcttcaaagggagtttgttatacacagtgaaaatgtattatagagtagaatagtaaagctctaggggtttcagaaagctttgatgaacagatgacaaacatctgaaaccccctccgcactgttacccagtgtgtatataatgacttgttatagctcagtgtgcccttgaatccatacagtttcttaaaagacaataaaatcttattaataaagttaatgtaacttctaagttctagaaaatgctgattctgtctgccccattcaattgggggctactaattgatttgttgcttggatttcctgagaatttctctatttgtaggaggggttttttctttttacggtctgttgatgacaattactttatgggtgtgatgcaccgatggtagccaaggaatctgttggggaagttcggaaagaaaccttttctttcttttattcagtttaaagtaaactttatcctggatgtttagaatcaacattaagagttatattatggtgttcagagattaagctgacttggatacaatattttcttttgaaaatgaattttctttttcatttgtgatttttaaaaaatgttgcaccagttatgcttcatgcatcgttacatcttcatcaggttaatgtaatgtctagttcctttgcaataaatatattgctgcaaaaaaaaaaaaaaaaaaaaaaaaaaaaaaaaaaaaaaaaaaaaaaaaaaaaaaaaaaaaaaaaaaaaaaaaaaaaaaaaaaaaaaaa

SEQ ID NO: 1995 - DNA, 1528 bp, Homo sapiens
caggccaagaaatgatcataccccttgccaaaggtaaaaaaaaaaaaaaaaaaaatgagttgaaaattgaagtgacctctttccagctgacttgcaggcttattttgtaacctttcctcatccagttttccctgagaacctgggtttatctctagatagctgttcaggttttttagctgaggggtaagtatcctagctgagagttttgcatctttgggctgggtttgcagtggttgtgttttgcataaaatgtctagtctttgccacagatagtgagctacccactaatgagcccatggttttatttcagaagcacatgagggtgtgaaaccactctgttacctttctgtattgtcttagctattcaagccagtcagaggataatatatatattctcatcagcactcagagtagtcagtgaagagagtagatcacacttgggcacaccaggattcacataaacattgtatcttctctgtggatgctcaggccttgtctacaatgaggctttacaaccttcctttgttttggctcgggattacttcctggctgtctaataattgaaccataaccatgtaatattatgtaaaggcctggaaattactgttgctaaaaaaagtcatgtagtttcatgtagtgtagcatccttggcatcgttttccaaaatttgttccttctcccttttttttttctttcgtgtgtggcatgagtgtgtatctgtgtaaatatgattgtatatgtgttactccgatatgtaatccatttcactggctgagtttggcccctagccatgtgttaatataaagtaggcatggcttcccaatggaaatctctgagaatgacagtggagttgtgcaagcattttacattgccacataattgacttgccattttatggttaaaaacggcacattaggcagttgaatatgacgttaccttgcagactaaaaggttgaaggcccgaaactaacttttagctaacaataagggctgtgccccaatggaaactgagttcattttctgagaaaggtttggatgactgaaatatttcctctacagtcaaggactttggcatgyggtggctgaaactgagcttttttgtgtgggctccagttctcactgttctgcaatgctcatggcaagttgaatggtgagctagcttataaattaaagagctctgaactgtattcagaccgactgggtatctagcttactgttttaacatcattgttgaaaccagaccctgtagtccagtggtgctgccctgttgtgcaaactgctcctttttctcgtgtttttgtaaagagcttccatctgggctggacccagttcttgcacatacaagacaccgctgcagtcagctaggacctttccgccatgtattctattctgtagtaaagcatttccatcaacaatgcctaattgtatctgttatttttggtttaacacacactgattcatactaataaatattttcagttttaaaaaaaaaaaaaaaaaaaaaaaaaaaaaaaaaaaaaaactcgag

SEQ ID NO: 1996 - DNA, 1751 bp, Homo sapiens
  misc_feature (1741)..(1742): n equals a,t,g, or c
aattcccgggtcgacccacgcgtccgacaacttttctttagaaccacattattggtcataatccttgttactgtcatgaggattgttgcatgggttaaacacaaacacagactagcaatgcacttgaacaaacctggtggtctttggaaataaatcaccattagatttcacctggttatgctgcatcccataagttccaaatgaatcacctgcttatcctattaacgaagcatttaattcacacacaaatgcttgaatttcccctgtataaatgtagtcatgcgattcaacttttctaataagatttgtgaatgctgcatcatgatgaaaatgtggattaactgtgggttgcatgcctgttgttcatacttcagtgatggtcacacacaaaacaagatgagttttacttaggtgaaacattattaaactgtactaacaatacagaaacatattctctttgtcgctttttatcaccaaaactgaatggcaaatatgtcttgacattacttggatgaactgtggctagcaaaatggaattaacttagccactataattttttaaaacattaaagtttctaaattgtttttgggggccgagtaacgcagagtcaataaaggtggttatattgtaagcttttagatggtgcttaagaattcttatctttttaaatagcagtattttttttttaagaataaattgtaaggagcaaataaggcagaatgccactctaccctcaggtcaattttatggtatatgaaaatgccagtaatatttgtgccacttgccaactcgggggaggaggggcttttcccttactggatacttttgttatagtttgactatgtcattatgttgtttagagagcctccacaatgagaagttgccactgcagggctaactcgccttcagaaataatcagaatgattcaagggtcaaaccactttcatcccttaaaatatagggactaatatttctttttcttttttttaaaaaaaacatttcttctgtggcttagaaatgtgccagtgtgttcaaaacatttacaccaatttcaccagatttaggacctattaaaaattcaaacaagtttctttttttttttttttttctgtgtaacagggatttttaaataacggactatatgcattcttttgttatttcacacttcagttaaagtgataacaatggtaaactgtgatcattatcagactgactgaatgctttctgatttccagtgagtgatctagttctacgtattacacaggtgtaatatctgtgagtgtaaataactggaactgtacactgattaacatgacagtttctcttttgttgttcttatctgtactgtattatagtatgtgggtataaatatctacaagtatacacacatatgtacttgtattccactattgtaacctgaaagaaagactatgtattcccttttttaattccgtactggtatttgtgttatttaaaaagcaaaattctgctctatttagttgtataatattagaggatactttgctgtgcacaattccaagtgccttagaacattgtttagctttcctaagtatatataaatgcatatatgtataaaattgggaaaagttacctcaataaaatcattgggaaatcccaaaaaaaaaaaaaaaaaaaaaaaaaaaaaaaaaaaaaaaaaaaaaaaaaaaaaaaaaaaaaaaaaaaaaaaaaaaaaaaaaaaaaaaaaaaaaaaaaaaaaannaaaaagggc

SEQ ID NO: 1997 - DNA, 752 bp, Homo sapiens
tcgacccacgcgtccgggaccttaagaacaacttgctaggttcgctgcggatggcctggaagtcttttaccagagctccataccctgccttacaagcttcagaaacaccagaagaaactgaagcagaacctgaatcaacttcagagaagcctagtgatgttaacacagaagagacctctgtggcagttaaagaagaagtcctgcctatcaatgtggggatgctgaatggaggccaacgcattgactatgtgctacaggagaagcctattgaaagttttaatgagtatttatttgctttacaaagccatctatgctactgggagtctgaagatacagtattgctcgtcctcaaagagatctaccaaacccagggtatcttccttgatcagcctttacagtaaaaatgacccatctatgggctggcttaatacggacattgaggggatccttccccagaaaatccacctgtttgttgctggcaattttcctctcctcagctgcgtcatttcctttttgttgcttgccactactcaccactggggtctttggaagataatcttcctctttggaaatgaatggaaaagcaaaaggccctattacttttaaccactggcttcatataaacacttgccatttttttctgcaaaaaaaaaaaaaaaaaaaaaaaaaaaaaaaaaaaaaaaaaaaaaaaaaaaaaaaaaaaaaaaaaaaaaaaaaaaaaaaaaaaaaaaaaaaaaaaaaaaaaaaaaaaa

SEQ ID NO: 1998 - DNA, 629 bp, Homo sapiens
  misc_feature (2)..(2): n equals a,t,g, or c
  misc_feature (38)..(38): n equals a,t,g, or c
  misc_feature (41)..(41): n equals a,t,g, or c
tngaggtacgcctgcaggtaccggtccggaattcccgngtngacccacgcgtccgctcgaagttgtaatctctagggagacatttatagcatcttctttgacttcagcatgtgaaagagtaaggaaggatagtccaggccaaggaatcaacttttgcagggaagggaattttgtagggtagtcagaggccagtgtgtcattctctgtggttacagtgtactgtaggtggtgcgaggtgacataagcaaaagtgcctggagcttagtgggtgatgactaaatcagtattcttttcctttctttccctttccctaagcctcggctgatgcttctctgtcaaatcaggttcattgtcagcctgctgggttttttttttttttagtatatcgactatagttaagacttcaatttttccaattagtattttaaattatataataattaaattcatcctgttaaaaaattaacccttgtaaaaatgattattcttctctccagaatgaagtgctgttacatttttcttacatatccttcagaaagacttctgtatatataaatgtccatatgttttcttcttttcaaaataaatcatattataaattaaaaaaaaaaaaaaaaaagggcggccgc

SEQ ID NO: 1999 - DNA, 809 bp, Homo sapiens
  misc_feature (727)..(727): n equals a,t,g, or c
  misc_feature (738)..(738): n equals a,t,g, or c
cccacgcgtccggtggatcagcattttagaaactacaaatataggtttgattcaacacttaagtctcagactgtatttcttgcgggaagagggggactaaactcaacctaacacattaaatgtggaaggaaaatatttcatttagcttttttattaaaatacaagtaatattattactttatgaacaattttttttaattggccatgtcgccaaaaatacagcctatagtaaatgtgtttcttgctgccatgatgtatatccatataacaattcagtaacaaaggtttaaagtttgaagattattttttaaaaaggtaaatggttaaattttacatgacagatattttatctattggcctgttccccaaatggccattttaaaatgcttgggtacacttctcttaagtggtctagtcaaggaacctcaagtcatgcttttgctatcaccaatcataatgtacccatctttaatttatatcaggtgtataaatgtacatttccaaatgaacttgcacttgttatattataattggaagtgcagtcagcagatgctgttgtgaagctaatgtcacaattatgtgcaaaggtgtgcttcctgctgtatgtgagctgtaaaaatgttacgtgaagaaataaatgaaacttggccaaaaaaaaaaaaaaaaaaaaaaaaaaaaaaaaaaaaaaaaaaaaaaaaaaaaaaaaaaaaaaaaaaaaaaaaaaaanaaaaaaaaaanaaaaaaaaaaaaaaaaaaaaaaaaaaaaaaaaaaaaaaaaaaaaaaaaaaaaaaaaaaaaaaaaaaaaaaa

SEQ ID NO: 2000 - DNA, 1208 bp, Homo sapiens
ccacgcgtccgccagctccaacccacagcaattacacttctccccctggtgaaggaaacacttgcataagaataagaggttcttccacaggcattttaaaaccttttttctttcctcttctccacaatatcagcatttaagtttaagcaagtttttttatttctagaagacattttactaggcaaggaatgataagaatccctgtgtatattctctattaagctttaattgtgaaaaaggatttgtagggctagtcttgggctgtggccaatctggtatgcttcctgtgtctgtatggtttgtgctgtaagcctccatctgttttacacatcctggggacatggcccacaactgcttgacagaactttgtttagcaatcctgctttaggggatcagccctctctggccaatatctgcatgttttcctactcctgtctcttaaagggccccacccagcgactggattttcttctgcctctctgtgtgggtactgtgtgtgatatctgtaaaaagtgcgctaattaatttggcctaaagaaagacaagaacttggatcaaattttttttaagggaagttaaaagctgtggtatctttcagttcacatgactttaatctctgagaaataaaaacagccctaaagactattggtaaaatgcaggtgagatgcaaggttttctaagtgttttgaggttaaaaactgctttttgggttttgagaactatttgacttgaaggcttcacaattggtaaggcctggggacatatggaaataaccacgctcttaattatgctgggagtcaaaccttggctgcacctagcacacaattaaacaacttaccaagtttttaccttaaaagttaaaaattgctaggagttactattccgagatgtaattgagactacaggaaatagatttatatgcaagatgtgtaagaacagtaaaatgtggtgtttttttgtaaaatattataagaaggcatggaaatgtatacttttgcttagggttaaaggattgtttaaattaggaaaaagctgaaggttcaaacaagtggtggagaattgtggaaattaatcttgcagaagaggttcaacatattaactaaattcaaaagggttataaggttataaaaggtttttgcttctttgaaatttctgagtcatccttttggcaaaataaataacttaatggcaaaaaaaaaaaaaaaagg

SEQ ID NO: 2001 - DNA, 2141 bp, Homo sapiens
  misc_feature (644)..(644): n equals a,t,g, or c
aaaaaaaaaaaaaaccccaaaaactgttactactaggttggagtagcctaaggcagtagggcaaggaggtgggcccaggctggtctgtggggagctggagaatggtgactcgagtgaccagtggacaggcaggacccaggccagcattacaagcggggatgtcaggcaggagcaggggagyttctcgcttggcagctggtttatggtacacttttgaaaagtaagctcccagggcctggccctcacatgctcagtgaatatttgactgaagggtcccctcatagcttgggagtattcacaggcctaaatgttagttatactattagctaagcctggtcctttgttacgaaatttaaaaatgaaattgcaacattcttgtggaaattcaaagacatcattttctttcaacaaattcacacattcrttcatgcttcttctataccttttacccctaaagtcatccactcctgagttcctcctgctggtttcccaaactgcgcaatgactgccccatcataggcagtggtccgtggagtcggcctcactttcgcctttccccgcatctacttgtttccaaggccagtggtacttaactgggtcaagttgcctgtgggaccttcagggaacagaattgccatgttccntcactgcctgcagggaaaggstccattccaagcccagtgaagatgtgtgcctatccagccgcccaccaaggatgtcatctgtagaatgggtggagggcaggggtttatttggtgtatatttttacattaaaatgcacttaatatcactttgtaaagcccagatgagtgcaaatgtgcctgtaacttcctcctttaatctgtccaggtagtatttagtctttagtcttacattttctttctccctttatttcatgaaattccttgagaaaacttcaacagtaaagaaagaaatttcgttcatctcacaactcttccaaacgaggaaacttagtgaaatatttcagagcttctagatgtgaggtacaaaacttgggatcaaatggaatcttgattcactaaccaatttaagatctgacttctaattttaggaactttgggttatgaacgcttccattttatacctgtgtctagttagtttctgcctatctatccaagaagcttttatcaagggtccaccatgtgccagccactgaagtagatataaatataaggatgtgtaaggtatggatgatggtatacgaactgtcatcttactggatttgtccgctctgttaaagatacggttccgaaaactttttaaagccctagagagggctttaaggcaatgtagcatcatatatagaggcatcaacctgttcatatctttctatttaacagaactgtgcacctgggcacaagggtgtgcacaacaggatgtgtacagcagcactgttaaagtgtagcacatccatactacaggatcttatgcaactgttggaaagaatgaagcgatgctgcactgtggtcatgcagtgatctctaagacatattaactagaaagcmaaaggttwacaatgtatagcagctgggcgcagtgactcgcgcctgtaatcccagcactttkggargctgagtaggcggatcacctgaggtcaggagtttgagaccaacctggccaatgtggcgaaacgctgtctctactaaaactacaaaaattagctgggcgtggtggcgcgtgcctgtaatcccagctactcggcaggctkaggcaggagaatcgcttgaactggggaggtggaggttgcagtgagccgagatcacaccactgcattccagcctgggtgacagagggagactccgtctctaaaaaacaaccccccccccccaaaaaaaaaaatgcatagcaagctgtaatgctctttgtgttttagaatagtagaggtctggaaagttgtttgcttttccccagtttttttttgctgtgttacctctgaagggaattgaggtagaggggagagttagaaggaatattcggcttttctattttatatcctcctaggtgaaatttttacaacaaacatgtactggtgtattttgaaatgtttttaaatttttgtatttcaaaataataaaatataaattcaaactgaaaaaaaaaaaaaaaaaaagggcggccgc

SEQ ID NO: 2002 - DNA, 1118 bp, Homo sapiens
gggggctagaagtctggcacccaccgcctggccaggtgttcgggacgcgaccaggtgggcggtcgccccgccccgggagcgcggcttaatagctgagagcccgggggccaggccgcggctgcggccaggcaacgccctgagggtggccacgctgccaggtgttccactcccccgggactatgggcaagggcccggggcggggagggcggcaggtgctgacactggagctgcgccggagtcggggaactcggcctcctaagactgaggacactcgcctgctgggccggtcgagctgtgcggtgccctccgggacgcagggggcgctgcagccacgctgggtcaggctccgcaggccctcccaacccggggactaacggcgccggtgacgacttcgccgcgcgttggtcagccatggccaccgctctcgcgctacgtagcttgtaccgagcgcgaccctcgctgcgctgtccgcccgttgagcttccctgggccccgcggcgagggcatcggctctcgccggcggatgacgagctgtatcagcggacgcgcatctctctgctgcaacgcgaggccgctcaggcaatgtacatcgacagctacaacagccgcggcttcatgataaacggaaaccgcgtgctcggcccctgcgctctgctcccgcactcggtggtgcagtggaacgtgggatcccaccaggacatcaccgaagacagcttttccctcttctggttgctggagccccggatagagatcgtggtggtggggactggagaccggaccgagaggctgcagtcccaggtgcttcaagccatgaggcagcggggcattgctgtggaagtgcaggacacgcccaatgcctgtgccaccttcaacttcctgtgtcatgaaggccgagtaactggagctgctctcatccctccaccaggagggacttcacttacatctttgggccaagctgctcaatgaaccgccaggaactgacctgctgactgcactctgccaggcttcccaatgctttcactcttatctaccctttggcacttatcttgcttatcaacataataatttatacacttctaaaaaaaaaaaaaaaaaaaaaaaaaaaaaaaaaaaaaaaa

SEQ ID NO: 2003 - DNA, 1769 bp, Homo sapiens
gtcttagcagaggtgattacagcagcagtgagggccgtagatggggaaggagcgcccgctccagagagcagcggggagccggctgaggacgaaggccccacggacacagcggaggccggtagtgatcctcaagccgaacagctgctggaagagcaggtgccctgtggaacggcacatgagaagggcgtccccaaggccagaagtgaggctgcagaggctggaaatggcgccgagacaatggcagcagaggcagaaagtgcccaaaccagagttgctcctgccccagctgccgcggatgctgaagtggaacaaactgatgcagagtctaaagacgctgttcccacagaatgatgctcatttccctgttccagggaaggcgttgggatgatggatgcgttggtctttctcccttggtttgtaagcagtacaagggcgtgtgctcccagaatatgctgtaatctaattttggtgaagagacccagcgtttcctcctgagcagtgcctctcacggcttgtctcatgcagtcgtgtggcttcttgcccaggtttcaaagctgaagtacattgtccttagcggctgtaacatgtctcttgacagtagtgcacttggaataataaaggttgggtgattatatcttgatgatacattacttgttcaatacagccactgatggaatgcttccttttttatttttttccttaatttttttttttatttggttgggaacagctgaatactaggaatatatcttgctctatagaggatttttttttgtatgtttcaagcttcagcctttaacctatacctttgtagtgcaccatatggtgtgtgactttcacaggacttcgcagcacctggttcacaagtggcactgaccgcgtcacatccacgcactcccaaaggccagaagtatctgaccgacctacgccactggaaacacacccaccgcaacctcaagaaccagactgtgcagagggcattgcgtcccaatctttagtccttgctgaatcagttctctaatattttacctcatttgtgttccacctctagattacttcaggtttttttcctttaaaattagttactaccactcaaatgtatttacaaagagaatttggccaggcacggtgatgcatacctataatcccagcacttggggaggccgtggtgagaggatagcttaagcccaggagttcaagaccaacctggacaacatagcaagaccccatctcttaaaaaaaaaggaaagaaaacttgatgtgattgccataggtggaataatccaacataaattgccatagatagaaggtatctgtaatatatatatatatataaaatgaaatatatgtttcattttagagaaataactattactttagatctttccaaatctgagaaagggaggctagcatgtgttcaaggttagcacgcaacagaatttcctaaaatcagaagaattggaagatcctccccttttgaaatggccctgctgtgtcagtttccctgtggccttttgaactgtacatctcacatgttgggaaacgctggccactgggaaatcattagaaaggaggctgtagaatatttgccgagcctctactgtataccaggggctaactcaccaagcacattctaggaattgggccctgctcatgaggagccttagtggagattccaggtgaatatttatgaaaaagtcaacattagaactgaaaatggaaataaactgcttgaaaagacaaaaaaaaaaaaaaaaaaaaaaaaaaaa

SEQ ID NO: 2004 - DNA, 1149 bp, Homo sapiens
tcgacccacgcgtccgggtgacagagcaagactccgtctcaaaaaacaaacaaaaaaagattgaagtaatgaattttatttcagtggtatggggaaccttgtttctgacagtaggggaagctatcatgttcctggtaggaggttgcatcttatttcaagcggtgggaaaacaggacctggctttgcattagtaactgaagccaggtggtgaactctcagcatgtgtaaggagccggctgagaaggagctttgctcccatgatattaaattatctgattattgaaaacttttgtaaatggtcattagtgagcaaattgtctttttaaaaattctattatgaaagagttttaaacttaacagaaaataggcaagaacagtgccaagaactcctgtacactcctttgcccagagactattcctttagagcaaaggctacagcccagaatcacgcgcttcaccccattcatcacagctctcctttctgtccatctggtgccactcctcagttttcctgaacttccgcgattttggcgtttgtggaggttataggctgatcattttgtagaatgtctttcaatgtggattcgttgatgtttctgcatgattagaccccacctgtgtgtacttgaagcctgaatgtcacagactctgttctttttatcctattctgtgtctttctgtccagttactggtgaggttactgctgtcgccttgaagcacaaggtgttctgggtttgtcttgttttttcatgaccctgtaactggccacatcttcaaggagcgctgcttccatatagtggaggggggtgtttggaaatgagatctggttgctggtgtgcctatttccactagggtattgcagctcccagaccttctcataggatagagctaggggacttgtacatttatagttatttctgtatctgcgtcatatatcatgttcacacaaatgcatctaattccaatctaacatcacagagttgtcttttaaaaatatgacaagctggccatgcgtgatgctcacgcctgtcatcccagcactttgggaggccaaggcaggcggatcacctgaggttgggagtttaagaccagcctggccaacatggagaaacctcgtctctactaaaaaaaaaaaaaaagggcggccgc

SEQ ID NO: 2005 - DNA, 1281 bp, Homo sapiens
  misc_feature (29)..(29): n equals a,t,g, or c
  misc_feature (47)..(47): n equals a,t,g, or c
  misc_feature (83)..(83): n equals a,t,g, or c
  misc_feature (121)..(121): n equals a,t,g, or c
  misc_feature (133)..(133): n equals a,t,g, or c
  misc_feature (154)..(154): n equals a,t,g, or c
  misc_feature (1166)..(1166): n equals a,t,g, or c
  misc_feature (1262)..(1262): n equals a,t,g, or c
cacgacaggtttcccgactgaaaagcggncagtgagcgcaaccccanttaatgtgagttagctcactcattaggcaccccagnctttacactttatgcttcccggctcgtatgttgtgtgnaattgtgagcgnataccaatttcacacaggaancagctatgaccatgattacgccaagctctaatacgactcactatagggaaagctggtacgcctgcaggtaccggtccggaattcccgggtcgacccacgcgtccgggaggcagaggttgcagtgagccgagattgcgccactgcactccagcctgggtaacagagcaagactccatctcaaaaaaagaaagaaagaaaaaagaaagtacaagtttataaagtattatagtgaaaaattcgcattctggctgattttaagccatttaaaatttatataaaacaaccttccataaaaatttgacaggtgcccagatgttgctttctccatttattttttgtttttttttaatcacagtaggtctgatagagaattggagctaaattataatatttttgttggtaaagttgagttatatacttgtacatacaatggaaatgcttttagtagtgattatttagcaatttttgtttttgttatattaggcatgtttggaggctttcctattctagcatttaaatttaaattttattaaaattaaataatttaaatctagcatttaaatttaaataatttaagtctagcatttacttttaaataattataatgaagttttgaaatactaagttaatccagacctttagttgtcccatggtgttaataaagttgccaaagaagatgtattatgaacaattcagcaataagacaattgtcaacacagttgagaataacaatggtaatcgttagtaatatttagaattggaatttgcctactgaaatagttatagatgattacttgtgatgtgaaactgaattgagcatgacaaccagacatttccagttggttttgtaagttttgagaatctagatactgggttttattttttgaaagattagctctgtttgtaagggctgattccttgaaaatgtaattttccagaaaaacacctaaagaaaataaaacatggacatgcctagtaaaaaaaaaaaaaaaaaaaaaaaaggggcggccgntctagaggatccaagcttacgtacgcgtgcatgcgacgtcatagctcttctatagtgtcacctaaattcaattcactggccgtgttttacaacgtngtgactgggaaaaccctgg

SEQ ID NO: 2006 - DNA, 1149 bp, Homo sapiens
  misc_feature (1138)..(1140): n equals a,t,g, or c
  misc_feature (1143)..(1143): n equals a,t,g, or c
cggggcaaccactatagggaaagctggtacgcctgcaggtaccggtccggaattcccgggtcgacccacgcgtccgccgcggggtctgtgctgagaataatggcccggttggcccgggacgagtggaatgattaatgatgttttgcagcagttttctacgtctgaaattttttatgtctctggaaccyagaatttgctaagagatggaggaacctcagaaaagctatgtgaacacaatggaccttgagagagatgaacctctcaaaagcaccggccctcagatttctgtggtcctgctcgtctatcactggagcagcagggaatctgaacacgacctcctggtccacaaggctgtggccaaatggacggcggaagaagttgtcctctggctggagcagctgggcccttgggcatctctttacagggaaaggtttttatctgaacgagtaaatggaaggtgaggagcaaagtcttctgacacaccgtggacattttagaaaacagctttcttgagatataatccaggccaggcgcggtggctcacacctggatcccagcactttgggaggccgaggcggatcgatcatttgaggtcaggagttccagaccagcctgaccaatatgatgraaccccatctctactaaaaatacaaaaaaaaaaaattggccaggcttggtagtgcacaccttgtaatcccatctattcgggaggctgagacaggagaatcacttgaacccaagaggtggaggttacaatgagccaagatcatgccactgcactccagcctaggcaacaaggcaagactccatctcaaaaagagagagagagagatgtaatctacataaaattcacacgtttgaagtgcacaatccatggtttttaatgtgttcacaaatagtgtgattatcaccacagctggttttagaacattttcatcaccctaaaagaaagcttttacccttcagtcaatcctcatttctccccaacccccagcccctggcaaacaccattctactttctgtctttatggatttgtctattctggacgtttgatataaatggattcatacaaaaaaaaaaaaaaagggcggccgctctagaggatccaagcttacgtacgggtgcatgaaccgaacnnntanccggac

SEQ ID NO: 2007 - DNA, 1869 bp, Homo sapiens
gcccacgcgtccggcctcagcctcccgagtagctgggactacaggcgtgagcaccatgcccggcctcaacgatattgattctttgggctgtagtcagtattggattatgatcaatattatcaccatttattttgttgctccagttcttccagctgtggccaatccttcagttggattcttgtgccccatcaacattctccatcctggctttttgttttgagcacttccttccttcctagcaccaccaggctcttgtattatccctgtccctgccctggaatcgactcctcctccagagagccctggtttcttttgttagaggatggtatatagaatccaacatgcagacacttggtgggacttattgttactggggttttgttatactagggtttcagtggtcagtgctagtatttatgtatgttaacccacgctgtgctttggattcaggctatttcaaattttagataatatggtacatatattattaataccactagttactacattggtacttttcaagcaaaatatatctaagtgggatcaaatgagactgtaaatagctttacatcagttcaggtcagttatgttgctaaattacttttggcattaagtttagggaaaaaaaattgggtttgggattttttggtttcaacatttgtgattgagagactatggacctgtaataagtccaagaacagcagttgcagtgtaacaggactgttaatggaatcgggtcatttagaaacagtcaagacttcgctgttgtgcatgtggttaggagccagtgcacacgtcagttcttaggaaatgtacagtctgagcaatagcatttgaaatccaagactcttcccattgtgttgctgttgagtgtagaaaataaaatgtgtgaatttctttatcttgagtattgagattctccccttagaataaaacaagaatttttctctcagtgtaaaaatgtcaagttttattcttgaaatgaatagcaaagttaagcttaaaaacgtgaacagcttcagaactataaatgggtatgtatacctttctgctgtctaagggcagagaagggaaagaaagtgtggtgcttatcagaggagacagcagcaagacacattgtgacagaaaaccaagggtatcctgtgtcacagtgaaatgtaatgagggcacctctcctttcaagagacgaagattgaatacatgggaagcacactctccgctgtgtgttgtctaggagaggtgcaccctgtatggaaatatttgggaaggttaagattaagacagggtaaaataaagcaaaggcaaatcacaaagcaagggctaatgttaatatgaaaagtgcagaattcaaggaaaaagcatggggacaaagaagatttttcctctttttggttgctgttcatgtgtagcctacaacagaactataagacctatagacatttatatgaatatttatttgaaaacgtataatatcaaacaatgtaaaagccaatagaaatctcagataattgaatgtatagaaactagcagtttgaaagtgattagttcattatttgctgatcaagcagaaaaataagcatatgaaagatatttaaaatgggattaataaagttgatttaacagatcctattccatgtcctttgaatatttatagaaattaaatggaacaaattagggcatcaggaaaactatacaaaagtctttaccaaaaaagggaaatatatatatatatgtgtagtactacctatatatatacataatatatagtactgcttatatatatatatgcctatatgtacacatatatatatacatgtataggcagtactatgttttctgatcataatatgttaaattagtaaaaaaaaa

SEQ ID NO: 2008 - DNA, 1867 bp, Homo sapiens
gcccacgcgtccggcctcagcctcccgagtagctgggactacaggcgtgagcaccatgcccggcctcaacgatattgattctttgggctgtagtcagtattggattatgatcaatattatcaccatttattttgttgctccagttcttccagctgtggccaatccttcagttggattcttgtgccccatcaacattctccatcctggctttttgttttgagcacttccttccttcctagcaccaccaggctcttgtattatccctgtccctgccctggaatcgactcctcctccagagagccctggtttcttttgttagaggatggtatatagaatccaacatgcagacacttggtggacttattgttactggggttttgttatactagggtttcagtggtcagtgctagtatttatgtatgttaacccacgctgtgctttggattcaggctatttcaaattttagataatatggtacatatattattaataccactagttactacattggtacttttcagcaaaatatatctaagtgggatcaaatgagactgtaaatagctttacatcagttcaggtcagttatgttgctaaattacttttggcattaagtttagggaaaaaaaattgggtttgggattttttggtttcaacatttgtgattgagagactatggacctgtaataagtccaagaacagcagttgcagtgtaacaggactgttaatggaatcgggtcatttagaaacagtcaagacttcgctgttgtgcatgtggttaggagccagtgcacacgtcagttcttaggaaatgtacagtctgagcaatagcatttgaaatccaagactcttcccattgtgttgctgttgagtgtagaaaataaaatgtgtgaatttctttatcttgagtattgagattctccccttagaataaaacaagaatttttctctcagtgtaaaaatgtcaagttttattcttgaaatgaatagcaaagttaagcttaaaaacgtgaacagcttcagaactataaatgggtatgtatacctttctgctgtctaagggcagagaagggaaagaaagtgtggtgcttatcagaggagacagcagcaagacacattgtgacagaaaaccaagggtatcctgtgtcacagtgaaatgtaatgagggcacctctcctttcaagagacgaagattgaatacatgggaagcacactctccgctgtgtgttgtctaggagaggtgcaccctgtatggaaatatttgggaaggttaagattaagacagggtaaaataaagcaaaggcaaatcacaaagcaagggctaatgttaatatgaaaagtgcagaattcaaggaaaaagcatggggacaaagaagatttttcctctttttggttgctgttcatgtgtagcctacaacagaactataagacctatagacatttatatgaatatttatttgaaaacgtataatatcaaacaatgtaaaagccaatagaaatctcagataattgaatgtatagaaactagcagtttgaaagtgattagttcattatttgctgatcaagcagaaaaataagcatatgaaagatatttaaaatgggattaataaagttgatttaacagatcctattccatgtcctttgaatatttatagaaattaaatggaacaaattagggcatcaggaaaactatacaaaagtctttaccaaaaaarggaaawatatatatatatgtgtagtactacctatatatatacataatatatagtactgcttatatatatatatgcctatatgtacacatatatatatacatgtataggcagtactatgttttctgatcataatatgttaaattagtaaaaaaaaa

SEQ ID NO: 2009 - DNA, 1156 bp, Homo sapiens
  misc_feature (11)..(11): n equals a,t,g, or c
  misc_feature (942)..(942): n equals a,t,g, or c
ctggaaaacgnctcactataggttaaagctggtacgcctgcaggtaccggtccggaattcccgggtcgacccacgcgtccggagaaacttcagcctttctaagttgatagcatgtttattaacttttagataaagatccttatagactgaaagaatgtagcctctgcattaatggtaaatggtctagaagttttcgtttccactgaggcttccgccactcgcttttttaaacttcctgctatggtttggatatggtttgtcctcaccaaaactcatgctgaggcctgagtccccagtttgattgtgttggtaggtggtgcctttaagaggtgattaggtcattgagatggattaaaggctttctcatgaggctcagttagttctggaatggattcgctcttgcaggaatggatgaattctcacaagagtgggttgttatgaagtgaggatgcttcttgtgttctgttctctttgccctcctcagttcaccatctgctttccaccatgagttgaagcagcatgaggccctcatcagatgggctccctgatcttggactcctcagcctttggactcataagccaaaataaatctgttttctttataaattgcccagtctcaggtattctgttatagcaaaaaaaaaaagtggattgagatacttttttgctctgctacttacctctttwccagaatcttttaaggacttgatgtaggaactgagctatttagtragtcrttggtwgaagttwmcgcactgtactttgaaaattaagtgaaagcagaaaagtgagtgcgtatgtaaggaaaataatagtaaaagaacgctttgacttcttagcactcgccctctcctgtatatccccaggcaccttcagttgtctggaacaaagaatgtaggaaaaactgaagaaattcagaacagttaccaatgacaaaaatcnctgatcagaataaaaagacaaggttacagaatatacgttgytactgatcatttttcagaagcagaaggaaaagaatgccctccctggccattgagggtgataaaaagwaagccccactcctatcacaggcaatgaaggacagggatggaaaaaaaaagtgaagaagaaggggaaaaagcaaaagttatgaaaaaaaaaaaaaaagggcggccgc

SEQ ID NO: 2010 - DNA, 1472 bp, Homo sapiens
ggagggcaaccctgggccacctgcggacccggatggcggccccaggccacaagccgaccggaagttccaggagagggaggtgccatgccacaggccctcacctggggctctgtggctccaggtggctgtgacaggggtgctggtagtcacactcctggtggtgctgtaccggcggcgtctgcactagtgaagccctgggctcttcccaccacccatctgttccgttcctgcagtayacctggcccctctccgaagccccttgtccctttcttggggattgtggargctgggtcagargggarttaagggactgcaggcctggcagcargacatgccttggctgaaccaagtcctgagagcagcatctctgtccccacggtgccttgtgtgggtccccgtccttggctttctgggtcctgggctgcccccagtgctccagaccttccccactggcaatccaggttatcatccatgtcctccagaggagcttcctcctccaggcctcagccctgttggcccaggtggagcaggagggaccactggaacatgtggtgcttgggaatgcctctcctgttgcattggtccctgaaggcctcagggcaggtatgtggtgtgtgggcgactccacaagacctgcctcccatcctggcagcccagcctgagaccgttgcattgaggcaggcaggagcggcagggtggctgctctccaggagcccaactgccttgagttcctgccccactgggccccctcccctgctgggcaatcctgggaaggtctggaggttcctgtggacctcagggaagccaggggcagctgtcaggcctgaggaagacctgtggagctcctctccagcctcctctttccctcccctctggtctccattctcttcagctccctacatgggctggggaggagacacctggtgggcagagctcaggcagaggtttggatttcagctccctcacttccggggctgtgtggctttggcagatgtcagacttctggtcttgcttctccacgtggacagtgagtatctggctcattcttcactgggttcttctgagattgaacctacaggtgtttgccaagtgcctggcccagagcaagtggccactgcttctcccatctctctcctgcccaacctggtagagctgagggcatgagaggcagagtgcacagtggtcaagggtgcagctctgcagcacaggcagcctaggcctgcgtcccaacctgcctctcaccagctctgtgaccttgggcaagggatttatctgtctgtcccttagttttctcacctgtaaaaggaggataagtatatatatatatttcccagtgttgtgaagattaaaggagtttatcgatgtaggtcttaggatgagtcctggcatttaccaagggttggatatatgttattatcactattaagtgttgagggtccaggcatgctgggcaacagggaccccatctctac

SEQ ID NO: 2011 - DNA, 1991 bp, Homo sapiens
  misc_feature (231)..(231): n equals a,t,g, or c
ctctgttctctggaatgccatgatccatccactgtgcaatatgactctgaaaggggtagtatggtaccagggggagtccaatataaattataacacggatctgtacaattgcacattccctgcactcatcgaagactggcgtgaaaccttccaccgtggttcccaggggcagacggagcgtttcttcccatttggacttgtccagttatcttcagatttgtctaagaaganctcagacgatggatttccccagatccgttggcatcaaacagcagacttcggctatgtccccaacccaaagatgcccaatactttcatggctgtagctatggatctctgtgatagagactcgccttttggcagcatccaccctcgagataaacagaactgtggcttatcggctgcatttgggggcccgtgctctggcttatggtgagaakaatttgacctttgaaggaccactgcctgagaagatagaactcttggctcacaaggggctgctcaatctcacatattaccagcaaatccaggtgcagaaaaaggacaacaagatatttgagatctcctgttgcagtgaccatcgatgcaagtggcttccagcttctatgaacaccgtctccacccagtccctgaccctggcgatcgattcttgtcatggcactgtggttgctctccgctatgcttggaccacrtggccttgtgaatataagcagtgtcccctataccaccccagtagtgccctgccagcccctcccttcattgctttcattacagaccagggtcctggacatcagagcaatgttgctaaatgactgtttcagtatgatcagaacttagatataaggatgggtccttcagattttagcatttaggagtttcaataataaccattgcttttaaaggaaattaatagaaagcctcattgaatggctttcagctagcacatggctgtttctatattctgatgagcccaggctyataggtaacttgaaatgcttgctttttgttccctagttggtctaagggtctgtattggactaattctgaactacagacaaattggacctcaatgtcatttatttccctcatattaatgggagtgaaatgtctaatacttttgcccctttttatccagagttgtgggatctcaggattggaagagattttaaaggccacataggccagctagtgttcatgtgttctttataaaatttctcccatccaagtactaaccaggcccgaccctgcttagcttccgagatcagatgagatcaggcgcgttcagggtgatatggccgtagacgtctttacaaaattcctgacaggtggttactgaatctctctatgaactttccattcaaaactttccaagtttttccttatgtggaaccgaaatctttctttctcccgtgaaactttactactatcagataattgaagacagatctctttgtattctcttcaagcccaaaccaattctgttccttcaatctaaatagtggtaatatgaatgtttaagaaatgaaataagaaacatgtgcaggcactttggaaggtgctaagtgactgccctaaggaatgaaaagcaagggccaggtgggagtagcccagcgaaggcacttgggctgccaggaacaggaggcgtgggaaactctggcttaggaaaacatgaacacaggggcaacagaggcaaactgttgttcgagttaaatataaatctcaggctctttaaaggtaaaaggtttaaggataatccatttggaagaagaaaagagtgaggctgaaagtaaagccacatgacaagcatataaaaaaaaatgcagatgatacaaatatgaaagaggccttcagtgtttgtttattaagaatcttaatgcagtttactgatggattaaaaacagctaacattgtctgaaaattatgttacctataagaagttggaaataaataaaagcataatcactaaaaaaaaaaaaaaaaaaaactcgtag

SEQ ID NO: 2012 - DNA, 1994 bp, Homo sapiens
  misc_feature (231)..(231): n equals a,t,g, or c
ctctgttctctggaatgccatgatccatccactgtgcaatatgactctgaaaggggtagtatggtaccagggggagtccaatataaattataacacggatctgtacaattgcacattccctgcactcatcgaagactggcgtgaaaccttccaccgtggttcccaggggcagacggagcgtttcttcccatttggacttgtccagttatcttcagatttgtctaagaaganctcagacgatggatttccccagatccgttggcatcaaacagcagacttcggctatgtccccaacccaaagatgcccaatactttcatggctgtagctatggatctctgtgatagagactcgccttttggcagcatccaccctcgagataaacagaactgtggcttatcggctgcatttgggggcccgtgctctggcttatggtgagaakaatttgacctttgaaggaccactgcctgagaagatagaactcttggctcacaaggggctgctcaatctcacatattaccagcaaatccaggtgcagaaaaaggacaacaagatatttgagatctcctgttgcagtgaccatcgatgcaagtggcttccagcttctatgaacaccgtctccacccagtccctgaccctggcgatcgattcttgtcatggcactgtggttgctctccgctatgcttggaccacrtggccttgtgaatataagcagtgtcccctataccaccccagtagtgccctgccagcccctcccttcattgctttcattacagaccagggtcctggacatcagagcaatgttgctaaatgactgtttcagtatgatcagaacttagatataaggatgggtccttcagattttagcatttaggagtttcaataataaccattgcttttaaaggaaattaatagaaagcctcattgaatggctttcagctagcacatggctgtttctatattctgatgagcccaggctyataggtaacttgaaatgcttgctttttgttccctagttggtctaagggtctgtattggactaattctgaactacagacaaattggacctcaatgtcatttatttccctcatattaatgggagtgaaatgtctaatacttttgcccctttttatccagagttgtgggatctcaggattggaagagattttaaaggccacataggccagctagtgttcatgtgttctttataaaatttctcccatccaagtactaaccaggcccgaccctgcttagcttccgagatcagatgagatcaggcgcgttcagggtgatatggccgtagacgtctttacaaaattcctgacaggtggttactgaatctctctatgaactttccattcaaaactttccaagtttttccttatgtggaaccgaaatctttctttctcccgtgaaactttactactatcagataattgaagacagatctctttgtattctcttcaagcccaaaccaattctgttccttcaatctaaatagtggtaatatgaatgtttaagaaatgaaataagaaacatgtgcaggcactttggaaggtgctaagtgactgccctaaggaatgaaaagcaagggccaggtgggagtagcccagcgaaggcacttgggctgccaggaacaggaggcgtgggaaactctggcttaggaaaacatgaacacaggggcaacagaggcaaactgttgttcgagttaaatataaatctcaggctctttaaaggtaaaaggtttaaggataatccatttggaagaagaaaagagtgaggctgaaagtaaagccacatgacaagcatataaaaaaaaatgcagatgatacaaatatgaaagaggccttcagtgtttgtttattaagaatcttaatgcagtttactgatggattaaaaacagctaacattgtctgaaaattatgttacctataagaagttggaaataaataaaagcataatcactaaaaaaaaaaaaaaaaaaaaaaaaaaaaaa

SEQ ID NO: 2013 - DNA, 712 bp, Homo sapiens
cccccgggctgcaggaattcggcacgagttcgcctcaccctccccagtgcactgaagaaggtaaccgggtccagacccacgcggcgccagttctccggcgggaaggaaaaccgcgcagagaggcagcaatgaatgtggatcacgaggttaacctcttagtggaggaaattcatcgtttgggttcaaaaaatgctgatggaaagttaagcgtgaaatttggggtcctcttccgtgatgataaatgtgccaacctctttgaagcattggtaggaactcttaaagctgcaaaacgaaggaagattgtaacatatccaggagagctgcttctgcaaggtgttcatgatgatgttgacattatattactgcaagattaatgtggtttacatatctttatgtactgccattttttgtttctggtaaactggaatataaagtgaaagaacaaacatttgaacatacttaatgtatttttatagaactttgtaaacgaaaggagattcatgttttagaagtctgtccttttttatatcttgaaagaaaatctatgtatgatgctataaaataattagacattttctatagatatttgacattctgcgaaagcaacaagcaaactgaagaccaactcctatgagaaatattatgatgtttatgtaataaagacatgtaactgtcttaaatttaaaaaaaaaaaaaaaaaaaaaaaactcga

SEQ ID NO: 2014 - DNA, 486 bp, Homo sapiens
gaattcggcacgagctccagagtgttcccatgatcaccacgtcctttgatcagtgccatctggaagagcagatgagtgcagccctcctctcatcctctctgtgctggctccgaacgcttgcttacagacccaccaacaaccaagaagctgcactggttggtacacactgcagcaaacaaggaaaacaagtatgataaaaagtccaacatcaaaaagaaaaaaaaaaccatagaaacaattgaagagagaatggctaaaggacatgaaaagacagttcatacaaagggaaattcaatgctgttctcgctgaggctggagtccaatgatgcgatctcagctcactgcaacttccgtctcctgggttcaggagaatggcgtgaacccgggaggcggagcttgcagtgagctgagattgcgccactgcactccagcctgggcgacagagcgagactccatctcaaaaaaaaaaaaaaaaaaaaactcgag

SEQ ID NO: 2015 - DNA, 654 bp, Homo sapiens
aaaagccgcccttagccccctcctcccctttcctgcttctgcgagaactccctccctccctccagctccgccagcccaggcgccccttccctggaagccgagcggcttcgctcgcatttcaccgccgccgcctctcgcaatattgcaatataggggaaatgactaatgaagctaattaaaagaagcattcaaatctgctttctaccctcattaacaattagcagggcactggccagagtttgtaccctgtgttttaccttaacaacattctatttgctctttgtatatttaagtgttgtaaggaaacgtgtttcaatcaaaactgaccatgagataaaggaaagagatgtggcttttgtgatattctatcacaaacacttattgtatctctgtaaaatacaatgtatgtatgcatgtaagtgtttttgtcctaatgttgctactcccatggcaaagaaaaaaaaaagaatgaaaaaaagaaaaaaatttggaaaaaaaaatcaggctcatagcagctactgtgtagaaaattccccctacttctaatttgctgaatgaagaaaaaaaaaaatcttttatttgtgatattttcagagacatttgctctagtatggtgtatttaaataataaaaacttaaaagaaaaaaaaaaaaa

SEQ ID NO: 2016 - DNA, 974 bp, Homo sapiens
ggcacgagccagggcgcacccgtcggcggtaaaagctgaggggctggcgcgggggattggtgggcgacacttttacgtctacacgtgcctacccgtctgcacgtttctgagtccgcacggttgtcttctcttgctgaatggacataggtgttttgttttgtcccaagagatacaggcaagcagtacaggggtgatggagtgctccttgaccttagcggggctgaccctggcactccctgtaggtctccccgctgcgaagactgagtctcttcactgcagtttctctccagttacccgccctgtctacggcccaaacggccatgctagtgaaaacctgccctggccgctaagcaagcctagcccaggctgtaacccatgtttctagggcttgttttcctctgcagtcaaatcagagattcggagttgaagggatcttagaggtcaacatgcccaacctcttagcccgagtgagtgaatgtacgctttttacctgcacaccccgaaaatcgcccgttttctggaaacaacgttgattatgtagtcctggaactttcctgcatgcacattttattccttcgacaatatttattgctacctactgtgtgcaggcattgtaggccccggggatacgattaaaaccaatgaagaacgaaacgcacaagattgttgatctcggccgggcgcggtggctcacgcctgtagtcccagcactttgggaggcggaggtgggtggattgcttgaggtcaggagttcgagaccagcctggccaacctagcgaaaccccacctctactaaaaatacaaaaattggccgggcttggtggcgtgcgcctgtagtcccagctactcgggaagctgaggcaggaaaatcacttgaacctgggaagtggaggttgtagtgagccaagattccgcctgcattctagcctgggcaacaaaatgagactctgtctcagaaaaaaaaaaaaaaaaaa

SEQ ID NO: 2017 - DNA, 472 bp, Homo sapiens
ggcacgaggcgagtgtcagtcggctctccgcacgtgtccgcggcctcgcggagcagtccacccctggctggtttctgcttccacctgctgatctcacagagcactgcaagctatttggcatatgaaggtcttgacctgagaaaaccatcttggataactgcagcaaggaaaaggaaaaatgcaacacctaggagatttcagtaaacagtagaatcatgccaacctaatctgtgttaaaatgcttggaatgtgggagccgctgatgatgcctcttgtctgtgtgtctgactgaatcctttcttttctcagagcagcaaagcaaagcctgggaaccaggccaaatgcctgccacttaccttaaattgatcagccactttgagattaaaacccctgaaagctgccacaccgtgaaaacaaggcctccttcacattaaaggcaaattgcgactttgaaaaaaaaaaaaaaaaaaaa

SEQ ID NO: 2018 - DNA, 924 bp, Homo sapiens
ggatttctatgcattgtgtaatattcagtgatgttgagattttgcatgttgttacaggtgctctttcatatgtgtgtttgtggtgttgatgtggaattgttaaccactgctgctatcacttattgtagttaaactgaaaaactgtgttaaaaggctgtgccagtcaacatttctatgtgtgacttaagtaactgtgtacttcattgtttaatattttgagccagcacttagtggcctctacagaaggaaatattgtagttgtcaaagtggtgccaaacttgaaaatcttgtgtcatgtttataattccaggccaggtcagcttttcttcaacactttccgagctctttgaaagcaaaaaacatttgcaaaaagagaaagaaagcaagaattctgaacttttctaatactctctcctctagaattttaaatatttttttcttttgatgtttgagtatcttacagaaaaatccaatcaaatgactagcggtagaatttcccttgatctggatatttttaggctgaacagtgtaatagcagaggactatgaggtgcatacattatttttgttggctatcatggcttattgtttgaatttcatttaataacaatattcaggctggaggtggtgactcacacctgcattcccagcactttgggagactgaggcgggcggatcacctgagatcaggagttcgaggccagcctggccaacatgacgaagcccagtctctactaaaaatactaaattagctgggtgtggtggctcacacctgtaatcccagctacttgggaggctgaggcaggagcattgcttgagcctgggaggtggaggttgtagtgatctgagatcacactactgcactccagcctgggtgagggagcaaggctccaacccccctaaaaaaaaaaaaaaaaaactcgag

SEQ ID NO: 2019 - DNA, 807 bp, Homo sapiens
tttttttttttttttttttttttttttttcacaaagattgacaaaactttaataaaagttaaatttacagacatcttaagataacttgggaaatatgtagtaaaaaagaatcgagtccacaaattaagaatattttgctaatatgcccaacaccaatttcagcaaatccaatctacttaactcatatatttaatgtggtaatttttctaacaaaatttaatgggggtatgaatgatatatttatgcccttgacaaagatgacatgtgtgattttgttgtgactaagaaaggagagtatgatttctggtggttatgatatcactctggctcatcgaagctcacagaatatgtaaggttctgccacgtccaaagatgttaggcaaatgtaatagaaggcgcaccgggctgacacacgttttcatcatacaaatcttctggcagttcctcttcatctccatcaggaaaatatgtagggaatggtagatttttaccgagatccttatatgcaggcagtttagaatctttgacctttactaagcaatttttatgtccaggtacagagccatttacatagattatgttgtgctttgtgtttattctccacactttcccatttttccaggcattttagttccaggccagactctgccaatatcaccagttgcaacagctccaggtctcctgtgggttttcgtttgaccatgcgtagcaggctggcctttaaatccccatcttttcatgacaccttgaaaacctttaccaatagttttggctgtgacatccacatactgtcctgtatctcgtgcc

SEQ ID NO: 2020 - DNA, 893 bp, Homo sapiens
  misc_feature (10)..(10): n equals a,t,g, or c
  misc_feature (18)..(18): n equals a,t,g, or c
  misc_feature (28)..(28): n equals a,t,g, or c
ggcacgaggnaaaagaancccgcttcanggttgccagagtgtgataggtaccccagagttcatggcccctgagatgtatgaggagaaatatgatgaatccgttgacgtttatgcttttgggatgtgcatgcttgagatggctacatctgaatatccttactcggagtgccaaaatgctgcgcagatctaccgtcgcgtgaccagtggggtgaagccagccagttttgacaaagtagcaattcctgaagtgaaggaaattattgaaggatgcatacgacaaaacaaagatgaaagatattccatcaaagaccttttgaaccatgccttcttccaagaggaaacaggagtacgggtagaattagcagaagaagatgatggagaaaaaatagccataaaattatggctacgtattgaagatattaagaaattaaagggaaaatacaaagataatgaagctattgagttttcttttgatttagagagagatgtcccagaagatgttgcacaagaaatggtagagtctgggtatgtctgtgaaggtgatcacaagaccatggctaaagctatcaaagacagagtatcattaattaagaggaaacgagagcagcggcagttggtacgggaggagcaagaaaaaaaaaagcaggaagagagcagtctcaaacagcaggtagaacaatccagtgcttcccagacaggaatcaagcagctcccttctgctagcaccggcatacctactgcttctaccacttcagcttcagtttctacacaagtagaacctgaagaacctgaggcagatcaacatcaacaactacagtaccagcaacccagtatatctgtgttatctgatgggacggttgacagtggtcagggatcctctgtcttcacagaat

SEQ ID NO: 2021 - DNA, 2037 bp, Homo sapiens
  misc_feature (22)..(22): n equals a,t,g, or c
  misc_feature (28)..(28): n equals a,t,g, or c
  misc_feature (68)..(68): n equals a,t,g, or c
  misc_feature (1974)..(1974): n equals a,t,g, or c
gttcccgggtcaagaatggccnaacctntttacccagaggagatytacggtaactgragtctgccctngaacacctytcatatttggcacccacggatacggraggtgggtttgcatgtccagggtgcaatcatggtgtccagcgtggtgraggtggtgattggcctgctggggctgcctggggccctgctcaactacattgggcctctcacagtcacccccactgtctccctcattggcctttctgtcttccaagctgctggcgaccgagctggctcccactggggcatctcagcttggtgagcaggcaccaggcctgatccctgcccagccccagcaccctaccctcttcatgtccttggtccttcttcccggctcctggccccagcctggcctcccatccacttcctgattgtgcctctgcccccagctccattctcctgatcatcctcttctcccagtacctgcgcaacctcaccttcctgctgcctgtctaccgctggggcaagggcctcactctcctccgcatccagatcttcaaaatgtttcctatcatgctggccatcatgaccgtgtggctgctctgctatgtcctgaccttgacagacgtgctgcccacagacccaaaagcctatggcttccaggcacgaaccgatgcccgtggtgacatcatggctattgcaccctggatccgcatcccctacccctgtcagtggggcctgcccacggtgactgcgctgctgtcctgggaatgttcagcgccactctgcaggcatcattgagtccatcggagattactacgcctgtgcccgcctggctggtgcaccacccccactttggtttagccccaccctgtctttgagaggcctcgcccccgcatcaagccccagccggtttatgcctcgctcttataacaggccccgcccctggaactaaccccgccccagcctcgtccccaggtctagcttccccgctggctccccggcaggtgggcagccggcgcgtggtgcagtatggtgcggctatcatgctggtcctgggcaccatcggcaagttcacggccctcttcgcctcgctccctgaccccatcctggggggcatgttctgcactctctttggcatgattacagctgtggggctgtccaacctgcaatttgtggacatgaactcctctcgcaacctcttcgtgctgggattttccatgttcttcgggctcacgctgcccaattacctggagtccaaccctggcgccatcaatacagggagcccagaggagcgtggtctgatacagtggaaagctggggctcatgccaacagtgacatgtcttccagcctcaagagctacgatttccccattgggatgggcatagtaaaaagaattacctttctgaaatacattcctatctgcccagtcttcaaaggattttcttcaagttcaaaagatcagattgcaattccagaagacactycagaaaatacagaaactgcatctgtgtgcaccaaggtctgaaaaatgacttycaggaaaggaagcatggtatataacaggaaaagaaaactacatggggaaccagaagacctaagcctgaaatcccagccctgcccctaactaacttctgtgtaaactcagataagtcacctttctctgggattcaaatttttgcatcagttaaaaaaaaaggggtgggggggaatgggccaaagtctgagtcttagagacttgtaccaatgttatgctatgtctctaaatctttactctcctaagtagacttgtcagcatctaggaagaacagctagaaattttcctctgtgatattttagactgcaagttgaaaaaaaawaamaaraaatgagggcaggttccagggcctgaaatgtaggtatgctgcaaggcttttacattgaatttgaccctacatcacttcaagactaatgcataatattaaacatcatgttgaagaaataattttagtntcgtaatttatacatagcagtttctttggacaggatatattctcccttcccccaagggaaata

SEQ ID NO: 2022 - DNA, 1417 bp, Homo sapiens
  misc_feature (510)..(510): n equals a,t,g, or c
  misc_feature (696)..(696): n equals a,t,g, or c
  misc_feature (1363)..(1363): n equals a,t,g, or c
  misc_feature (1389)..(1389): n equals a,t,g, or c
  misc_feature (1394)..(1394): n equals a,t,g, or c
  misc_feature (1417)..(1417): n equals a,t,g, or c
gggcacgagcggctgtggtggttcccgcagagtggataaagaactgggagaaatcagggagaggcgaatttttgcatttatgtcggatcctcagtgaaaataaaagccatgatagttcaacatacagagatttccagcaagctctctatgagttgtcatatcatgtaattaaaggaaatctaaagcatgaacaggcatctaatgttcttagtgacattagtgaatttcgtgaggatatgccctccattcttgctgatgtattctgcatattagacattgagacaaattgtttagaagaaaaaagcaagagagactattttacacagttggtattagcatgtttgtatttagtttcagacacagttctaaaggaacgcctggatccagaaacactggaatcattagggcttatcaaacaatcacagcaattcaatcaaaagtcagttaaaatcaagacaaaactcttttataagcagcaaaaattcaatttgttaagagaagagaatgaangttatgccaagctgattgctgaattggggcaagatttatctggaagtattactagtgatttaatcttagaaaatatcaaatctttaataggatgctttaatctgggatcccaataggagttttgggatgtcattttagaagtgtttgaatgcagaccagtaatgtactttctgtctctgtgatttngcctgttttggacatttcatttaaatggaattatgcaataatttgtggccttttgtgtttggctttcacttagcatcatgttctcaaggctcatccatgttgtggcatgtatcagtactgcattcctttttatggctaaatgatgtttcattgtatgagtgtgtaccacattttatttatccattcagcaattaatggacaggaacaatggcttttaagtattaaattgtaagttcaacattaaatgtatycacagttattgataatatcaagattatacatggtgtgaacagaatgctgtgtcgaaatggtatgtaaattatttgtcagcatttcatgtaagtgattattttctaaggacccttctagccctggttttaagaaatatgtgaatgtagtattttcatcaataaagtttaatgcattaagcattagcttaaaatttgaatgaaggcagatgtgaagatatttgccacatgttgtaataatcatgttttgaaattatttcaatatgaagtatttgaaaaatgtcaatacataaaggaaaggaaatgagtataattaagtcaatatatttttaaagcaatttttataatttagcagacactgcatcttaatataagttactattaaaattgtgtccttgtgaaaaaaaaaaaaaaaaaantcgagggggggcccggtacccaattngccgnatagggagtcgtattactttcan

SEQ ID NO: 2023 - DNA, 1837 bp, Homo sapiens
  misc_feature (1697)..(1697): n equals a,t,g, or c
aattgccatatacttctcacccagtttctcctaatgttaatattttatataaccatggcacatttatcaaaactagaagtgaatattagtaatgttactattaactatgggctttattcagattttaccagtttttctgctagtgtactttttctattccagggtccaatctaaaatcccacattgcatttagtttgtgtgtattttctttctttattattattttttttttggtaattaagttttttaaaaaggtcatagactatagggatttcatttacaagaataatatcttcagcatatggccctttcctgatatgtctgactaatgggtttctaaaatgtatttgcagagattgccttgcaacaggtttccatgttcttccgatcagaaccaaagtgggaggtggtggaacctttgaaagacataggtgagacattggcacgctcattctgttaaaaagacagatcacagaactggatccttagtcatgctttctgatacgtatcccaggaacatgcttaaatgcaggtgacttctttttctttttgcatatcaactgcttgaggatacagctggtaacttttaatacttaatgaaccttggttaaagccccatcaaagcatttggatggtaataactttcagaaacaccattccttcttcatctatctttttcactaaatctaaactgaagtgctactttcctgccttttccgtgaataatttcttcatttactgtttctttttaagtatagcctttactatgccaacgttatcaaatggttcttttacttgtgcctatgtagctgcgaataatattgccaaacttaatttttcttgattacctagtcagtgaaacatatcagttgttgcaaaaattgtgcagctctaagcacatttttgcttttatggcaggttggagaataaggaagaaatatttcttgatgaagattaaaaatcagccaaaggaacggctagtgttaagctgggctgaccttggcccagacaagtattgtcagataaagattttcagtgtctaatcaaacttctgccttcttgtttgcacccttacatctatcgggttacctttgccacagctaatgaatcctcagcgttgctaattaggatgtttaacgaaaagggaacattgaaggatctgatctacaaggcaaaaccaaaagacccatttctaaagaagtactgcaaccctaagaagattcagggcctggaactccagcaaataaaaacatatggacggcaaatattagaggtactgaagtttcttcatgacaagggattcccttatgggcatcttcacgcctccaatgtgatgctcgatggggacacttgccggctgctggaccttgagaattccttattgggcctgccttccttctaccgatcttatttttcacaattcaggaaaatcaatacattggaaagtgtggatgtccactgctttggccacttactgtatgaaatgacttatggacgaccgccagactcggtgcctgtggactccttccctcctgccccgtccatggctgtggtggccgtgttggagtctacgctgtcttgtgaagcctgtaaaaatggcatgcctaccatctcccggctcttacagatgccattattcagcgatgttttactaaccacttctgaaaaaccacagtttaagatccctacaaagttanaagaggcattgagaattgccaaagaatgtatagagaagagactaattgaggaacagaaacagattcaccagcatcgaagactgacaagagctcagtcccaccatggatctgaggaggaaagaaaaaaaaaaaaaaaaaaa

SEQ ID NO: 2024 - DNA, 493 bp, Homo sapiens
ggcacgagctgaccccttttcctcatctgtctaatcccccaacttagggaaataaatggttcctggcctcttgatctcagttcagactgcaaactcttaggggcaggggtagctacatatcaggctatgggtttggtgctagaatggtgttgatactgtggtgttctctgaggatggggatcccagccaatgccatctggcatagtgctgtacacaggtgagtttgtttaggaagatttggggaagatgcctggagtctttggaatggcaactcctgctgatggagtaatctatctgtctctctttccaggtggatgggaagagagtcccaagggatgcagggcatcctctgtacccctttaatgacccgtactgagaccacagcttcttggcctcccttccagctctgcagctaatgaggtcctgccacaacggaaagagggagttaataaagccattggagcatccaaaaaaaaaaaaaaaaaaaaaaaaa

SEQ ID NO: 2025 - DNA, 460 bp, Homo sapiens
ggcacgagccagccttcagtccctggggcccggagggctggccaggggcttgcggggcactgggagccactcacttgaggtggtccagcatcatgcagctggccagcagggtggccgtggggttggcgatgttcttattggcgatactcttgccggtgttcctcgtagcctggggaggcaagacgaaggagagtgggtggagggcagaaggatgccgggcagtgactctgctcctgtgacacgtccagaagaagccactccacagggacaaaagcccaccagcgggtgccaggggttgggggaaggtgtggggacagatagcttatggggacaggctttcctcgtggggtggtgaaaatgttctggaatgacctggtggtgacggcagtacaaccctggatatccaaaaaactactaaatcatgcattttgaacgggctaaaaaaaaaaaaaaaaaaaaa

SEQ ID NO: 2026 - DNA, 1369 bp, Homo sapiens
ggcacgaggttttttgtaacaaagtagccatcattatagaatattaataaatggattattaatatgattgtttcaaaaggacttgatataaaaattaagggtaaataacttggaagaaaattttgttttaaattatagcagtagcttatatatccaaatatctattggttgagccatccaatagatgagtgacgcttagctgttttatgtaaatggctttcctaacaatgagaatactcttttttgcttattcatttagtaaaaaacattttttaatggaaatatctgagcatggtcattaacgtggccactgcaacacatattggtggaagtataaattaatccagtgtttctacaaggcaatgtgacagtatcatgctttaattcagtcatttcatttctaggaattatcctaaggaaatagttataaaagacacacaatgatttatgggcatggctttgcatttcagtgacatttgtaataataaaaagttagaaacaaacgaaataggttaaaaaattatggtatgcccaaatgaagacatattctcctatcagtggtaattaatactttttaaaaattgtccaaactttttgcaatgaaaattcctgcttttatacccaagaagtatgtattttttttttactcgggaggctgaggcaggagaatggcgtgaacctgggaggtggagcttgcagtgagccgagatcgtgccactgcactccagcctgggcgaaagagcaagactccatctcaaaaaagaaagaataaaaagaaatatgtatttttttcaaaagcactactgaaacttactaaatcaaccctcaacaagtcatcaactttgaatattttaatgaattgcccacaacaggcttgcaaatagtttctagccaggttaggctataataatgttaattaagacgatttgtttagcctggcttagtggcatgcacctgtagtcctagctactcaggaggctgaggcaagaaaaaaaaatttgctggctgcacttgtatttgattatgttctttcttgactaccgattctaacatcaaaacagatgcaaccagctgggcacagtggctcacacctgtaatcccagcactttgggaagctaaggcaggtggatcacctgaggtcaggagtttgaaaccagcctggctaacttggtgaaaccccatctctactaaaaatacaaaaattagtcaggcgtggtggcaggcgcctgtaatttcagctacttaggaggctgaggcaggagaatcacttgaacctgggagggaaggttgcagtaagccgagatcgcgtcactgccctccagcctaggcaacaagagcaacactccatctcaaaaaaaaaaaaaaaaaa

SEQ ID NO: 2027 - DNA, 1556 bp, Homo sapiens
ggcacgagtgaagctccgcggtgcctgatggggccgttgggcggccggtagctgttgctgttgggggaccccctcattcctgccgctgccgtccctgctgcctcatggcggccatcggagttcacctgggctgcacctcagcctgtgtggccgtctataaggatggccgggctggtgtggttgcaaatgatgccggtgaccgagttactccagctgttgttgcttactcagaaaatgaagagattgttggattggcagcaaaacaaagtagaataagaaatatttcaaatacagtaatgaaagtaaagcagatcctgggcagaagctccagtgatccacaagctcagaaatacatcgcggaaagtaaatgtttagtcattgaaaaaaatgggaaattacgatatgaaatagatactggagaagaaacaaaatttgttaacccagaagatgttgccagactgatatttagtaaaatgaaagaaacggcacattctgtattgggctcagatgcaaatgatgtagttattactgtcccgtttgattttggagaaaagcaaaaaaatgctcttggatccttcaaacatgatgtgagaggaaatgcgcgagccatgatgaaattaacgaacagtgctgaagtagcgaaacattctttgtcaaccttgggaagtgccaactgttttcttgactcattatatgaaggtcaagattttgattgcaatgtgtccagagcaagatttgaacttctttgttctccactttttaataagtgtatagaagcaatcagaggactcttagatcaaaatggatttacagcagatgatatcaacaaggttgtcctttgtggagggtcttctcgaatcccaaagctacagcaactgattaaagatcttttcccagctgttgagcttctcaattctatccctcctgatgaagtgatccctattggtgcagctatagaagcaggaattcttattgggaaagaaaacctgttggtggaagactctcttatgatagagtgttcagccagagatattttagttaagggtgtggacgaatcaggagcccagtagattcacagtgctgtttccatcagggactcctttgccagctcgaagacaacacacattgcaagcccctggaagcatatcttcagtgtgccttgaactctatgagtctgatgggaagaactctgccaaagaggaaaccaagtttgcacaggttgtactccaggatttagataaaaaagaaaatggattacgtgatatattagctgttcttactatgaaaagggatggatctttacatgtgacatgcacagatcaagaaactggaaaatgtgaagcaatctctattgagatagcatcttagtgttttagagaaatcaagaatttttaaaaacaagaatatcaacatttggttttgtgtataagtggtgtttgtattaaaatactttttcaatgaactgtataaactatgttttattaaactacaatatatcagtaaaaaaaaaaaaaaaaaaaaaaaaaaaaaaaaaaaaaaaaaaaaaaaaaaaaaaa

SEQ ID NO: 2028 - DNA, 1259 bp, Homo sapiens
aggattcggccgagctttcttgtaatttgtcatttgtatatctctcctgtgaattgcctatatatatttcatggccattttctcattaggatttctttttttcttaccagtttctagaaatgcattgtttattcctcttcccaacttggcatcaagtgtatcttatgtttttctttctcataaattagaatgtttcattttcagttatattaattttccttttttcttaagtacattaaaaaaggtacaacagtgaaattctcatttgtatttgtcactctgtttcttattggatgagtaatcaggatttttggggaaataactggatatttcatacagcaagcaaataattcaaagcatgggaagttaacatagaggtggtagtggggatgcataaaatcgtagtcagtaagttaacaatgagggaaataattaaatttcactcagygtttacaaacattggaaaacattctgacctgatgggtctgatttcttttgttggaattgttttgtctgtttaaggataatgtgaattactgtgtgtgtagtataattagaatataccacagtatcttaaaattgtttagcatatactttaatcagttggatctgcttcaccctcttctccccatgaagaaaattatatgttaagtgctcataccatatctacttatcttcagtaactatatttagccttagcattacaccagccttacagccttattcattcatttagtttctaaacattaaaatcttaaatactttttgtttaaattagttattattttgtttttatttttttttaatttcattttttctttttatcttcttggttaccaagttttagtgagttaagtggctgtcagagtattggaagggggtctgtttgaggatgaatggtaggaattttacatttgatgttgtcttattttaatgagtcaatacagaaagtacttcagagtatttatgaaaagtgtaaatctaatgttacatgagaatgtggctaggactttatggttttaaatttctccattctaaaattatgaagatcaatttatatgtaaatcttaccattaagaacatgcttattgataaatctaaatctctattttagagcaatatactttgctgcttattcaaactgcaaggaaaagttgaatgatgtatttgatcctgattctacccaagtacatatgatttcagctgcaatggcaggtatgaatgtataatattaaaaaaaaaaaaaaaaaaaactcgag

SEQ ID NO: 2029 - DNA, 1217 bp, Homo sapiens
ggcacgaggggacttggtgcattcctctctcccctcccagttcttattggtttctccagtgtctgtagaacagtggttttgatggctttacctctgcagataatttctcttgcaatgtagtggtgatggggaggtgtgtctggatgcatttcagctgtagttgctgttttgctttcccagacagcaccatcccaaggggtagaggctggagcattttgtgatgtatccccagtactgaagaaaaaggcttcaatagcaggaggaattcctcaactgcatacactctgagaatttaaacaataacttctctatcacactcaaattgaaaccacccaatgaatatgtctactttaatcgtgtgctaacttaaatgacatttggcagcctctgtcccagaaaagattatcatctgctcctgtttatttccctgcaagtctttatgtctgttcagatttcagatatattgtttgtcctataacatcaaaaatttgatgtatatatgctaatttgcagatcagtaagtttagtatttgttataagaatagtaacatatttttatggggtgcttacatctccaagctgagaagcacctctgtgtaatactaagcaactagaaatggtacaaataccaagaagatacatagataaacagtaatggcatgctaatttatggtaataacatccatcattagaatcaatacattgttgatgctcaacatgtgtgcatcataagtagttatgtgcgagaagccacacaaataaaacacatactatgtaattcctgtataataaattcttgaaactcaaaactaaggtattaaatgtgaaggactgactcagaatatggtggaggaagaaaataattgggaaggaggaattgtagaggaacacaaggaaacttttaagtgtaatttgtttattcattatttggatggcttttggggatgcacaggtgagcacgagtggaataacattttgttttgtttgtttgtttgtttttttctgaagagatgtggtcctactctgcgacccaggctggagtgtagtggtgggatcatagttcaatgtagcctccaacttctggtctccaacaatactcctgcatctgccatctaagtagctggaactaccgttgtttgccagcaggcttggcttgagtacttattaaaccgcacactttttgcaataaaaaaaaataaaaaaaaaaaaaaaaaaaa

SEQ ID NO: 2030 - DNA, 1876 bp, Homo sapiens
gcgccgccgtggagtgtagcggaaagggctcgccgtcctcctccgtttctcgctgcttcgggacgcgctctctgcggctctgtgagcgcccctgagcgccggcagcggccgcggtgggttcttcaggttatcttatgatgaggcttttgctatggctaatgatcccttggaaggcttccatgaagtaaaccttgcttcacctacttctccggaccttcttggtgtgtatgaatcaggaactcaagagcagactacctcaccaagtgtcatctaccggccacacccttcagctttatcctctgtacctatccaggcaaatgcattagatgtttctgaacttcctacacaacccgtgtattcatcccccagacgtttaaattgtgcggaaatatctagtatcagctttcatgttacagacccagccccttgctctacctctggagtcacagctggattaactaaattaactacaagaaaggacaactataatgcagagagagagtttttacagggtgctactataacagaggcttgcgatggcagtgatgatatttttgggttgagtactgatagtctgtctcgtttacgaagcccatctgttttggaagttagagaaaagggctatgaacgattaaaagaagaactcgcaaaagctcagagggaactgaagttaaaagatgaagaatgtgagaggctttcaaaagtgcgagatcaacttggacaggaattggaagaactcacagctagtctatttgaggaagctcataaaatggtgagagaagcaaatatcaagcaggcaacagcagaaaaacagctaaaagaagcacaaggaaaaattgatgtacttcaagctgaagtagctgcattgaagacacttgtattgtccagttctccaacatcacctacgcaggagcctttgccaggtggaaagacaccttttaaaaaggggcatacaagaaataaaagcacaagcagtgctatgagtggcagtcatcaggacctcagtgtgatacagccaattgtaaaagactgcaaagaggctgacttatccttgtataatgaattccgattgtggaaggatgagcccacaatggacaggaccgtgtcctttcttagacaaaatctaccaggaagatatctttccatgtttaacattctcaaaaagtgagttggcttcagctgttctggaggctgtggaaaacaatactctaagcattgaaccagtgggattacaacctatccggtttgtgaaagcttctgcagttgaatgcggaggaccaaaaaaatgtgctctcactggccagagtaagtcctgtaaacacagaattaaattaggggactcaagcaactattattatatttctcctttttgcagatacaggatcacttctgtatgtaacttttttacatacattcgatacattcagcagggactcgtgaaacagcaggatgttgatcagatgttttgggaggttatgcagttgagaaaagagatgtcattggcaaagctgggttatttcaaagaggaactctgatgctctgcgtgggaccatgcctgaactccccgaataactgaaaaatggctgaatatttttatggttacttgatatttatttccaaggagtgagcctaagacttttttccccttttgcaaattgctctaagaagtaccatgatttcttttaaactgatctatgctgtgtttgcttattctttagttgaacacactatgaagaattccaggtgtactagtgaatgtaatttatagttgccaaaaaaaaaaaaacctgaaataaataaatgttagattgaaaaaaaaaaaaaaaaaactcgagggggggcccggwmccaattcgccctatagtgagtcgtacac

SEQ ID NO: 2031 - DNA, 1876 bp, Homo sapiens
gcgccgccgtggagtgtagcggaaagggctcgccgtcctcctccgtttctcgctgcttcgggacgcgctctctgcggctctgtgagcgcccctgagcgccggcagcggccgcggtgggttcttcaggttatcttatgatgaggcttttgctatggctaatgatcccttggaaggcttccatgaagtaaaccttgcttcacctacttctccggaccttcttggtgtgtatgaatcaggaactcaagagcagactacctcaccaagtgtcatctaccggccacacccttcagctttatcctctgtacctatccaggcaaatgcattagatgtttctgaacttcctacacaacccgtgtattcatcccccagacgtttaaattgtgcggaaatatctagtatcagctttcatgttacagacccagccccttgctctacctctggagtcacagctggattaactaaattaactacaagaaaggacaactataatgcagagagagagtttttacagggtgctactataacagaggcttgcgatggcagtgatgatatttttgggttgagtactgatagtctgtctcgtttacgaagcccatctgttttggaagttagagaaaagggctatgaacgattaaaagaagaactcgcaaaagctcagagggaactgaagttaaaagatgaagaatgtgagaggctttcaaaagtgcgagatcaacttggacaggaattggaagaactcacagctagtctatttgaggaagctcataaaatggtgagagaagcaaatatcaagcaggcaacagcagaaaaacagctaaaagaagcacaaggaaaaattgatgtacttcaagctgaagtagctgcattgaagacacttgtattgtccagttctccaacatcacctacgcaggagcctttgccaggtggaaagacaccttttaaaaaggggcatacaagaaataaaagcacaagcagtgctatgagtggcagtcatcaggacctcagtgtgatacagccaattgtaaaagactgcaaagaggctgacttatccttgtataatgaattccgattgtggaaggatgagcccacaatggacaggaccgtgtcctttcttagacaaaatctaccaggaagatatctttccatgtttaacattctcaaaaagtgagttggcttcagctgttctggaggctgtggaaaacaatactctaagcattgaaccagtgggattacaacctatccggtttgtgaaagcttctgcagttgaatgcggaggaccaaaaaaatgtgctctcactggccagagtaagtcctgtaaacacagaattaaattaggggactcaagcaactattattatatttctcctttttgcagatacaggatcacttctgtatgtaacttttttacatacattcgatacattcagcagggactcgtgaaacagcaggatgttgatcagatgttttgggaggttatgcagttgagaaaagagatgtcattggcaaagctgggttatttcaaagaggaactctgatgctctgcgtgggaccatgcctgaactccccgaataactgaaaaatggctgaatatttttatggttacttgatatttatttccaaggagtgagcctaagacttttttccccttttgcaaattgctctaagaagtaccatgatttcttttaaactgatctatgctgtgtttgcttattctttagttgaacacactatgaagaattccaggtgtactagtgaatgtaatttatagttgccaaaaaaaaaaaaacctgaaataaataaatgttagattgaaaaaaaaaaaaaaaaaactcgagggggggcccggwmccaattcgccckatagtgagtcgtacac

SEQ ID NO: 2032 - DNA, 1133 bp, Homo sapiens
  misc_feature (38)..(38): n equals a,t,g, or c
caatccccccgaawaawagaaactgggaaakgataaanccccctaatgcccaagggtccwagtgtgwtccytagtggttawactgggaagtgtgtggagaatttaaggtgcctgctctgctgctcyggatggctgaaggctccygggccatcttcatgtgctgcttgaagagctcctattttgtactcctggctagaatgctgtggaacaaatacaaagtgaaaaaagttctctgtagatttctgaagtgcatattcattgatgccaagaaaaaaaaaaagttgcctttttgaagtgatgttttttgctgtcttcttaaacacaaggcttttttgaatgattagtatatttcatggtaaagaaaacagcctgtctggctcaaagcaattaaatagaatgtaatggtgagtacaaatgagtgcacatgtcaggactcaggtctaactccttgtctcctgagcctaaagattgcaacatacacaagaacacactcctattcctaccccacacactcagggacaagcccaactaaagcttacaaggagaccagggtggctctgtccaggggagaagccagttatggaacagtgcattgagagccatggtaggagaggcccacagttctctggagcatgcagcaggggcaccccacctggccttgaggatcagggggagtcaaaggataaagcatggggctgatgacgtctgagggagtgtgatcctccatgtatggcctctgcctgctgtctcacatgtcccttctggtggtcacttgggctctaggagtatacgtcacctcagaccatctggcagaaatactccaggctcctaccccaaagcacatgtcagccttgctgctggagcacgaagacaatgtaaatgaaacatgaaatggaggagttgtgagaccctgaccctgagtccttacttgaaagctgctgctggtgttctgagtgtcttttggactcttatttcttgcccttttccttattaggcaagcagtaacttaggaagtaggtaagagcaataaatgtgacatgttatgtcatcatagtaggagctcatgggaataaaagtcagtggcttgatgcttctgttagaggcaaaaaaaaaaaaaaaaaaaaaaaaaaaaa

SEQ ID NO: 2033 - DNA, 1609 bp, Homo sapiens
aattcggcacgagcggcacgagcagccttcctcccccagcctgagtgactactctattccttggtccctgctattgtcggggacgattgcatgggctacgccaggaaagtaggctgggtgaccgcaggcctggtgattggggctggcgcctgctattgcatttatagactgactaggggaagaaaacagaacaaggaaaaaatggctgagggtggatctggggatgtggatgatgctggggactgttctggggccaggtataatgactggtctgatgatgatgatgacagcaatgagagcaagagtatagtatggtacccaccttgggctcggattgggactgaagctggaaccagagctagggccagggcaagggccagggctacccgggcacgtcgggctgtccagaaacgggcttcccccaattcagatgataccgttttgtcccctcaagagctacaaaaggttctttgcttggttgagatgtctgaaaagccttatattcttgaagcagctttaattgctctgggtaacaatgctgcttatgcatttaacagagatattattcgtgatctgggtggtctcccaattgtcgcaaagattctcaatactcgggatcccatagttaaggaaaaggctttaattgtcctgaataacttgagtgtgaatgctgaaaatcagcgcaggcttaaagtatacatgaatcaagtgtgtgatgacacaatcacttctcgcttgaactcatctgtgcagcttgctggactgagattgcttacaaatatgactgttactaatgagtatcagcacatgcttgctaattccatttctgacttttttcgtttattttcagcgggaaatgaagaaaccaaacttcaggttctgaaactccttttgaatttggctgaaaatccagccatgactagggaactgctcagggcccaagtaccatcttcactgggctccctctttaataagaaggagaacaaagaagttattcttaaacttctggtcatatttgagaacataaatgataatttcaaatgggaagaaaatgaacctactcagaatcaattcggtgaaggttcactttttttctttttaaaagaatttcaagtgtgtgctgataaggttctgggaatagaaagtcaccatgattttttggtgaaagtaaaagttggaaaattcatggccaaacttgctgaacatatgttcccaaagagccaggaataacaccttgattttgtaatttagaagcaacacacattgtaaactattcattttctccaccttgtttatatggtaaaggaatcctttcagctgccagttttgaataatgaatatcatattgtatcatcaatgctgatatttaactgagttggtctttaggtttaagatggataaatgaatatcactacttgttctgaaaacatgtttgttgctttttatctcgctgcctagattgaaatattttgctatttcttctgcataagtgacagtgaaccaattcatcatgagtaagctcccttctgtcattttcattgatttaatttgtgtgtcatcaataaaattgtatgttaatgctggaaagaaaaaaaaaaaaaaaaaaaac

SEQ ID NO: 2034 - DNA, 1359 bp, Homo sapiens
  misc_feature (808)..(808): n equals a,t,g, or c
ggcacgagccgaggctggcactggcacaactacctgaggatggctcgcagggcagtcgggagctgctgctggctctgtcctggctcttggcccgaggacctgtgcccgagcagatgctggcccaggcccgagtgcctctgggtgacgagatgactgtgtgccagtgtgaggccctggccagccctggcccacctgcaccccacatggaagcagagggtcctgtggatgtccgccatgtgcagtggctgatgggaaagctgcggttccggtggcgccagctggtgtccagtcagcaggagcagtgcgccctcctgagcaagatccacctgtacacacgcggctgccacagcgaccagagccttagccatctgtctgtcactgaagcagagatgctcaggggacccagagggaggccagcagctgctgcgggactctggagcgtgagaaccagcgcctggaggctgtcctggcgtggcggcgctctgagctggtcttctggcggtggatggacacggtcctgggcacctgtgccccggaggtgcctgctgcagcctcacagcccacccccctgccctgggtccccgagcgcgggggtggcgagttggacctggtagtgcgggagctgcaggcactggaggaggagctgcgggaggctgcggagcgcaggcgggcggcctgggaggccaaggctggaggctgtggacgggggccagagtggagtgccgcgcggcgggcctctcgggaggctgtggaaaaggagctgggagctctacagcagtgctgggagcgagacggtggcccggcccanccccatgggccacaccggctggtgagacgaaaggatggggcagcaggggaccgggacctgcgggcagctgtggtgatcaggacgctgaggagccaggaggcctgcctggaggcggtgctacgtcgactacagggacagtgtcggcaggaactggccaggctggtgggagcccgccctggtctcatctggatcccgccacctggacgctgagggcctgtcgacgggccctcgtgtgggaagcctgccctggcccagcctggctgggtcttggaggagcagattccaaggccaggtggccgcagggacgatgcagatgcagagcccacgtcacatgctcgctccaggggtggggctgggctgactctggccggatcccaggcctgtggctagcagcactggggacaggaatggctggtcccttgaggaggtcgtgacaggctcagcctggtggtctggaggggactcggaaataaattgtagcagctttcctgccaaaaaaaaaaaaaaaaaaaaaaaaaaaaaaaaaaaaaaaaaaaaaaaaaaaaaaaaaa

SEQ ID NO: 2035 - DNA, 1490 bp, Homo sapiens
ggcacgagtggactcgagcaaagatgacctcactggagttggactttcttctctttgctcctggcagtgttcccactgatgccggttgtaggtcgaaagccagacatctctctagtgatgggtgcaggcttgctggttcttctgttatccctgtgtgttgtaacatctctcatgaaaagaaaagatagctttataaaggaagagctattggtacatctgttacaggtgctgagcacagtgctctccatgtatgttgtgtatagcactcagagtagtctactcaggaagcaaggactgcctctcatgaatcaaattattagctgggcaacattagcctcttccttggttgtgccactactgagttctccagttctctttcagcgattgttcagcatacttctttcattgatgtcaacctacctacttctaagcacagggtatgaagctctctttccactagtgttgtcttgtttgatgtttgtctggataaacatagaacaagaaactctacaacaatctggtgtttgctgtaaacaaaagctcaccagtatccagttctcttataatactgatataactcagtttcgacagctttgatcttgcctctgtctattgctttctgactgtgttcagtccttttatgatgggagccctgatgatgtggaagattttaatcccctttgttcttgttatgtgtgcttttgaagcagttcagttgactactcagttatcgtcaaaaagcctttttctcattgttctcgtcatatcagacattatggctttgcattttttcttcttggtcaaggattatggcagctggcttgatattgggacaagcatcagccactatgtgattgtcatgtccatgaccatctttttggtgttcctcaatgggctgggcccagctgctcacaacgaagaaactcagactatgtggcaaacccaaaagtcacttcatgtgaggttgctgaagcaccattcagcatctggatcctgattctccttttaagctaaaatctcatcaaggcttcaataagaagatggatatggatatatagtatattctactcctgtaaggaaaatggtatttggaattccgaattgacaggttatctggaacaaaggagcttctttttttttctaggttttgcaggcatgaaatagtgattatatctgtggaaaagcataggaaggcattctcctttttcatttttttcctttggctggcagctcttcccagtgatgttgagagcacctgcagcaatctggtccccagtcgcacaacttcccacatacccagaggagagcatatgcctgtgggggcagtgctgatggcatccagagtcattgctgtggctgagctggaaggaaatcaccaggtgccaccgtcaatatttatcagctttcagcactggttttgttagacagtcagggtgtattatttcaagagcttcaataaaaaaagtgtttgcaaaaaaaaaaaaaaaaaa

SEQ ID NO: 2036 - DNA, 522 bp, Homo sapiens
aaaatataaaaataaaatgcacgtcttccattcttccccactgcctgtgtatagtggaggttggtgctcactcttggtccttctgagcttagcagaaagaactatgggcagttctacctgaaaagggagaactcacatgggcaggaaagagcattgtggcaacaaaggagaggtcctcactctgctcggctctaggaagccacagggggcttgatatcagctcagtctacaagaagtctttccttccactgcttgtggttgatttttaatttttaatgtaaaagcatattgcttgagccagggaatttgagaccagcctgggcaacatggtgagactcagtctccacaaaaaatacacaaaattagccgggcgtgttggcatctgcctgtagtcccaactacttaagggcctgaggtgggaggatcgcttgagccccaggaggtcgaggcagctgtgagctgagctgagatcacaccactgcactccagcctgggagtgcaaaaaaaaaaaaaaaaaaaaaa

SEQ ID NO: 2037 - DNA, 930 bp, Homo sapiens
ggcacgagctctatctgggatagagttaatgagggctgcaaaaatagcatcttcatggaaaaacagggacaaatttgtggatgcaagattccagcccttagaagttcttggcatagtaaatgtttaacttaataaattttctatgccttagtaatggaatttcctgctttttgggaaatatatgcatttattatttctgctcctgtgtttcacatgcaaataatacagaaaggagcaagatggacaaagatcttgctgtcctacaatttacatctaatgggaggagacatcccacatataacctaagttttaaaaacaaatgatgaattttaaatgattttaattgtttgcgattgcactgctttttggtgcacccgtctagattcaatattgcattttatgtgttcatttgtttcgatcagacaggcattttgaggagtaaatgtatgtggttgtgtataaggtattgtcacagaatttcccttctctttaaaattattcttttgaggggaattttgcattcgtgctaactgactggcatgtacagatcgggagccttttctattttctctgattgctttagattttctgtatcaaaacttgaacagatcttgagcagcgtttagtacttttatgtacaacctactggtcttgagagtctctgatggtgaaattggactaagttagattatgtaaatctagagccctttgagttagtctatcttttctttttcagacttcacagcagcaaatgtttatcacctcttgaaaagaagcattagtgcttcaattaatccagaagatagtactttccctggtaagtataataaactcctcttttctctggcacagcatttgtactggaaattaacttaattaatttggaccctaaggagtacaaggaaatacttcaaaaaaaaaaaaaaaaaa

SEQ ID NO: 2038 - DNA, 580 bp, Homo sapiens
ggcacgagagaaggtgggaccccagcccaagcacttccccattgcagcctggcatgaaatctttgccttttagtggggatcactcctgcccgagtcctggctgtggtggggactctgcaagttgctaacccagcgtccattctctttcctccgtactaacagaaccccggtgcctctgcccagttccaatagcgggcagacgagagccatgtcctgggctcccttgcagcccggggtgtgcagctgtggcgtggaggtgggtggtgctgggagagacttgcagggaagctcctgtgaaggggactcagctgccacatgcaggacccttcccctttgccttcttcctgcctggaacatggatgtgatggctggtgctgggacagctgtcctgagagcgtgaggaaagggtcacaccctaaggacagtggagcagaacacaggaaggaccctgggcctttgctgacgcagaacgcgggaaggaccctgggcctttgctgacataccagccccagactacttaaattcagctttttttttaatgtgagaaaataaatgcacccctctctggtttaaaaaaaaa

SEQ ID NO: 2039 - DNA, 1224 bp, Homo sapiens
ggcacgaggcgcggaaggcgggcacgcgggccatggctccctgggcggaggccgagcactcggcgctgaacccgctgcgcgcggtgtggctcacgctgaccgccgccttcctgctgaccctactgctgcagctcctgccgcccggcctgctcccgggctgcgcgatcttccaggacctgatccgctatgggaaaaccaagtgtggggagccgtcgcgccccgccgcctgccgagcctttgatgtccccaagagatatttttcccacttttatatcatctcagtgctgtggaatggcttcctgctttggtgccttactcaatctctgttcctgggagcaccttttccaagctggcttcatggtttgctcagaattctcggggcggcacagttccagggaggggagctggcactgtctgcattcttagtgctagtatttctgtggctgcacagcttacgaagactcttcgagtgcctctacgtcagtgtcttctccaatgtcatgattcacgtcgtgcagtactgttttggacttgtctattatgtccttgttggcctaactgtgctgagccaagtgccaatggatggcaggaatgcctacataacagggaaaaatctattgatgcaagcacggtggttccatattcttgggatgatgatgttcatctggtcatctgcccatcagtataagtgccatgttattctcggcaatctcaggaaaaataaagcaggagtggtcattcactgtaaccacaggatcccatttggagactggtttgaatatgtttcttcccctaactacttagcagagctgatgatctacgtttccatggccgtcacctttgggttccacaacttaacttggtggctagtggtgacaaatgtcttctttaatcaggccctgtctgcctttctcagccaccaattctacaaaagcaaatttgtctcttacccgaagcataggaaagctttcctaccatttttgttttaagttaacctcagtcatgaagaatgcaaaccaggtgatggtttcaatgcctaaggacagtgaagtctggagtccaaagtacagtttcagcaaagctgtttgaaactctccattccatttctataccccacaagttttcactgaatgagcatggcagtgccactcaagaaaatgaatctccaaagtatcttcaaagaataaatactaatggcagaaaaaaaaaaaaaaaaaaaaaaaa

SEQ ID NO: 2040 - DNA, 1448 bp, Homo sapiens
gaattcggcacgagttcagtaagaataatgtttttggctttcacatatactcagtttaagtgcttagtattaataacaagccatgaagggaataaattcctcttcactgagacatagacttkggaataaaagacattttaactgatgtgcacaattattaatctagtggataagatggatttaaaaggaagaacaaaatgttcccagtactttttactgtctgtggttttattactatctatgggcatagtgggaagcatcattgagactttagggaaactataaaagttggaagggtggtggcatcaggggttggatgctggttctcaagttcctagctctgccccttgttagtcatttgagttaaataattaatgggaatatctacttcacaggattatgaggaatcctaaggggtgtaatccatatcaaacttttagaaaccagttgttttattacctgggaaaggtaakraagggccagactttttatactactgttagtatttaaatttgggatagtctggatgccacctaatacagttactatgaaattaacaaggtaactaaggaagttgatagtaccagtattatctattgctatgtcctaaattaccatagatttagtggcttaaaacaaatgcgtctcagtttctgtctgarcatggtttarataggtcctttagaaagctcatggtctcatctgcattctcacctggtgatttgggaagaactcatttcagcctcactcggctggcagaattcagttcttgccactgcaggactgartgtccagacctctcactggttgtcagytggaggcccccgcttagttccttgccagctgggtgctccctgcatggcctggctgctgactggaccactgacatgattactgtcactaccagcaagtgtcgagagccaagctgccagcaagaggggtcttttcaggtcctgcccatatccaaggggagaggctcatacgaaggattggataccaagargtgcgggtggggctaatgggaaggcacctaragtttgtcacagctttttttttttaactgaatctctttaaattggtcgtctcsccctacaatgcaaatgctttgtgtacaagtaaaaagaaaaatggctctcacaatatgaaaaaccctggctgggcactgtggcttatataaacctgtaatcccagcactttgggargcccargcgggtggatcccttgaggtcaggagttcaagtccaaccaggccaacatggtgaaacaccgtctttactaaaaataaaaaaattagccaggcatggtggcatgcgcctgtgktcccagccactcgagagattgaggcaggagaattgcttgaacctgggaggtagaggttgcagtgagctgagttgggccactgcactccagtctgggtgacagagtaagactccacctccaaaaaaaaa

SEQ ID NO: 2041 - DNA, 1143 bp, Homo sapiens
ggcacgaggacgcgaggcagggagcttccaggttatagcaatggagcttaccatctttatcctgagactggccatttacatcctgacatttcccttgtacctgctgaactttctgggcttgtggagctggatatgcaaaaaatggttcccctacttcttggtgaggttcactgtgatatacaacgaacagatggcaagcaagaagcgggagctcttcagtaacctgcaggagtttgcgggcccctccgggaaactctccctgctggaagtgggctgtggcacgggggccaacttcaagactccgtctcaaaaaaaaaaaaaaaaaaaaagaagtagagacagggagacagggtctcactgtgttgcctaggccggtcttgaactcctgggctcaagtgattctcccaccttgacctcctaaattgttgggattacaggtgtgagacagtgcacctggccgaaatagctcaagtttctgaaaaacaaatctgaatctatttgttattcttagcgtcactggtctggctttcagaattaacatacaaggttgccacacctagttctgcccagctttatgtcttttattccagtattccaccaaagtttgttttcctgcattccagttctcaagtcttaagataaagattgtacttgacagtttagtatatccataaaactatttgaggtggttaaggttcttgggttcattttccttaatactttgctgaatattgtagattgtaggcaatgaaaaagtctactaaattaggaaaaccttgaataattaggtatcctaggtaagagcccctaaacatcaagcaatctgtgagtctgtaaagaaataaatattttttggattattcttatctaattccacccctgttggaagatgatttctttgttctttgcaactatggaagctgtgaaaatcatcacaagtgcctctgaaagcgagtgttaggttggttagagggtttaatattttctgcaatggtttgtaggaattttaataaatgtagtatattttctgagatgattttgtaaaagtactattttaaatatcaaatcaaccaataaattcacatttgtgttaggaacagaaaaaaaaaaaaaaaaaaaaaaaaaaaaaaaaaaaaaaaaaaa

SEQ ID NO: 2042 - DNA, 1589 bp, Homo sapiens
ggcacgagaagaccttgtattttatagacccgttatactagtattgttatcttacttgatgaaatctcttaggcctcctaaatttccatcattaaattaaaaactgggattacaggcgtgaaccaccgcgcccggccgacagtgatttttcataaaggtgttccctttgttctgggatttttagccttcatacatttttactgttaggcatttcctttttcagatgatggtgataatagttaaaaaaattttattgatagtattaagggagtccactaccttgtgtcagattccctgtttctttttgaagcccttgaaatgaagtttagggaccactgatctagaattctctttatgctcctccactacccattaaccccactctatagtctgccttttcgctttcttctctcctcccttctaamcacttcgtagamcactgtgttttctgttcatgattgaccttcaaattgccaaatcctttggycttataamccgtmtgtacttaaccaacactctgttgttaacaaatccttcaaaactgttttcttttgcttccgctctgtttttcctgtcatccacttatcacttttcttcatatgttttctttcttttgttcccagttgttattatgtggggttctggttctattttatgttctcactgtatattcagaatcagatttttagctaccatgtaccatcttaataatacctagcatttatttactctttcctaattgttatttcagtgcttcagtatttcagtattcatttaattcattcagtattcatttaattctcaaaacaactcagtgaggttgatacaggtataattggtgtcttttttttcttttttctgacactggcatatcgaggcccaaaggttaagtaatctgtgcaactaggaggcagtagaactgggatttaaacttagactgcctgtagaggccatgttcttaaccactactagatttttggcgtccagatgtcccttgtatttctaacttccgtttagttwttctacctccaattcaatacatccattcagttaatctcaagtgcctgcctctttcccttgcaaaacacacttgctcattctttattccttgccacattaaagktaacactatcctccccatcgctagkactatagaggycattgaaccytccccctgcgtatggcctgtgagttttattgattccagcatgattatttggtgatatttgagtgcgattttgtgctagatcctgggtgtataatgatgtatgagacacagactttgtcctcagggagcttatactctagaaataatttttttttttcaagagagcgtcctactctgttgccgaggctggagtgcagtggtgccaacatggcttactgtagcctcaggctcccgagctcaactgatcctcctgctgcagcctcccgagtaggtgggactacagacatggactatcacaccaagctgtttttatttttagttcaggtgggttctcagtttgttgcccaggagttggagaccagcctgggcaacagtgagaccctgtatctaaaaaagaaaaaaaaaaaaaaaaaaactcgag

SEQ ID NO: 2043 - DNA, 831 bp, Homo sapiens
  misc_feature (53)..(53): n equals a,t,g, or c
ggggaaccaaaagcttggaggttccaaccgggggtggcggccggttctagaantagtggatccccccggggttgcaggaattcggcacrrtgagggtgagcaagaagaagactggaaatgccatccctctgtcaccaatccacagtgggtttggggaggaggcatggccaacatccactgggctgcacagacagttttattactaccccacctggctcctgccttctggggccctgcagcccatgaattaatccctttccaggctagcctggggtacatccatcccctttggctcctaacccatggagtcaagcctcgggcacatttctcctaccagcctggtttgggccatatctatgtaatgcttttgccttcatttacttaggttgctcccttaaacaggctcacattttaaacataacctctgcctcctaagcaaatacttatattcataaattactcccacctgaaccaccaccactgccaccacccacaggattcctgggcttccttgcagcatagataaaagcttttttgggcatccacttaccaggcactgggtgggagcaggcagcagggcacatcctccctccttggaagcaatatttactcagcaattctccactcagcagtgtaaatcactgtggcttcccagcaggcatatgatctctgcctggtcgggtttctctcccttttccatgactgaatctgaagctcaagcccctttccccacagcctctcccacatatgcctggaaactgaggtctggctcatccttcagggagctccatgcttccctggtaaggtaaaaaaaaaaaaaaaaaactcgag

SEQ ID NO: 2044 - DNA, 784 bp, Homo sapiens
ggcacagcagaagtattaacttgttcaaatcgtacaaccaaggctcaagtccatgattgcccaactccaaagcccatgttctttctaccttattatgttggcattgttttcaatgtcagtttggacccatataaaaacgcccagctgtaccctatgaggaggatataaaaatgtgagatggtagttgacactcggaggacattcatatctccaaacccaaccttatgaagttggccacagcaagcatgttggaaactagaaccaggggtttcatatcaagccatttgcttaggtctgtatctcaaaagctttaaatacaactttttttggtgccctcttgataaggagtcttatactgagctcttcttcyctttwatagctggtccaycrgaaagattaaattaaacgtttggccacatggacagttaatccttagatcacccagttggatggttcattcctgctatgtttggtttgatttttyatttttggaaaacaaatagtgagtcagtctgctttccctccctttctctgcctcaccactccttctggattctcttagatgctctggtcatactaggtaaacagtatttttcttaaaattttccttgagccatgacagaatcatgagagagctcccctggctctgatacttaatgcccccctctaaaaagaaaggtctatttgaggctattcacttttgtcatcttgaaagagtctctgagtcttacctagcaggaatattttgtttcttttcctaaaaaaaaaaaaaaaaaaactcgag

SEQ ID NO: 2045 - DNA, 1178 bp, Homo sapiens
ggcacgagcggtggattcctgagcattcaatacacatgaggactcccaagttcaaactggcccacttaggattctgggtctcacagtccacacagtgggcgttcccacgcatgttttggatcgactgcagggccatggcctcgctctggctggtcagctgggacttgcttttactgctctcgcatgactgcaggctggccaggatctggctctggatggcttggacccaggcatcccgctcctcatacgtcgtggcttcaaagtgccatgtttggccagtggcagacacaatcataaagttgttggtgcttttcttctttaggtgtttctttttattggcatgaggagaggggggcgggttgagcttggggctggtggtgctggagatactggggctgaagcatatggagtcacccagcccggtgtccatgtccttggataggccattgcttttagagctggagatgggtgcacaggccgatgtggctagggatggccactttcctgggactttgatggtagatgtccgaaggtcaatctcttttttatgaatattcttcatataatcacctaagcttgaataataggtgagcacgccattggaacacagggtgacgtatttctttttccatgtcttcagccatttcccacttcgctttaagagcatgccctgtttaatggggatggctctgccgctcccgatggtgtcagcatgattctccggggctttcctctctttgtctgggtcactccctttctcagatgtaaacaggttggaccagcgcatggaccgcttgcaaacgggggtgggtgtgttggcagtgggaggaacactgaactgagggtcctcctggctggtgctgggagtcgatggaatggaggaggaatagttatttaaactcccacctccatttctgttcttcgtaatgtgcacggtggaaacctgtgtggaacagaaggaggaatggcttcaaaaattgggtagtggcttgcagggtcctatagacagcttacaattaccttttaaaaagatacattttctgggccaggcatggtggctcacacctgtaatcacagcactttgggaggccaaggtgggtggatcacgaggtcaggagttcaagaccatcctggccaacatggtgaaaccctgtctttacaaaaaaaaaaaaaaaaaa

SEQ ID NO: 2046 - DNA, 1579 bp, Homo sapiens
tgattgtatctgaagatcctgagctgccgtacatgcgacctcctctttcaaaagaactgtggttttcagatgacccaaatgtcacaaagacactgcgattcaaacagtggaatggaaaagagagaagcatatatttccagccaccttctttctatgtctctgctcaggacctgcctcatattgagaatggtggtgtggctgtcctcactgggaagaaggtagtacagctggatgtgagagacaacatggtgaaacttaatgatggctctcaaataacctatgaaaagtgcttgattgcaacaggaggtactccaagaagtctgtctgccattgatagggctggagcagaggtgaagagtagaacaacgcttttcagaaagattggagactttagaagcttgcgagaagatttcacgggaagtcaaatcaattacgattatcggtgggggcttccttggtagcgaactggcctgtgctcttggcagaaaggctcgagccttgggcacagaagtgattcaactcttccccgagaaaggaaatatgggaaagatcctccccgaatacctcagcaactggaccatggaaaaagtcagacgagagggggttaaggtgatgcccaatgctattgtgcaatccgttggagtcagcagtggcaagttacttatcaagctgaaagacggcaggaaggtagaaactgaccacatagtggcagctgtgggcctggagcccaatgttgagttggccaagactggtggcctggaaatagactcagattttggtggcttccgggtaaatgcagagctacaagcacgctctaacatctgggtggcaggagatgctgcatgcttctacgatataaagttgggaaggaggcgggtagagcaccatgatcacgctgttgtgagtggaagattggctggagaaaatatgactggagctgctaagccgtactggcatcagtcaatgttctggagtgatttgggccccgatgttggctatgaagctattggtcttgtggacagtagtttgcccacagttggtgtttttgcaaaagcaactgcacaagacaaccccaaatctgccacagagcagtcaggaactggtatccgatcagagagtgagacagagtccgaggcctcagaaattactattcctcccagcaccccggcagttccacaggctcccgtccagggggaggactacggcaaaggtgtcatcttctacctcagggacaaagtggtcgtggggattgtgctatggaacatctttaaccgaatgccaatagcaaggaagatcattaaggacggtgagcagcatgaagatctcaatgaagtagccaaactattcaacattcatgaagactgaagccccacagtggaattggcaaacccactgcagcccctgagaggaggtcgaatgggtaaaggagcatttttttattcagcagactttctctgtgtatgagtgtgaatgatcaagtcctttgtgaatattttcaactatgtaggtaaattcttaatgttcacatagtgaaataaattctgattcttctaaattaaaaaaaaaaaaaaaactcgag

SEQ ID NO: 2047 - DNA, 954 bp, Homo sapiens
caggaattcggcacgagaaaaatgtggggaaatgctttaaaaaaatagcaaaatgtgcaacttcttacaaaaattgttaacgttaggtacttctatatattttatatgaccataatgtccgtgtgtgttttgtaccttcagtcccttgttattgttccgtatattacctgtaagcagatactgtattttattttagcctatttgacagaacacatcactcagaaaaagtgaagtttcagagcaaacagtgaagaaatcagtgtgattgtagacaaaaagtcggttcacagaacggagcagcggggagaggaagggaaaagcttcatagtttggtgcttatcacatcaagagattggtaaatttctgaggaaagacaggctaatggggcactgaaatggaacaactcctttaaacgtgcagccttttgaatttttcctcaaaaccaagaagttgacctctgagctgtcaggtgaccactgtgtgcaaaggggatggattctcttgtcagtagacggtcttctccatgaagcgagagtaggaagtgtactggaatggccaagtgggactgcttcagctgaccaggttcttttaaaccgtagtcatgctttcccactaactcttaaatccttatgcttagaaaattgaggataaggctgggcacagtggctcaggcctgtaatcccagcactttgggagaccaaggcgggtggatcacaaggtcaggagatcgagaccatcctggctaacatggcgaaaccccgtctctactaaaaatacaaaaaaatagctgggcgtggtggcgggcgcctgtagtcccagctactcaggaggctgaggcaggaggatcacttgaacatgggaggcggaggttgcagtgagccaagatggcgccactgcactccagcctgggtgatggcgtgagactccatgtcaaaaaaaaaaaaaaaaaactcg

SEQ ID NO: 2048 - DNA, 1563 bp, Homo sapiens
ggcacgagaagatggcagcccccatacctcaagggttctcttgtttatcgaggtttttgggctggtggtttcggcagccagttctggtgactcagtccgcagctatagttccagtaagaactaaaaaacgtttcacacctcctatttatcaacctaaatttaaaacagaaaaggagtttatgcaacatgcccggaaagcaggattggttattcctccagaaaaatcggaccgttccatacatctggcctgtacagctggtatatttgatgcctatgttcctcctgagggtgatgcacgcatatcatctctttcaaaggagggactgatagagagaactgaacgaatgaagaagactatggcatcacaagtgtcaatccggaggataaaagactatgatgccaactttaaaataaaggacttccctgaaaaagctaaggatatctttattgaagctcacctttgtctaaataactcagaccatgaccgacttcataccttggtaactgaacactgttttccagacatgacttgggacatcaaatataagaccgtccgctggagctttgtggaatctttagagccctctcatgttgttcaagttcgctgttcaagtatgatgaaccagggcaacgtgtacggccagatcaccgtacgcatgcacacccggcagactctggccatctatgaccggtttggccggttgatgtatggacaggaagatgtacccaaggatgtcctggagtatgttgtattcgaaaagcagttgacaaacccctatggaagctggagaatgcataccaagatcgttcccccatgggcaccccctaagcagcccatccttaagacggtgatgatccctggccctcagctgaaaccagaagaagaatatgaagaggcacaaggagaggcccagaagcctcagctagcctgatgacaaaaatgacttctagggtgaagcctgggtgatgaggctgctggaagctttgaagtctcccattcccctcatgctataaaaagaactacctttgttctctcccatcctgctcaggtcttttcagcagtctcatcatcagcaaccatgactgatgactgggccctagcaggtggcaggtataacatggccatggacactcttcttttttaaattttatgtctagcttctgagtctagatgaaaagacagtatgtttcagagaacattgggatatcagttttttcccacagcagggactgtgagagacaaccagcagcatcctctttgtaatcacagggcagggatcagagtttgaaatgaaatgttgtcagggtgttggaaaaattttggtgagttctgcacatttcccctggttcaggctgggcatggaccagccttcagatggcagaagtggaagatgagcctacttgtgagcgatgtgactttaaggaaatgaagactggggaagaataattagtgtttataagacatttaagaggccctttttcatatactgactcactgatgaatcagcatttgcattttatggaaaaatataaatccaaagaaataaaaaaaaaaaaaaaaaa

SEQ ID NO: 2049 - DNA, 1847 bp, Homo sapiens
cccacgcgtccgcaggatggagtgcagtggcacggtctcggctcactgtaatctccacctctcaggttcaagtgattctgctgcttcagccgcacgagtagctgagattactggcatgtgccaccatacccagctaagctcttttctattaaattttttttctgagttttcaactcttttggttttaactgccatttctatgttctgtttctctctggtaacctacgcctagacctcctggaaaacagtaaatgggccacacaagcaatactactactgtgatatactgaaaacctgtatgcagccatttagcacacttgaacatacaattttactcytattttctatttgtccattttcattctcaactaagttggaagctgcctagggataggagcgatgtataattcccctcactgagtcccagcccaatgctgacctcatactaggtattcaatagggtactacaaacaagatttgtcatccagcaagcatgggaaatgttttaaaaacatgataccctcactcttacaaaagccttcaaaattaccagaagataatattgttactgccaaaaagcaattcatgtttacttagagcttactaaatgtcaaactttgagctctaccctttacagagagtctcccatttaatcctcacagcaaccccatgaggtttggagaggctaaataactcactcacatagttacagtcaagtggcgtagctgattcagtctacactcgatcagcccatgaattcaaaaatttaagatcccccaaatatttcttaacagtataggtaagaagtatagtgatttgaaagaactgatttaaagtaactcctcacctctcagcccttacctatgcagtttcccttgtaggaacaccaccttcgtcccacctctctactggcaaattgctacacatccttaaagtcacggcaagcactccccaactcccctcagcagcactcccactgcacctggcactcactgccattctatctacctcctgctctagtccatgtgtctgtttattatttaccaggagaatctgagctccatggggttgagaaccttgccttttcacctccattcccaggtttctagcacagtacctaccacacacacaagtgtacagtaaatatctgttcttgaaatcattattgtggtagcattaagagacttagtttgcaacatctatctttcacagcagatctgtatcacaatctacaccataactttcaacaattcatatttgtttccatagcaactagggaaagtgctccttataatactaggaaaggcaagctctaccttaaggttcaacccactgaaatacttcacaatcacttgctttttgttcttagtgtgaagagacagaatgacagcattttaactttacgtctttaagaacaccttaactttaataatgacagtaaagcttattttttcataagtactagagttttcattgacaaaaggacagcatcttattaattcacaaatctaaaatacccttaagagtccaggtgctgtggctcacacctgtaatcccagcactttgggaggctgaggtgagaggatcacttaaggccaggagtttgagaccagcctgggcaacacagtgagaccctatctttacaaaaaattttaaaaattagctgggtacggtagcacgtgcctatagttccagctactcgggaggctgaggcaggaggattacttgagcacaggagtttaaggctgcagtgagccatggttatgccaccgcactgatgcctgggcaacagagcgagactctgtctcaaaaaaaaaaaaaaaaaaaaaaaaaaaaaaaaaaaaaaa

SEQ ID NO: 2050 - DNA, 1391 bp, Homo sapiens
  misc_feature (782)..(782): n equals a,t,g, or c
  misc_feature (788)..(789): n equals a,t,g, or c
  misc_feature (791)..(791): n equals a,t,g, or c
  misc_feature (1019)..(1019): n equals a,t,g, or c
  misc_feature (1021)..(1021): n equals a,t,g, or c
ggtcgacccacgcgtccgcccacgcgtccggtatgacataaattttccttccttttactttcagccttcaaatatttgaattcagtttcttgttgacatttgggtcatgtttgttgctgtwtttttgttttgctttgttttttgtaaatttcactctgccatctctgtttttaattagtatatttagagtgcttatatttaatgtaattattgatatcttagggtttatatttgccattttatttttcttttctttttttacctctgtttcttatttctctttttataatcctgctttcctgtggattacttgaatatacttttaaattccattataatttatctatagtgttttatatgtatttctttgtaggckttttttagtagttgttcttcatattacattatagataacttattgccatctattggcatctgatcataccattgtctgtgaagtgaaaaacacttaccttctkgcagattcttttggtcttttttatttagaagataattatcttaaatatttcatctttatatatktagttatataatctttgcttcaaccattaggtatgatttagaaatctcaaaagaagaagaaacctactgtgtkccccatagttaaactcactctgatcttcttttcttcctgatcttccgagatatcctcttttattgtkttctttctgtttagagatgtttctttaactgttctcttaggataagtgttttggttacaaatctcagaactcttagggtttttgtttctttcttttttntttttnntnagttttgttttaaacgtgaagatttcttgatttccccttcattcttaaaggatattttcatgatagaattctgaatgggactgcccccctgcctacttttttttttttgctatacttgaacaatattatgccacttatcctggaactcmcagatttttatgagaaatctactctcatttgaattcccatttttctatcattgcctctaagatttttttaatccaatananaatacaaagttttagcaaaaacatggtaaattccagcaagaaatagaagatacaaatttgtttttattaggagttattatatatttatggcatgttcatcctgactagggaaatcgcaaatcctcctttaatatccatcagccatcaaaattatttaatatataaaacaaaattatttaagatataaaagacaatcacatggatattttcaaattataaatatgataactgaaataaaaaatctaaaggagggctcaaaagcaaaatgtaggtgatagtgagaagtagcaaagaacttgaaaacataaaaattacccagtatgatcaacagagagaaaataaaccagaaaaaaaaaaaaaaagggcggcc

SEQ ID NO: 2051 - DNA, 1272 bp, Homo sapiens
cccacgcgtccgggatgctttttgccagcaatgtgagaaaaggtgctcttctgggagagaggaagagacccaggcaatttattatgaatgctccccgttgtatggataatcctgtgctcctctgcccaattcccgcacctctggaaacttcattcacatttggcacagatgagccactcctccctccttccccttgagaatcgttctctgagcctgtgcagaacaaggtgctccgatcctctatcttgcacactggctcctttcctccccccaactgtctccctgtccaccctgtcgtcggctctccagtcctccttctgtagtttcttcctcagaagacagtgtcgcccctcatgctcacctgtaccaggggtccatatttctaactttggaagtgcctcctggacatgtccatgtggttgcctggccatccactcaaatccagcctctccaaaaggaatgattctcccctacttccttctcacacaattgtgtggccagagtagccggaccaatggctccaaactacccccaaatactcatccccgcctcamtgcttgggcccccttggcttcccctagggcagctcacatcaaggtccagcttggatcggagctcctacaggaagcttccccagccctgctctgtcggagaactcttctcctccatactamctctcccattctgtggcaggctcttctttaycctcaggcttcagytcagacwtccctcacctgctaggccacagcagctcctgagtagctgggattacaggcacccgccgctgctaatttttgtatttttagtagagatgggggtttcaccatattggtcaggctggtctcgaactcctgacctcaggtgatcaacccaccttggcctccctaaatgccgggattacaggcatgagccaccgctcccagcctttgattttttaaggtggattttggttgttataaatggagaaaggtaagagttcaagttcaacccgtgtgtgaaagcaaaacaatggaaaacaggattggcttcttcaaaggctcctcttgtagaactgcctctttgaaatttcgaggtaatctactttggagactctgcctggagagggtcagttcctaagttaaaagcatcgcttaaccttggctcctgtggcattttacaaaggtttaaaggaattgattcctctgaaagggcctgaaaataaaaagtctttaacatacaaaaaaaaaaaaaaaaaaaaaaaaaaaaaaaaaaaaaaaaaaaaaaaaaactcga

SEQ ID NO: 2052 - DNA, 2008 bp, Homo sapiens
  misc_feature (1936)..(1936): n equals a,t,g, or c
  misc_feature (1977)..(1978): n equals a,t,g, or c
cccacgcgtccgccgagttcagcatctggacccgggaggctggcgctgggggcctgtccattgctgtggagggtcctagcaaagcggcagattgcatttgaggatcgcaaagatggctcctgcggcgtctcctatgtcgtccaggaaccaggtgactatgaggtctccatcaagttcaatgatgagcacatcccagacagcccctttgtggtgcctgtggcctccctctcggatgacgctcgccgtctcactgtcaccagcctccaggagacggggctcaaggtgaaccagccagcgtcctttgccgtgcagctgaacggtgcccggggcgtgattgatgcccgggtgcacacaccctcgggggctgtggaggagtgctacgtctctgagctggacagtgacaagcacaccatccgcttcatcccccacgagaatggcgtccactccatcgatgtcaagttcaacggtgcccacatccctggaagtcccttcaagatccgcgttggggagcagagccaggctggggacccaggcttggtgtcagcctacggtcctgggctcgagggargcactaccggtgtgtcatcagagttcatcgtgaacaccctgaatgccggctcgggggccttgtctgtcaccattgatggcccctccaaggtgcagctggactgtcgggagtgtcctgagggccatgtggtcacttatactcccatggcccctggcaactacctcattgccatcaagtacggtggcccccagcacatcgtgggcagccccttcaaggccaaggtcactggtccgaggctgtccggaggccacagccttcacgaaacatccacggttctggtggagactgtgaccaagtcctcctcaagccggggctccagctacagctccatccccaagttctcctcagatgccagcaaggtggtgactcggggccctgggctgtcccaggccttcgtgggccagaagaactccttcaccgtggactgcagcaaagcaggcaccaacatgatgatggtgggcgtgcacggccccaagaccccctgtgaggaggtgtacgtgaagcacatggggaaccgggtgtacaatgtcacctacactgtcaaggagaaaggggactacatcctcattgtcaagtggggtgacgaaagtgtccctggaagccccttcaaagtcaaggtcccttgaatcccaaaagtgcctccccagcctcagcccccacctccagccacacacacattacacacacacacacacacacacaaatgtgccacacccagacacgcacagaatcagacactacaaacacctgccttgggggtgaagtgaaggcccagcctccccaccccaccgcgccccaggggttggaggaccttgtctgtgtcaggacagtgtccctccctgggaatgtgacatgagggccgactggggccaggctcaggggcagaggctgggacacaaggggctggcgagggctgcgaggccagggaagccctgagtttctggcggggctgagcagtgggggagcattgtgttgtgggtgtctgtgtgtgaggtcaccctcaaactgcaccgccggccagataccctcctgaccccgaggacttggtctggtctctctggtggctacaaccccagagttttaaggacttggaaaggaaagcacaatcagagaagaaaacagcccccgaaccagcaggagtggcctggcacatggaccggcctgagcgatgtgcactccacccaagccaggctcccagggggcctgatttctctctcactgtctctttttttaaaatggttgcacggctctgccccatggggggccttttttacacactgcgaggcccagctttctaggggacttttgcacatgtcatgcagctcagctgggagctgcttaggtggaaaactccaaataaagtgcggntgtcgcaaaaaaaaaaaaaaaaaaaaaaaaaaaaaaaaaannaaaaaaaaaaaaagggcggccgctctagag

SEQ ID NO: 2053 - DNA, 772 bp, Homo sapiens
ccacgcgtccgatttttttattagccatttttgaactctcttccatttctaagtttctccctgcagctttcctgaacatgaagcatttccttttcttttcatttctagctttcctttctctgtacctcatgtacacttggaagcttcagggacttagcactggtcatgccagcctctacagatcacatctctgtctataattgggtctccatggtaatgagaagcagaaagtgctgaagtagcgcactatgtaaggactggcaagagaaaatactgtcgcggcctctacaggcatagcattgaatccccatggtgcccaagaagcccgagagaagcacgctgtggtgtagagcaggagactgaggacacggacttggcagatttattagcagcaatattctaagatgaaccaaatttaagagtttgtaagtgctcttttcaattggaaaagacctttgaaatttttttttcttttcttttaggaggccagatgctccagtgcctgatggcgaaagtgagaaaactgtagaagaaagttcagatagcgaatcttcttttagtgattaagcttaattttgataagaattacatatgcatgcataggggtacatttacattctgtaagagattgagcctgaactctcttagtcataaaaacatcaaatggccacatgtccactaccaagcttcttctatgttaaaaaaataataataaagcagttttaacctgccaaaaaaaaaaaaaaaaaaaaaaaaaaaaaaaaaaaaaaaa

SEQ ID NO: 2054 - DNA, 822 bp, Homo sapiens
ggcacgaggtaaggcaaaactgagactcatgggtgtggtctttgacagtgaaatcttttagctcttgcaagatcacatagaaaatttcaccaagttctaacatccagcaaaatggagaacatgtactggggacctttgggtttaaccagtgagattgtcttgtttatcctgttgcatttagccttccagcttatggaaaaatacaaattcaaattctaacactgctggatttatgatatttaaggtttctattatatcagctgcctggatggagcacagaaacagcgtagtacaatatgctatgggtatattcatgaccaaagtttacaatgtggaaggagaatagaaatgcaagaggtcagttggggaattagctgcttgtgttatataactccttaaaagtggaaaatgatcacaagtaaatgtgagtagtgacagttctcttccatttcctttcttcaggtaaggaaaacacacttaatatttttgagtgtctttaaagatcttcctaaccatccaaaagagaagatgtcttatttatgtgtatatgtcgtgttgttgactgatttttttgctttttactcctgatgtgttttgtgggtgagaaggcaagcatgtaactaagatacagaaaagaccaagatgtagtggggcacagtggcttgacgcctataatctcaactactcagaaggctgaggtggaaggattgcttgaggcgaggagtccaggctgcagtgggctatgattgcaccgccacacttgctgcactctacccttgggggacagagtgaagctctgtctcaaaaaaaaaaaaaaaaaaa

SEQ ID NO: 2055 - DNA, 1488 bp, Homo sapiens
agggtacttgacatgtccacttggatgtttgataatcatttcaaacttaacatattcaaaacagaactcttaatttctacccacgccctaacctacacaaacactggaaactgtccatctcccaattattcttatctcaataaatgaaatgacaccacagccatcaaccagggatcctgtacctcaccttccacatccaaactatcaaaagctcctcctgttttatgcccaatcagatatcgagtcatttcacctctttctgtctcctctgctacttctctcagacatgttgcttcaatttctcacctgaactactacattagcctcctacctggctctgctttcattcctgcctccctgcagttcattcttacagagaatctagaaaaagctcttcaaaagcaacaatcagatgtcactctcctactttctaaaaacttttaaagaggacctcttcttctgccagtataacagactttgtactccaaaggatatctctgttgcattttagaactcctaggaagtaatgaaaatatctaagaaaaaaaatacaagtagctaagtgcatatatgtcaacagtaaacaagccagaaaaggcagaattggccatcccttgtgtttgtgtgtgacggtcatgtgggggtgcaaatggggaccgtactgcaactcccagtttaagcctgggattctagaagggagataaaatagcccaggttggtagtaccactaaattccagataaagcaaatgtaatttaggcttctagttttttttcacagattgggatcttgagctttcaaaaaagattatcaaacaaggaaacaaaccaccgtgagtgaaaatcagcaaaactagcgttaatatattaattactccttccccaccaagggctttagatgtttgaagtatcagataagaagaaactagactaccttatataaagaaaaattaacttaaatatagactacaaaaatggtgaatggtgaacaacaatggtctctcacaatcaccaggcacttctgaaaaagagctaaagaaaaccttcagtaataaaaaaaaattatcaaaaaatttagtggataagcttttttgtaatggactaattaatgaactggaaaataaaactaaaatagtttcatgcaatggagcacagacaaagagatggaactataaggaagagaggttaataagtttggagggcagaataagcaagcctaactaaagcctatttagagcgtgaaaggcaacaaaaatatgcagaatggagatgagacaatgtttaaagagattgtggctcagaatttttctttttttttaagtgaagagttttatcttttgtgttttttgtttgtttgttttctttgtttttttttttactgttattatactttaagttttagggtacatgtgcacgacgtgcagcttcgttacatacgtatacatgtgccatgttggtgtgctgcacccattaactcgtcatttagcatt

SEQ ID NO: 2056 - DNA, 1383 bp, Homo sapiens
ggcacgagcttttgtcggacatctttaaagcatttttctttttatagaatttcacttaatgtccaatactgatttaatgagcttgggtttacacattatctcttgaagaaaacaaatgaacctttgtgttccaaagcaatccatgtttaaagggaaaaaattatgcataactctgcccagcttcacagtaacctttggcaggtgccttaggtcctctgggactcttttccttatctgaaaaatgaaggacttggatcaggtgaatggttcccagctctgcaacttatgtggctcctcagaggcacacaagctcttttccattatttgccaaataatggaggccctgtctttaactgcagtacaactacacaaaatacttgaaactacagtcttcctggtttttggttggaactgaatcagtgcactctagcaacacttatttcttgctgttcgtaggcttcattatgtgtttggttaattttttaaaacmacawtwacwtatyccataatattwcmgcttaattggmaractgtttcagtctataggatctgcaggaaggaggagtaataagggatttttgactgagctcttatggaacagagtctctctaggccccctgtcatatctgcccttctgggccctggggaaaagttggcatccccagttgtggtgctctccaggtgccctcaggctgtggtggagggagcttcccattctctccttcagcccactcaattcagaggctaggggctgaaagaagcttctctacaactggctgttcactgggaggttaagggatgaccatccagccaggccttcctcaggacatgggagggcttatgctttaacatgtgtaaatccactgcaataatgactggttcttttaccccataaggttgagaatttacctgtaaacatttttgtctgaagaatttggatgtaagtgagggctgggcctctatcttatctcacttggcttctctcagcacagcaccttgcctgcttgttcttacacatcctagatgcacagtaactatttcctaattattagaaatctattagaatcaattgatttcagctgggcttggtggctccttcctgtaatcccagcactttgggaggccaaggctggaggatcacctgagtccaggagtttaagaccagcctgggcaacatagggagaccatgtctctacaaaaaataaaaaattagccaggcatggtggtgtgcacctgtagtcccagctactcaggaggctgaggcaggaggatctcttgagcctgggaggtcagactacagtgagcaatgattgtgccactgcactccagcctgggtgacagagtaagactctgtctcttaaaaaaaaaaaaaaaaaactcgag

SEQ ID NO: 2057 - DNA, 748 bp, Homo sapiens
ggcacgaggaaggaacgaggcaaggagctaaagcagcgtgcgttcagccctggggcattttattaatgcttttacgagttagaagagttgggataatttgccatctggagtttctctgccttgctgatctgagctcagacctgccaatttaccagagataattgataacaccctgtaacagctgagtaagtagattcttctgttttactgcttttaaaaaaagtttaaagttttaaaatagtataaactttaattgggttctttaaattttgttgttgaataatgcaattattatgatattttgtgaatatttgtaaataatgggattctggaataaattaatccccgatgatagaaaagagttaatgaacactttctccatacataacactttagcattcaagaaacataggacttaaatacatatattaaaaatttaggccaggtgcagtggctcacgcctgtaatcccagcactttgggaggctgaggcgggcagatcacctgaggtcaggagtttgagaccagcctagccaacatggtgaaatcccatctcggctaaaaatgcaaaaattagccaggcatggtggcaggtgcctgtaatcccagctactctggaggctgaggcaggagaatcacttgaacctgggaggcagaggttgcagtgagctgagactgtgccactgcactccagtctgggcgacagagaggctctgtctcaaaaaaaaaaaaaaaaaaaaaaaaaaaaa

SEQ ID NO: 2058 - DNA, 1694 bp, Homo sapiens
gggcctcaggactcatctctgtcttctccaaccccagctggcctccatgtcccctgggggctttctgctgctgaccagcttgggccctactataggttttcttgctgggcttaggagcctgagagaggtagccatttccaaaagaaaagatttctatctcagattatctgggaaagaggctgagtaggtcccttctctgaggaaacaggcagcaggacataggatggggcagtgggaggaaaagggtctgcactatggggtccttgggctgtgcactcctgaccttatcacttcacagttcccaccagatctgacttgacctccgggccatgacccagtccctcccccactctggaaacctctgtgtcccctcctgctcctttcactcccacctgggaggctctgagcaggccagggtccctctctccaggcctgctcctccctttctcctcctgtmcccccagccatccccccagccaggctctcccacctctggccccacctcacctcttggccttcttctttccctcgggcgatgggagcctggtttggctgcccagggaagattgtatctgaccacaggagggagggctgagggcactgctgggtgagctgaggcctccttaggttcttgctgtagtctgagttcaagtcatttagaatgagtgacttgaggaagagggagctgggagcccttttcaccagcagggggactggaggagtcgaatggggtggggtcttctcgttttgattagcttctggtggaggtcccaggctttggcgtgctcaagcttggagtggcagggagcaggcctggcttgaccttctttccttcctgctccctctcctcacccctccctgcagctctttcactccgtctctctctctacagatgggacccaggtgagcccgggtgcccactactgcagccccactggcgcaggtaagagtcaaacccgggggagtccatggtagggagtggaagatgaggggtggaaaggctgtaagaacgcgagaagctgaggggttagagaagcagggtcgctggctgatctgccagagagccaggaggtggcggctccagggagggscgaggagccggggtaagagaggcagctctggatgctggctgggcacagtgctaggaaacacaacaggaaaaggaaacacaggatgcccgtcttgtccttgctgggagcagtgaaacaggaaggaaagtaagaagctaatatttatactgagacccctaccccatgtcaggcaccaggcaaggtgtgttcttgtgtgtggactcggtcctcacaccggctctgcaaggtgggcatggcagcccttgcaggactgctctgctggaggggaagtgttctctcactgtctgcgcctcctccctctgctggcccgagcctcctctgctgctaggctgccctggggaaggactggacttcctgctgctgctttggtttaggacatgcccatggggccaggtctggactagacgcggtctgcccttcctttagtgtagccagtatcaaccaagggcctactgagtgcaagatatacagcctgatgcctaataattccatatagcagggagaaatggaacccaggtatcctccttgcttcagtcctggctgttgaaaagctwacaggcaggttagggaggaagcacacacaaatacaaaacaaaaaaaaag

SEQ ID NO: 2059 - DNA, 1572 bp, Homo sapiens
gatcccttgagggcctgaataaaataaaagacaaagagagagcaaatttgtactcagcttgagcttggatatccctcaggccctccctcaggccttctcatcagactgagatttaacactattagctctgtcggcctccagcttgcacacggcagactgtgggactttctagcctccataattgcatgagccaatccctcataataaatctgtttctatgtatctatattttgttggttctctctggagaaccctgactaaatacactgtttaagaaaggagtaaaacttgcactgagatgtttagagcagctttattcatagtttatcaaaatgtggaagcaatcaaggtgttctccagtaggggaaggaataaataaactgtggtatctccgtaaaatgggatgttattccacactaaaaagaaatgagctatcaaccatgasaatacatggrggaaccttaaatgcatattactaggcaaagaagccattctgaaaaggctatatactgtgtgattccaacttcatgacattytggaaaaggcaaaactatggagacaataaaaggatcagagatgccaggggttgggaaggagggtaaattaataggtggaacacaggatttttagagcagtgaaactattctgtatgatataacaatggtggatacatatcattattcatttgccttaacccacacaatgtacagtaatgaaagtgtactgttaggtaaactgtggactttagatgatgatgtgtcactgtaggttcatccattggaataaatgcaccactcttgtgtgggatattgatagtgggaagactgcccaattaagaaatctgtactttctactcaattttgctgtacatttaaactgctctaaaaaataaactctgttttagcctgtaaccccagcactttgggaggctgagggggtgtatcacttaaggccgggagttcctgaccagactggccaacatggtgaaaccttgtctctactaaaaatacaaaaattagccgggtgctgtggtgcatgcctgtaataccagctatttaagaggcatgagaatcgcttgaacctgggacgggggttgccagtgagcccaagatcctggcactgcacttcagcctgggtgacagagcgagactctgtctcaaaaataaatacataaatacataaataaactctgtttttaaaaatgagcaaaaggccaggcacggtggctcacacttgtaatcctagcactttgggaggccgaggcgggaggatcacttgaggtcaggagttcaagaccagcctggccaacatggcaaaaccccatctttactaaaaatatcaaaattagccaggcatggtggcatatgcctgcagtcccagctacttgggaggctgaggtgggagaatcgcttgaactcgagaggtggagaatgcaatgagctgagatcacaccactgtactccagcctgggcaacagagcaagagtccgtctcaaaacaaacaaacaaaaaaaaaaaaaaaaaactcgagggggggyyccgtacccaatcgccctgatgatgtatggtatac

SEQ ID NO: 2060 - DNA, 1265 bp, Homo sapiens
gcaacattatctgcctttgaaacaccacctccgtggattaccatttggcccaatgggagggtctggataatgcccattatattatcctaattccctgctacctcagaggttgttaaggggcacttctgctgtttccctctgagtgacctctggctgccactctcttgcagatgctccttttcctctcagggatgagtcggagctgggactgggaaaggcagccctcttgtttctgttcaagttggccaggaatgcccaggaatgatgattctgttttgccagcttcttgccgtgagctggggttgctgtgtttacagcacaaccaaccctaaagtcagtgcaattcactgtggatttattgagcacctgctagtatgtgcgtgtgttgggggtggtatatgaaaatgatggaggcagtctctgccttaaatgagggagggtgggcaaacagctcccacggtcggcggttgaaccagttcctattctttctcataggaagtgtccataaacattgtcttgtctcatttgcatggttgttgagaggtttgaatgtagtggtaatgaattgagagtgcttctaaaggtattaagctcttgatttatgtaaaactttcttcagtattactaggcaggctgataataaaagctaacatatattgaatgctttctatttgccaggcactgccctaagtgctttctatatattagcttatttaatctttatagcaactttgaagtagattgcttgtgtacccacttaaaagaggattaaaaaaacttgccgaggatggcacagcaggtaagtagcagagccaggcagtctgaacgtttggccaaacactggccactgtaaagatcttgtggaagtcagggagtagaggtggtctctctcccccaagtgaaggcagcagccaggacctaccgtcagagaccagcaaggagcagagaaaggtcaggctggtgcctcagaaagcatcagcatttctgcacaacttaattaaattactgaaaccttttctgagcttggagccatctttcttggagagtaatacaattgaaacagataatttaagccaaggaggaaggacagaattggtgagctcacatatgtagatggacatgtaatgacgtctgactaaaacacagaggaaaaaccttaaagtgaatcatgtttattcaatttccaaacaagtgcaaagacccaggcagcgtgcttcatgtttggactcttgaagaacacacatggaaaaaaaaaaaaaaaaaaa

SEQ ID NO: 2061 - DNA, 3332 bp, Homo sapiens
  misc_feature (16)..(16): n equals a,t,g, or c
  misc_feature (28)..(28): n equals a,t,g, or c
  misc_feature (30)..(30): n equals a,t,g, or c
  misc_feature (32)..(32): n equals a,t,g, or c
  misc_feature (44)..(44): n equals a,t,g, or c
  misc_feature (625)..(625): n equals a,t,g, or c
  misc_feature (3138)..(3138): n equals a,t,g, or c
  misc_feature (3315)..(3315): n equals a,t,g, or c
  misc_feature (3332)..(3332): n equals a,t,g, or c
actattcagtgcacangacacaagtcancngncagtcacggtcngattcccgggtcgacccacgcgtccggttattaacctctctaaatttcagggggaaaatgtataaatatgtcatgtatttgataaatagttttccctttttttaatgaaaagattatctgattggattgacctgcctactaatttttgctattaactttttcattcttaggcaataagcaacaaagaccagcatagcatatcatatactttrtctcgggcccagactgtggtggttgaatatactcatgacagcaacacmgatatgtttcagattggccggtcgactgaaagccccattgattttgtagtaactgacacggttcctggaagtcaaagtaattctgatacacagtcagtacaaagcactatatcaagatttgcctgcagaatcatatgtgaacggaatcctccctttacagcacggatttatgctgcaggatttgactcatcaaaaaacatctttcttggggagaaggctgccaaatggaagacatcagatggacagatggatggcttgaccactaatggtgttcttgtgatgcatccacgcaatgggttcacagaagactccaagcctggnaatatggagagaaatatcggtgtgtggaaatgtatttagcctacgtgaaaccagatcggctcagcagagaggaaaaatggtggaaattgaaaccaatcagttacaagatggctcgttaattgacctctgtggtgcaacattgttatggcgtactgcagaaggcctttcccacactcctaccgtgaagcatttagaagctttaagacaggaaatcaatgcagcacgacctcagtgccctgtagggttcaacacactagcatttcctagtatgaagaggaaagacgttgtagatgaaaaacaaccatgggtatatctaaactgcggccatgtacatggctatcataactggggaaacaaagaagaacgtgatggaaaagatcgtgaatgtcctatgtgtaggtctgttggtccctatgttcctctgtggcttggatgtgaagctggattttatgtggacgccggccctccaacccatgcgtttagcccgtgtgggcatgtgtgttcagaaaagacaactgcctattggtcccagatcccacttcctcatggtactcatacttttcatgcagcctgtcccttttgtgcacatcagttggctggtgaacaaggctacatcagacttatttttcaaggacctctagactaacagaccattgtcttgcaggactacattataaatttataagctaagtgagttgggttttcgaacctgttgtccacgtcacagtttttctgctctggtcatttgcattaagatgaagaattttttaaaacatttataataaatagtagcaatttctgagcaaaaatctgggaaactcaagcaaaggaatttctgaaagtatcagtcttctgaattctgagttttgaaaatatattttgaggagaaaaagacatagtctaatttgatgccttccttttagtgtttttgaatcacctatcctcagtgctgaaattgttttgtataactgagggtactgttggttcaaactatgttagtttacagtttgttgcaaacattgtaaaatacagcgacatgtatattaacttttttctatttatctttattatagaaaataccttagaatgttcttgatagagtagcatggtaacgatggtgtcacacccttggtgtgaatggtagcttagtgagcaacctagctcaaggatttgcaaagttaggaagaaggacgagagagcctctctccccaccccaatctaaatatggaatttggtaaattagaatactttgtaatttgtaagaccaaattcatactaattacccgcgtgaaaggtgtttgtttttaacaacattgaagataatcaggaaagattttttcttaatgtttctctcgagcgtagtactataacaaaaacttaatgctaagaaacattttatatgctcctttggatatgcaatttaatctagattatctatttttctcccatgataactaatctgtttttagtatcagcagcatttggcaagtttattttttggatataaactgtggttcatctgttcactgtttctagaaaaaaatcattgccataagaaaaagtataaattagcaagaaaggagagtgacttgatttgcttttggaaaaagaaatgcttaattaattattctgtatttggccttattcgggcattaggaaatctagagatctaaagggttgaatgacaatagtgcccccgtttttagcagaccagccttaactctgggtttgaatcctaaggagattgccacagtgagacttaaggaaatgtttggttggcagatgagcaccaatgactgcagcgtggagtgacgcactgcatggtctgtttattctctaattccaatatgtcttttgcttccagaagcaagaaaagtttcttctctcccctccttcccacccttttttcaaaggcaccacaagtatagacagttgcactacatcaaatctttttttgacacttgtagaaaccagtacacttttagattagacagtatcttcttttaatattttgatttgttttcctttagtttgaaaagttgtataatacttaactgactgtagcaaagttttatatgtggtagcatacctttaatttaycctattacaaaactgttctgaattttcttttggtttttaaaaaacaaaacttgttgcttagaagccatgaattattttattttacttcaactgtcgaaacttccttgttttaaaaaatgatcatttgggttcactcaggaaatgcatgtcaggaaacttgtattataagtttattagttgtgatgtatcagtaactgctgttacccctttttcaaagaaatgtaattgattttgaagttttctagattgtcacatgctttgtgactaatgcaagaaagcaagtcctgtgttgtatttgttctagtcatttttattcaggctatatattgtagcttaatttttatttgcaattaatttatttaaactaagtaaatacttttcaaaatacataattgaattcgtctctgtgagtncatttttgcataatcgagaatgagaaaccagaagtgaaaactgtgaacaactctattccacactccaaaaatactcatttgaaatagatgaagagtttgcatttaatgtaacactttaaagtatctggttcttttttaaaagcatctcttactaataaaggaactttgttagtggtngaataaaaaaaaaaaan

SEQ ID NO: 2062 - DNA, 1314 bp, Homo sapiens
ggcacgaggagatcttgagtcacagtgaagcaacccactggagtgagcattgctgcatttggagagtcagatgscattttgggccgcgatgggcctcttggaacattggtgtgttcatctgcattcgatgtgctggaatccacaggaatctgggggtgcacatatccagggtaaagtcagttaacctcgaccagtggactcaagaacagattcagtgcatgcaagagatgggaaatggaaaggcaaaccgactttatgaagcctatcttcctgagacctttcggcgacctcagatagacccagctgttgaaggatttattcgagacaaatatgagaagaagaaatacatggaccgaagtctggacatcaatgcctttaggaaagaaaaagatgacaagtggaaaagagggagcgaaccagttccagaaaaaaaattggaacctgttgtttttgagaaggtgaaaatgccacagaaaaaagaagacccacagctacctcggaaaagctccccgaaatccacagcgcctgtcatggatttgttgggccttgatgctcctgtggcctgctccattgcaaatagtaagaccagcaataccctagagaaggatttagatctgttggcctctgttccatccccttcttcttcsggttccagaaaggttgtaggttccatgccaactgcagggagtgccggctctgttcctgaaaatctgaacctgtttccggagccagggagcaaatcagaagaaataggcaagaaacagctctctaaagactccattctttcactgtatggatcccagacgcctcaaatgcctactcaagcaatgttcatggctcccgctcagatggcatatcccacagcctaccccagcttccccggggttacacctcctaacagcataatggggagcatgatgcctccaccagtaggcatggttgctcagccaggagcttctgggatggttgcccccatggccatgcctgcaggctatatgggtggcatgcaggcatcaatgatgggtgtgccgaatggaatgatgaccacccagcaggctggctacatggcaggcatggcagctatgccccagactgtgtatggggtccagccagctcagcagctgcaatggaaccttactcagatgacccagcagatggctgggatgaacttctatggagccaatggcatgatgaactatggacagtcaatgagtggcggaaatggacaggcagcaaatcagactctcagtcctcagatgtggaaataaaaacaaaacacctgtaaaaaaaaaaaaaaaaaaaaaaaaaactcga

SEQ ID NO: 2063 - DNA, 2545 bp, Homo sapiens
ggcacgaggagatcttgagtcacagtgaagcaacccactggagtgagcattgctgcatttggagagtcagatgscattttgggccgcgatgggcctcttggaacattggtgtgttcatctgcattcgatgtgctggaatccacaggaatctgggggtgcacatatccagggtaaagtcagttaacctcgaccagtggactcaagaacagattcagtgcatgcaagagatgggaaatggaaaggcaaaccgactttatgaagcctatcttcctgagacctttcggcgacctcagatagacccagctgttgaaggatttattcgagacaaatatgagaagaagaaatacatggaccgaagtctggacatcaatgcctttaggaaagaaaaagatgacaagtggaaaagagggagcgaaccagttccagaaaaaaaattggaacctgttgtttttgagaaggtgaaaatgccacagaaaaaagaagacccacagctacctcggaaaagctccccgaaatccacagcgcctgtcatggatttgttgggccttgatgctcctgtggcctgctccattgcaaatagtaagaccagcaataccctagagaaggatttagatctgttggcctctgttccatccccttcttcttcsggttccagaaaggttgtaggttccatgccaactgcagggagtgccggctctgttcctgaaaatctgaacctgtttccggagccagggagcaaatcagaagaaataggcaagaaacagctctctaaagactccattctttcactgtatggatcccagacgcctcaaatgcctactcaagcaatgttcatggctcccgctcagatggcatatcccacagcctaccccagcttccccggggttacacctcctaacagcataatggggagcatgatgcctccaccagtaggcatggttgctcagccaggagcttctgggatggttgcccccatggccatgcctgcaggctatatgggtggcatgcaggcatcaatgatgggtgtgccgaatggaatgatgaccacccagcaggctggctacatggcaggcatggcagctatgccccagactgtgtatggggtccagccagctcagcagctgcaatggaaccttactcagatgacccagcagatggctgggatgaacttctatggagccaatggcatgatgaactatggacagtcaatgagtggcggaaatggacaggcagcaaatcagactctcagtcctcagatgtggaaataaaaacaaaacacctgtatggctgccattctcttcagccctcgctctcccctttccacagcctccacccctgacccccatcctcttttcctacctctctgtttggtttagaaattgctcaataagtcatttggggtttggcatcctgcccagccacttcccaaacatgaagacctctctgttgctttatgttgtacatgccccatagccatcccaacgtcctccccagtcctctcctggcaccagcaccttagaagttgttggcagaaggcacttaaactgtgggagaagtgtgcacacctttgagtcccttccctcaaggttaaagctcctgtcagactctcagaagggtctgtgggtgttgtatattaggcaaacaggggaaagcttagaggtccttctatatgtgttaataagctgtttctaagtgtttaaatttgaaaagcatcatgttctcatgatttatgggaatgaagcaagtactgaaatcaaattaaatactccctgggtcctgggtcagtttgaccctagccctggggtgaggcaagccccctcctatgaggatgagcaaaaatactactctcttcgccctgagttgctttctggatctggggcttcaggacttgctgcttcagtcagcctttattagcaccaaagactttatgaagatcccacacacagacacacatcccttcccgcctcccccctgccttcagtaggatctggctccgtggctggaggaccaacccctatagtgggaatgcagagcttaacgtgtactgcttgtgtgtgtgcgtgagtgtgtgtgtgtgtatgagtgtgtgttccgcctcccaccctctccccatctgctctgggtatttttgtttttgtttagttttaggtttacaacagagaggaattaatttatcagcagcctaaaactgttgtgtttttcttatggtttaaaaaacgccatgtcattgataactccctttctcccttcccttctcccggtctgctgatcactctttcatgcctgtgtatccagggtgctctgtttccccaccgttcccaggtgtacgaggcagagggccgggacagctttcctctcagtcattgttcaccccacttgaaaattcagacaagaaaactttgcttaaaagatttcatgtgtgggaaccacagttcctggctgcctttctcctgtgtatgtgtaaattccttaataaatattgcagggaaggaaaaaaaaaaaaaaaaaaaaaaaaaaaaaaaaaaaaaaaaaaaaaaaaactcga

SEQ ID NO: 2064 - DNA, 1564 bp, Homo sapiens
  misc_feature (50)..(50): n equals a,t,g, or c
aaactgcagtttaaaagtgtttatatcctggatacactaacagcattttntccaacttgtggagtggagggagtagggaaggggaggatagtgctaatgaactgtgacaggggctagcaagaaagaaagaaaaagagttccctaagtaagctcctactgggtgtcctccactcacatggagacagggccctgcttttaggcacttactcttccagtgtctattgyataatatgttcaggaaggatcccagattcaaagatttatagaattagrgttaaaagggatagatatcttgtttgaccctgaaaaaattaaggaatatgcttgagatattcaatggcagaggctggaatagattttcccaaatctcctgatgtgaagttctgtgtttgtcaaacatgactgtgtaaaaagattaatttaaacttaatgacatgttgtattcatagaagttctttgggtttctgtggaaacctcctcttgctagcttaagcagaaatgggggatttattggaaggaagctgagatattgcaccaaactgcacaaaattgaatgaagagctgactaagcaaggctgcactgagaaggaaccagggtggtctgggctgtggtagcggcagcagcagcttgcagatctcccagcgctgatgctggctcgactcagacaggtctccactctctgctgtctgtctctggctcagacaggacactttgtgtggctgtttccttccacaaggcctcagtgggagcaagccagcctcccacaggcctctgagacagaccaccccattcctccctctcctgttaacctgcctttatttccttaattgcacttatcaccatgcagaagcctatgtgtttgttcccctgtggagatgtaaaaacactgatgcccaggcctaactcccagagactctgattgaactggtctgggctatggagccgggacatttgcatttttcttacaagctctaatgtgcagccaggattaagaatcattgccttctgcatcaacaggacaaatacaaaatgtgcagcaaaatatatgtttaagtgaatcaagaagacagatctagaaacgattgttaaggaataataatgcattttgtccatcaccacacataagtgatgttgaccagagccctcccagattgagtggtgccaggtgttcggggttgtctcggttaatccttactatggccttgcggggtagggggcagtgtcctcattgtccaaatgagtcactgaggctgagggattcaggctcagtgtatgcccacagttctttggcaaaccccaccactgggccagccaactacacggggattctgatcgggtcctgatgggtgcccatgatgggctgtgcaaaagtggtggtgagatttctccaccttcacggaggtggtacccaggggaggtggacttcagcagcgagaatgggctgggtgcagtggctcacagctgtaatcccagtgctttgggagttcgaggcaggagaattgcatgagctcagttgttcgagaccatgggagaccctgtctctacaaaaaaaaaaaaaaaaaa

SEQ ID NO: 2065 - DNA, 914 bp, Homo sapiens
ggcacgagaagctatccatgaaaacactttgtgatgtgctgttttatatcacagaatggaacctgtgttttgattcaacaagttcaaaacactcttttcataaaatctaagaagttatgtttctgaacctattgagcctttataggaacatatgaatatccagtcctaaaaactagaaatgagcgatctgtgaaaacactttgtgatgtgctgtttcatatcacagaatgggacctgtgttttgaagaaaccaaccctactgacaccttgatcttggacttctagtctcagaactatcttgggacatttcctataaatagatgcatgcaatacgtggctttggaagatggattttaaccaactctactgacgagtctgctttaggactcttggtccagactgacttcatggagagtgttgggggttgtgggagaggccaagcctacaagctgtgggaagctggtggatggaaggctggttagaattcttcaggatctggggaacctcagagagtgctgaaacctgttgggacgttggatgagccaatacttggcaaacgcaagaatacaaaggtttctttctttctttttctttttccagatactcaaaagctggggccatgttacatgtgcccagctgtttcattagttaatatcttttggttgcaggccatggcaaccaaatctaaagtaacttaaacaagaaaaggaatgttttggctcatgaaataaaaaagtttagggatggccaggcatggtggctcccacctgtaatctcagcactttaggaggctgagacaggagaattgcttgaacctgggaggtggaggttgcagtgagctaagatggcaccattgcactccagcctggcggacaaagtgagactccatccccctcaaaaaaaaaaaaaaaaaa

SEQ ID NO: 2066 - DNA, 2235 bp, Homo sapiens
  misc_feature (1097)..(1097): n equals a,t,g, or c
cacgagggaattacaggcgtgaactaccgtgcccagcctttttttcatagcagttttattaagttgtatttgccataccacccaatgtatccatttaagcacctgattcagtggtttttcatgtactcatggagttatgcagccacaatcttagcgcattttcattaccccaaaaagaaactgtacccattatgcaccccgttcccctcctccggtcctggcaaccacgagtctactgtctgtcttcatggatttgcctattctcgacgtttcattgggatgaaatcacacagtgtatggcttcccacactttactgtgctgttgtcaaggtttatctatgtgttgggtgcagccaccccttggtatccacagggattggacccaggagcctgcaccgatcccctgcagggatgcctgtgtcccacagtgccccctgcaaaactcactgatatgaagagtcggccctctgtatccatgggcttcagatcccgtgattactgtatcttctgtctgtgtgcagttgaatctgcgggtgtagaacccacagacacagggagtggctgtagcttatccctttgtatggtcagagagtgttccgtagcggggatggacacgtgttcattcactcttccactgatgggcatcgggaatgtttccactttctgtctatcattaacaattctgctacaaacatacatgtacttctgttggaggggacacatgttttcatttctcttgggtgtgtctatccaggagtggaattggctgggtcttatggtaactctgttaactgttttttgctttttggttttttgtttgtttgttttttgagacggagtttcacccttgctgtgaactaccataggctggagtacaatggcgcaatcccagctcagcacaacctctgcctcgtagattcaagccagcagggcgagcctctaccccagagtgaaggtggactttgccctctcgtgccacgagkacttgctggcacccatctctgagcccatcgagtggaaataccacagcccatgaggagtggaaatgaggaagtgctggctgatgtccgcaccatcgtgaaccagatcagctacancccccaggatccccgagacctctgtggacgcatactgaccacctgctacatggccagcaagaactcctcccaggagacgtgcacccgggccagagagttggcccagcagattggaagccaccacatcagtctcaacatcgatccagccgtgaaggccgtcatgggcatcttcagcctggtgacggggaagagccctctgtttgcagctcatggaggaagcagcagggaaaacctggcgctgcaaaatgtgcaggctcgaatacggatggtcctcgcctatctgtttgctcagttgagcctctggtctcggggtgtccacggtgggctcctcgtgctgggatccgccaacgtggatgagagtctcctgggctacctgaccaagtacgactgctccagtgcggacatcaaccccataggcgggatcagcaagacggacctcagggccttcgtccagttctgcatccagcgcttccagcttcctgccctgcagagcatcctgttggcgccggccaccgcagagctggagcccttggctgatggacaggtgtcccagaccgacgaggaagatatggggatgacatatgcggagctctcggtctatgggaaactcaggaaggtggccaagatggggccctacagcatgttctgcaaactcctcggcatgtggagacacatctgcaccccgagacaggtcgctgacaaagtgaagcggtttttctccaagtactccatgaacagacacaagatgaccacgctcacacccgcgtaccacgccgagaactacagccctgaggacaacaggtttgatctgcgaccatttctgtacaacacaagctggccttggcagtttcggtgcatagaaaatcaggtgctacagctcgagagggcagagccacagtccctggacggcgtggactgaggccggttccttcctggaggcctcctgtcctcggggaccccagcacctcatcatcagcattgctggagccaagggtaggagccctacactaggagcccaggatgggacggcgcatcagccgagagggagggaacttttcagtcaaattcctcaaaaagaggctggaataaagcctgggcttaaaaagaaaaaaaaaaaaaaaaaaaaaaaaactcgtag

SEQ ID NO: 2067 - DNA, 1369 bp, Homo sapiens
aagatctagttagagaaaggttttgaacagtgggaaactaagtgggcagggatgtgacttctgtagccacccgaatgtttgtgtctctgactgtttgagcttagctctccttgctggtttcatttgctcttatggcagacagtgtgctctggtggcgctggaagatgttaaggcgtatctcactgaggagaatggtcagattgcggtaagctttatctgctgcttcttctttctggtccccacccttgcagcagcctggctacccagccccaccttgagtctgccctggtggggttctgtttctctgttcctgctcatttaccttgtgtactttcttcacaggtgtttgatgccaccaatacaacccgggagaggagggacatgattttgaactttgctgaacagaattccttcaaggtaggatctgactccatgttggaggaaaagggatgagtagaggtggggagtcaggctacaggcatggatctctcactctagtgggtgaggacaggatgggatatctgaatctcttctctcagagcattcccccagtccttgagtgttttcattcaggtcctttctcagactgttagcctgtatgtttgaggcccaggggctgtggtaagagctatgaggaggacttgagggccactttcatgaagaaaatcctgggagatgtggtggctgggtggggtagatgagcatgtgctcttaattaacagcctggcatttttgacttgcttatcactgccttctctccatggccaggtattctttgtggaatccgtctgtgatgatcctgatgtcattgctgccaatattctggttggtgacacccctacatatcatctcctcttcaccttttgtgctgtgtgtgttgtggggtgtgtgtgtgtgtgtgtgtgtgtgtgttgttggggaggggtgttttcgtaatgaaagagagaaatagacatgtttaacatcacaaagagatcttttctatctgccagagccccatctggtacttctacactcttctcttgggagaggaaactgaggctttaaggaatcaagtaagaattagctgttgaattgaaaccagggtttaggttgtaggattcttggccctgtgctctaggtattatctggatgttgagacctagatgttggaatagatcagccgggcacggtggctcatgcttgtaggctcagcactttgggaggccgaggcaagtggattgcttgaacccagaaggatcaccttagcctgggaggttgaggccacagtgagccgtgattgtgccactgcagtccagtcttggtgacagagtgagaacatgtccagtcttggtaacagagtgagaacatgtctcaaaaaaaaaaaaaa

SEQ ID NO: 2068 - DNA, 2910 bp, Homo sapiens
aattcggcacaggggcagtctggsatgatctttttggaggtaagttgtgcctcactgaaaactaatccccagcccatctttgcctgctttctagccctgtctatcctgaagcgggctcgccgggaagcgcccaggccgtgtagcctttgatgggatcaccgtcttctacttcccccgctgccagggcttcaccagtgtgcccagccgtggtggctgtactctgggtatggcccttcgccacagtgcttgccgtcgcttctctttggctgagtttgcgcagkagcaagcccgtgcacggcacgagaagctccgccagcgcttgaaagaggagaagttggagatgctgcagtggaagctttcggcagctggggtaccccaggcagaggcagggctgccacctgtggtggatgccattkatgacgcctctgtggaggargacttggsagtcgctktggcaggtggccggttggaagaagtgagcttcctacagccctwsccagcccggcgmcgtcgagctctgctgagggcttcaggtgtgcgaaggatcgatcgggaggagawgcgggagctgcaggcactgcgccaatcccgggaggattgtggctgtcactgcgataggatctgcgaccctgagacctgcagctgcakcctggcaggcatcaagtgccagatggaccacacagcattcccctgtggctgctgcagggagggctgtgagaaccccatgggccgtgtggaatttaatcaggcaagagttcagacccatttmatccacacactcacccgcctgcagttggaacaggaggctgagagctttagggagctggaggcccctgcccagggcagcccacccagccctggtgaggaggccctggtccctactttcccactggccaagccccccatgaacaatgagctgggagacaacagctgcagcagcgacatgactgattcttcyacagcatcttcatcagcatcgggcactagtgaggctcctgactgccccacccacccaggcctgcctggccctggcttccagcctggcgttgatgatgacagcctggcacgcatcttgagtttcagtgactctgacttcggtggggaggaggaggaagaggaggaagggagcgtggggaacctggacaacctcagctgcttccatccagctgacatctttggtactagtgaccctggtggcctggccagctggacccacagctattctggctgtagcttcacatcaggcrtcctggatgagaatgccaacctggatgccagctgcttcctaaatggtggccttgaagggtcaagggaaggcagccttcctggcacctcagtgccacccagcatggacgctggccggagtagctcagtggatctcagcttgtcttcttgtgactcctttgagttactccaggctctgccagattatagtctggggcctcactacacatcacagaaggtgtctgacagcctggacaacatcgaggcacctcacttccccctgcctggcctgtctccacctggggatgccagcagttgcttcctggagtccctcatgggcttctccgagccagccgccgaagccctagatccctttattgacagccagtttgaggacactgtcccagcatctctaatggagcctgtgccggtgtgaggaccaggatgtcttttcccagccccaagagacctgttgctgctttcttgtaattatggggctccccagagtctgcgtaacagtctcccactggctggctcacccacaggtgccatgtgcacactcctggttttcaaacaattctctggatttatttatttgttttaacttttctgtgctgaagagaggactagggggagggggcttcccctttcagctgcccggccccccacacccacagcttgctcttctatctccacaacgtgagcctggaagaggagaaaatgtggctcctctggagcttggcagaccacttttcggtctttgcgtgatgttccttagcccaaagacggtgagacagggctgaaatcaggtggcttctgccaccctgagccctagacccatgggtggctaaatccactggactgtgaagactataatttatttccataatttatttggagattgaggaggctttggttgcacttctttggctggtgggtaatgccaggggtggggtgggcacaggccctcaagagccccttttgccttgtagtcctacaccttgccctgcctgggctttggtgcagactaggtgtggatttgagctctgtgatctatgtctgctgcctggctcctagatggctctgygggcaggtgctggccaaggacatcatctaggcagggggagagcctgggctgaacagctgtgaccaaaactcccttctgccccaccctgccccctccacttcctgccctctgttccatcttcccccttcccaaaggccacagcctttattccaggcccagggatgtaggagggggaaggaggaaacaggaagcccagagagggcaaagggcctacctcggggcgcgaaccatgccccagactattatctcagggctttctgggcactgcacttcagcgtggcccacctgcccatgccctgaggccagttggcgaggggtggctcctgagggtttttataccctttgtttgctaatgtttaattttgcatcataatttctacattgtccctgagtgtcagaactataatttattccatttctctctgtgtctgtgccaagaaacgcaggctctgggcctgccccttgcccaggaggccttgccagcctgtgtgcttgtgggaacaccttgtacctgagcttacaggtaccaataaagaggctttatttttaaaaaaaaaaaaaaaaaaaaaaaaaaaaaaaaaaaaaaaaagggcggccgc

SEQ ID NO: 2069 - DNA, 2430 bp, Homo sapiens
  misc_feature (5)..(5): n equals a,t,g, or c
  misc_feature (8)..(8): n equals a,t,g, or c
  misc_feature (11)..(11): n equals a,t,g, or c
ccagnttnggngcttcccagcccggcgmcgtcgagctctgctgagggcttcaggtgtgcgaaggatcgatcgggaggagawgcgggagctgcaggcactgcgccaatcccgggaggattgtggctgtcactgcgataggatctgcgaccctgagacctgcagctgcakcctggcaggcatcaagtgccagatggaccacacagcattcccctgtggctgctgcagggagggctgtgagaaccccatgggccgtgtggaatttaatcaggcaagagttcagacccatttmatccacacactcacccgcctgcagttggaacaggaggctgagagctttagggagctggaggcccctgcccagggcagcccacccagccctggtgaggaggccctggtccctactttcccactggccaagccccccatgaacaatgagctgggagacaacagctgcagcagcgacatgactgattcttcyacagcatcttcatcagcatcgggcactagtgaggctcctgactgccccacccacccaggcctgcctggccctggcttccagcctggcgttgatgatgacagcctggcacgcatcttgagtttcagtgactctgacttcggtggggaggaggaggaagaggaggaagggagcgtggggaacctggacaacctcagctgcttccatccagctgacatctttggtactagtgaccctggtggcctggccagctggacccacagctattctggctgtagcttcacatcaggcrtcctggatgagaatgccaacctggatgccagctgcttcctaaatggtggccttgaagggtcaagggaaggcagccttcctggcacctcagtgccacccagcatggacgctggccggagtagctcagtggatctcagcttgtcttcttgtgactcctttgagttactccaggctctgccagattatagtctggggcctcactacacatcacagaaggtgtctgacagcctggacaacatcgaggcacctcacttccccctgcctggcctgtctccacctggggatgccagcagttgcttcctggagtccctcatgggcttctccgagccagccgccgaagccctagatccctttattgacagccagtttgaggacactgtcccagcatctctaatggagcctgtgccggtgtgaggaccaggatgtcttttcccagccccaagagacctgttgctgctttcttgtaattatggggctccccagagtctgcgtaacagtctcccactggctggctcacccacaggtgccatgtgcacactcctggttttcaaacaattctctggatttatttatttgttttaacttttctgtgctgaagagaggactagggggagggggcttcccctttcagctgcccggccccccacacccacagcttgctcttctatctccacaacgtgagcctggaagaggagaaaatgtggctcctctggagcttggcagaccacttttcggtctttgcgtgatgttccttagcccaaagacggtgagacagggctgaaatcaggtggcttctgccaccctgagccctagacccatgggtggctaaatccactggactgtgaagactataatttatttccataatttatttggagattgaggaggctttggttgcacttctttggctggtgggtaatgccaggggtggggtgggcacaggccctcaagagccccttttgccttgtagtcctacaccttgccctgcctgggctttggtgcagactaggtgtggatttgagctctgtgatctatgtctgctgcctggctcctagatggctctgygggcaggtgctggccaaggacatcatctaggcagggggagagcctgggctgaacagctgtgaccaaaactcccttctgccccaccctgccccctccacttcctgccctctgttccatcttcccccttcccaaaggccacagcctttattccaggcccagggatgtaggagggggaaggaggaaacaggaagcccagagagggcaaagggcctacctcggggcgcgaaccatgccccagactattatctcagggctttctgggcactgcacttcagcgtggcccacctgcccatgccctgaggccagttggcgaggggtggctcctgagggtttttataccctttgtttgctaatgtttaattttgcatcataatttctacattgtccctgagtgtcagaactataatttattccatttctctctgtgtctgtgccaagaaacgcaggctctgggcctgccccttgcccaggaggccttgccagcctgtgtgcttgtgggaacaccttgtacctgagcttacaggtaccaataaagaggctttatttttaaaaaaaaaaaaaaaaamaamaaaaaaaaaaaaaaaaaaaagggcggccgc

SEQ ID NO: 2070 - DNA, 1525 bp, Homo sapiens
  misc_feature (1499)..(1499): n equals a,t,g, or c
  misc_feature (1502)..(1502): n equals a,t,g, or c
gaattcggacgagcagttgaaaaacccttagtcactttgacacatctgctctttacactggtattttcttggtttaagtgacgacatactgaaatgactgggtcaaatcaacaaatcagatattgcaaaaccagtatttttccaaaaattgactgtatatataaagtcagccagtgctgcttcgtatttttagatagtaagtgcagaaatataacttcctcttctttctgtctctagtttttactgttgacctatccctatgctcctcaactggacgctagtctcttgtaggaaataaatctctttaagaaagatgaaagaagttgcaaactttgaaacaaaaatgggtggagtacaratctctgcagttacaggaacatcgtctgcttcatggtgatgcagctaattgccccagtttggaaaacatggacttggatgaattgtctttgtttggacccctgcctgggccaggcccagcccttgtggaccggaatcgattatccagtgagagcagctgtaagagctggctgagctccatgacgatggacagtgaagatggctaccagacgtgtgtgtctgaggactccagcaggggtgccttcagtcggcagacgagtacagatgatgagtgctttatccccaaggagggggatgattttctgaggaggtcatcttcaaggaggaaccggagcatcagtaacaccagcagcggatccatgtctcccttgtgggagggcaacttatcaagcatgtttgggaccctgccccggaagagcagaaagggaagtgtccgaaagcaactcttgaaatttatccctggccttcatcgtgctgtggaagaggaagaaagtcgcttttgacggattgtggtgtcctttcaaattagcttatttcacaaatatctctagactcacccagatcccagcttggtgggaaagtgcagaagaattgcaaaactgacatcccatttcacagcaatagtgacctttatttaaattgttgtgttatagtttatgcttcttaaatcatttttcaacctaaacagccaatttctaagcagacaggaaaactaaataataagttaattaatataacaaagatgcaggttcctgctcattccagtaatgtctttgaaagcaaaactaatatttattttctagattatccctgtgaataattgagaactttttggagtcaagtatgaataaaggtgtggcagaatataataatctggactattttctataggataattgctgggttataaaatcttaggtttgcttatgcccagtagctcctgcggaggcttaataataggcaattttgaatttgttcaaacctgtaatggcttgtaaacaaagatgaccatcagctgtttctcacatctatagtgacaataaagcgggaagtataagatttaataggaggggttaaggttcatgagaaccatggaaagatgtggtytgagatggggtgckgcaaagatcattaataaagtncantattatagacagtctaaaaaaaa

SEQ ID NO: 2071 - DNA, 2399 bp, Homo sapiens
ccctgctgagaatggatttgtttgtgttctataccttggtgtcatgaagtccgataattaatgtaaaattctcaatttcccgcctagcccaaaataagtactcagcaatgttggttgactgtgtcctatttaataatatttttatggcaccatgctccattaaactcagaacaatttgtagaagtcttctaatttatcttcgactatagattccagaactctttgacttacatttgactaagtaaaaagatgtctttctgcctctagaagacagtttttcctagaaacattgattctgatgcctaattttctttacccattaattcatggacttatttttattgtttttcacacatcctcacaatctttgccaggaacatggtgagcaggaatacttacctttcagggcagggagaaaggtcagagcctcaggtggcctctgagtgacctcagtgctagagctgtccacctgtttatactcctggctatcacacctttatcccatcacagaagcttacaaaaggagtaattattagagtttgctttgtaaagcctaattttggatttccatttaataattaaagctggttttagggaagcccctaaaccaacctgagttttcttgaaatactaacttgtgtcttgctgttatctgagtcacacttttatcctaatttttagatacggacggcctgaccctctgctccggagagaacacgacattcgcgtgagcctccggatggcctctgtgcagtatgtgcatactcagcgtttccaggcagaggtggtggccttcattcagcatttcactcagctgcaggatgtcttagggcgccagcgagctgctattgaggggcagacggtaggtagcctgggccctccaagctgcttttccagtttgactgatcagtagaacttttaggcctctagagatgaatctggaagagtaaaggtaagttatccttgctaatatgttctccgtgtagattagctacagacatctttgtgtaattgaagagctttgttccttatttattgtatctcacttaaattaccttcaaactttagctttcactttctgtaaaaaaagataagggaggtttacaaagaacacttaagacttctggtcccttttaggacttcagtggggatgtttctcttggaaagtggtaggttttttctaaatgcagtagatcagaagttctaaactgagttcgtggcccccgtggggtcctggtagtttattcatggcacatcctaggccaaaggaaacacctaatggtatttccgtttacaaagtaagtcagtctaaacaacaagtacatatgtcctaacaacttagtaggtgtttgaaaaaataataacacataaatggaaagaataatattttatttaattcttaagtaaccacaatgactggtaggaggtatgtgcctgttaggtattgcataacttctcaaacttggaatcaggttggacattacaaccctcacttcctgtccacatttatcttcttatggtacttgctttttctcacagcaaccgctgaagacccagcttcgcaaagataataccttactgaaaggagtatagaatgatctattattgaatgccaactaccacaagctactagttagtgcagtgtctggcagatgttgtttttccttcaaaaatttaaaatgtcctggcagccgggtgtggtggctcacgcctgtaaatcctagcactttgggaggccgaggcgggcagatcacgaggtccagagatcgagaccatcctggccaacatgacgaaaccccgtctttactaaaatacaaaaattagctgggcatggtggcacgtgcctgtagtcccagctattcgggaggctaaggcaggagaatcgcttgaacctgggaggcggaggttggagtgagccgaggtggcgccactgcactccagtctggcgacagagcgagactccgtctcaaaaaaaaaagtcctgacagctgcaagcctttgccaccctgtggtgtctcagtgcagtttgggaaccatagaaaataacaatgtacttttgtaacaacgtgttatttttcctttttttaaaaaaactttatggccaggcgtggtggctcacacctgtaatcccagcactttggggggcgaggcgggcaaatcacttgagctcaggaattcgtgaccagcctgggcaacatggtggaattctgtctctacaagaaatacagaaattagccgggtgtggtgaggcatgtgtctgtagtcccaggtacttgggaggctgaggtgggaggatggcttgagcccaggaggtggaggttgcagtgagctgagatcatgccacctgcacttcagccttggtgacagagccaccatgactcaaaaaaaaaaaaaaaaaa

SEQ ID NO: 2072 - DNA, 1709 bp, Homo sapiens
agcttataccagctgaatggcagccttgcctaatccacctacaacaagaatttcttaagctttcttttatttgcatgagagagccactaccaaggcatgttttgttatgctgaaactgggctgctgcatactgctaaatggcacctctgggattggcctacctggggatttcttggtttgtgaaaacaggagaggagaaatatctsatacaagtgaaaggatactggagagagaaattacccatttctaaaaaaaaaccacactctgtcgtatctgtgttaatgttttctagcatgtactctggtttcaacagacacaaatttatatgttaacccagttttcttgccgttctgtaagtgttttattcttagtgtgatttttttccattgggatgtttttgattgaacttgttcattttgttttgcttgggaggaaaataaacaattttacttttttcctttaggagcattatgagcattatgtcagaatagaatagaattggggttcgatcttaacaggccagaaatgcctgggttttwttggtttgtttttgtttttgtttttttatcaaatcctgcctgactgtctgcttgttttgcctaccatcgtgacatctccatggctgtaccaccttgtcgggtagcttatcagactgatgttgactgtyraatctcatggcaacaccagtcgatgggctgtctgacattttggtatctttcatctgaccatccatatccaatgttctcatttaaacattacccagcatcattgtttataatcagaaactctggtccttctgtctggtggcacttagagtcttttgtgccataatgcagcagtatggagggaggattttatggagaaatggggatagtcttcatgaccacaaataaataaaggaaaactaagctgcattgtgggttttgaaaaggttattatacttcttaacaattctttttttcagggacttttctagctgtatgactgttacttgaccttctttgaaaagcattcccaaaatgctctattttagatagattaacattaaccaacataattttttttagatcgagtcagcataaatttctaagtcagcctctagtcgtggttcatctctttcacctgcattttatttggtgtttgtctgaagaaaggaaagaggaaagcaaatacgaattgtactatttgtaccaaatctttgggattcattggcaaataatttcagtgtggtgtattattaaatagaaaaaaaaaattttgtttcctaggttgaaggtctaattgatacgtttgacttatgatgaccatttatgcactttcaaatgaatttgctttcaaaataaatgaagagcagctgtccttctttcctcttttaagtgttcagctgtggcatgctcagaggttcctgctggattccagctggagcggtgtgatacccttctttttcagctgttcgtgccttcctttcttgtatccaccaaagtggagacaaatacatgatctcaaagatacacagtacctacttaattccagctgatgggagaccaaagaatttgcaagtggatggtttggtatcactgtaaataaaaagagggcctgggaattcttgcgattccatctctactttgtataagtctcattttgtgccttacacatctgcagtatttatcatgttccaacttggtgactgtcaggcagtgcaatacatc

SEQ ID NO: 2073 - DNA, 2847 bp, Homo sapiens
  misc_feature (2734)..(2734): n equals a,t,g, or c
ggcacgagatgagctgcaaggtgcctttgacgagcacataggaccgctctgcactgactggcagaaggccgagcggggagacattctcctgagcagcctcatcagaaagaagctgcttcccgaggcctctctgctcatcaccacgagacctgtggccctggagaaactgcagcacttgctggaccatcctcggcatgtggagatcctgggtttctccgaggccaaaaggaaagagtacttcttcaagtacttctctgatgaggcccaagccagggcagccttcagtctgattcaggagaacgaggtcctcttcaccatgtgcttcatccccctggtctgctggatcgtgtgcactggactgaaacagcagatggagagtggcaagagccttgcccagacatccaagaccaccaccgcggtgtacgtcttcttcctttccagtttgctgcagccccggggagggagccaggagcacggcctctgcgcccacctctgggggctctgctctttggctgcagatggaatctggaaccagaaaatcctgtttgaggagtccgacctcaggaatcatggactgcagaaggcggatgtgtctgctttcctgaggatgaacctgttccaaaaggaagtggactgcgagaagttctacagcttcatccacatgactttccaggagttctttgccgccatgtactacctgctggaagaggaaaaggaaggaaggacgaacgttccagggagtcgtttgaagcttcccagccgagacgtgacagtccttctggaaaactatggcaaattcgaaaaggggtatttgatttttgttgtacgtttcctctttggcctggtaaaccaggagaggacctcctacttggagaagaaattaagttgcaagatctctcagcaaatcaggctggagctgctgaaatggattgaagtgaaagccaaagctaaaaagctgcagatccagcccagccagctggaattgttctactgtttgtacgagatgcaggaggaggacttcgtgcaaagggccatggactatttccccaagattgagatcaatctctccaccagaatggaccacatggtttcttccttttgcattgagaactgtcatcgggtggagtcactgtccctggggtttctccataacatgcccaaggaggaagaggaggaggaaaaggaaggccgacaccttgatatggtgcagtgtgtcctcccaagctcctctcatgctgcctgttctcatggattggtgaacagccacctcacttccagtttttgccggggcctcttttcagttctgagcaccagccagagtctaactgaattggacctcagtgacaattctctgggggacccagggatgagagtgttgtgtgaaacgctccagcatcctggctgtaacattcggagattgtggttggggcgctgtggcctctcgcatgagtgctgcttcgacatctccttggtcctcagcagcaaccagaagctggtggagctggacctgagtgacaacgccctcggtgacttcggaatcagacttctgtgtgtgggactgaagcacctgttgtgcaatctgaagaagctctggttggtcagctgctgcctcacatcagcatgttgtcaggatcttgcatcagtattgagcaccagccattccctgaccagactctatgtgggggagaatgccttgggagactcaggagtcgcaattttatgtgaaaaagccaagaatccacagtgtaacctgcagaaactggggttggtgaattctggccttacgtcagtctgttgttcagctttgtcctcggtactcagcactaatcagaatctcacgcacctttacctgcgaggcaacactctcggagacaaggggatcaaactactctgtgagggactcttgcaccccgactgcaagcttcaggtgttggaattagacaactgcaacctcacgtcacactgctgctgggatctttccacacttctgacctccagccagagcctgcgaaagctgagcctgggcaacaatgacctgggcgacctgggggtcatgatgttctgtgaagtgctgaaacagcagagctgcctcctgcagaacctggggttgtctgaaatgtatttcaattatgagacaaaaagtgcgttagaaacacttcaagaagaaaagcctgagctgaccgtcgtctttgagccttcttggtaggagtggaaacggggctgccagacgccagtgttctccggtccctccagctgggggccctcaggtggagagagctgcgatccatccaggccaagaccacagctctgtgatccttccggtggagtgtcggagaagagagcttgccgacgatgccttcctgtgcagagcttgggcatctcctttacgccagggtgaggaagacaccaggacaatgacagcatcgggtgttgttctcatcacagcgcctcagttagaggatgttcctcttggtgacctcatgtaattagctcattcaataaagcactttctttatttttctcttctctgtctaactttctttttcctatcttttttcttctttgttctgtttacttttgctcatatcatcattcccgctatctttctattaactgaccataacacagaactagttgactatatattatgttgaaattttatggcagctatttatttatttaaattttttgtaacagttttgttttctaataagaaaaatccatgctttttgtngctggttgaaaattcaggaatatgtaaaactttttggtatttaattaaattgattccttttcttaattttaaaaaaaaaaaaaaaaaaaaaaaaaaaaaaaaaaaaaaaaaaa

SEQ ID NO: 2074 - DNA, 2661 bp, Homo sapiens
ggcacgagcacaggctcctcgtggctgggggtgctgagagctgaggcttggggagctggaggctctgcgcggatggtgctttttaatggatctgagtgttcctcgtgactgcatggctgtgaaatatttaaatggttctgcagagctcagaaaaaaagggaattcttcctcctgcccagaggccaacacagttagcctgggcttgtgtgtctgtttatgtacgtgtgcatatgtatgtatgtgcatgtgtatttgtgtgtgcgtattgtgtgcacatgtgtgtctcacgtctatgtgtgtctttctgggggatgtgtgtttctgtgcttttgtgactaggaacacgcacatatatgtgtagatgcccccagaaggtggaaatcctcacggggtctgcacttggccttctcccagcaccaagtcctgggatggagacccgaatgagcataagggtggccttgaaggaaggcactttggcacttgaggtttgtgaaacttaggagcacatgcccactgtggccagcagcccctgggacactgcaccttgcggagcacacgtgtgatggggtgtggcccactgggcagcttcgcaagagcagaactggagacgacctcagtgccaggcacaggcccttgtgtccgggctgtcctcacccagaccctgggcagcctgggaggaagcccctaagtggacagtggtgggacagggacacacagtccgggaggtggctctgggcaaacctcctccaagctgcaatctgctggtctgtagaatgggagaggaacacagcctctcacttggtgagtgccctggctgtgctggggcctgggggaatcccagggagtgcagcgtcaggcccagggtgggagaggcaaagtagacaccccatagaggcttcggggtatgcatggagtgacccgagagcacaccagggccccagggacagcgctgctgggtggcccaggtaaaggcggctgtccctgtgcgcacatgtgtccacgtgaacttgctacttagagagcagctgatgctgaaggcaggttgttggaattcccaggcccaggtgtaagcagcagagcccaccagtgtcccctgacgcccactctcttcctcctgggcacataattttagatgaaactgaaaaacacgcagcatgaaagcaaggcccctgccctctgctggttctgtattggctgcctcgtgtatttttccagcctgcagaaagtcgaggcctggatggataccatgtccacccctccctgtggccctgcggcaccccggcctcccggcctgcatctttcatgagtctggaaacaggatctcccagagagggccccaggaggttggctgccagcagtgggttctcacagctgcctccaagcaggtgaccagtcctgggaggctgtggtctagggcctggcaactcaggggcgcctgtggacaaagggccgggccaaggggctggcaggtttgtcctgagtgactgaagagggccccaccagggcagcttgagaggggcagactcttgctccagagaaagaggaagtttggtacttagcttggaatgaagggccagccctagagaggaccttcctgtggcaggagagagggccatgtcctgccaggggaagtcctgggaggcttcctggaagcagtggcctctgtgtggggccttggagcttgagagtgtctggcaccagggaaaggcattgggggcttcgagagaactgcagggggccctgaccagataggcccctaaggcaaagaggattccatcagaactcgcattcccattttattactctgggaagtaatgtggaagctaagctccactgtatgtcgtatgctgaggcatctgttgagcctctgctgtgtcggggccgggctctgggtggcccacctcagtgaagtcttgctgctaatggccgaatagttctgcaaggcctgtgctgaggcctggagccggcccgctggggctggaggcacgggcccatcaacgtgaaccattacgccagcaagaagagcgcagccgagagcatgctggacatcgcgctgctgatggccaacgcgtcccagctgaaggccgtcgtggaacagggccccagttcgccttctatgtgcccctggtggtcctcatctccatctcccttgtgctgcagatcggcgtgggggtgctgtcatcttccttggtaggtccccaggtgggggcagccaggccacctgctcaccttgctggcatctgctcgcatcgcctgggacaggtgcccaccaccttgcacacttggctctcaggagctgccgattcctggccctcatcacccagacatgcagtccaggaagtggcaccccccctccccccaccctgcactttggtttttgttttgttttgttttgttttttgaaacaaggtccccctctgtcacccaggctggaatgcagtggcgcagtctcggctcactgcaagctgcatctcctgggctcaagcgatcctcccacctcagctcccagctctcaggaggctgaggtaggagaattgcttgaacctggcagggcagaggttgcagcaagccgagatcacgccactgctctccagcctgggtgagactgtctcaaaaaaaaaaaaaaaaaagaaagaaagtaagaaaaaaaaaaaaaaaaaa

SEQ ID NO: 2075 - DNA, 994 bp, Homo sapiens
ggcacgagtttttttctttttatttgagaaaagggggggttgagagtagagtgggaatggcaagaagtagtatgacagagcttcttctctttttttcccctctttaccaggaagttaactagaagtcctcatgcatgtttttaaaacaaagttggtaattagcataacctagttagttacctttacacagagtgacagaattaaaaagttgacaagcccatcagacctcagccaggaggtactgaaaggagggagaccagtgagtctagaccaataggtgggttaggcctcctgaatgccagcctagaagtttagacttgattctataggctctggggtacctacaagtttgtagtcggagccttgggaattgaatgttacataggaactttcactggttccagctagccttggctgttagcaattatttttatctactttaacaggggggacagagtaggggggcaggaaactaagctggcattatggtcacaggaaagaacagactgatttggagcctttcaaactgcagacctttgttactgaccgatgcttaatttggtttctgggttttgttagttttttcccctgcccttacctcatttaccttaacgacagctccccccctctagagctcagctagggcaggctgccactgcggattggggggccaagaggcccagggcaagaagaaagtgggttgaaagcagagttctgtttaaagaattttctgctggaaactagcccagagggagtaaagaggaactttaatgaggagcagctgcagtgccgacgcaacccacatgagacttttttttccccttcgttccacattctgtatagtttttttaaaaatcatgactttgaaatagctgttttgtaaagcatgcctctctttttcttcttgtatgtggtggggttttgctttgttgttgttgtttttttttgaatggccaaatcctcgttttaaaaaaaaaaaaaaaaaaaaaaaaaa

SEQ ID NO: 2076 - DNA, 793 bp, Homo sapiens
gaaccagtttttttctgactgcctccagcatgagctgaatttccgtctgtgcagttatcctcagccaattgaaaatcacctggagttgtattccaagcacaaaagaaggtcagagagtggaggcccgatgatcatgatcgccctgtctccagggcctaggctggaaggagtcctgcagcctttgtggctcaggaccagagagctgaccttgaccctgaccttgtgatcccaggcatcagtggctggaaattcctttcattttattgttgagcccagaagcgcccagctctctttggcaaggttaagctagggtaagaggcactgttactagagtgaccagagttctttaagcgtcgctctgctattactcagttaaccttattaataccctgcctggccaacacagtgaaaccctgtctctactaaaaatacaaaaattagctgggcatggtggcaggcgcctgtaatcccagctactcgggaggctgaggcaggagaatcgcttgaacccaggaggcagaggttgcaatgagccgagattgcactactgcactccagcctgggcaacagagctagactctgtctcaaaaaaaaaaaaaaaaaaaaatttttaaatataattcacataacataaatgtaattatttggcctggtcctggtgactcacaactggattcccatcactttgggagactgaggcaggaggattgcttgaggctgggagtttgagaccagtttgggcaacagagcaagaccctgtttctttaaaaaaaaaaaaaaaaaaaaactcgag

SEQ ID NO: 2077 - DNA, 1482 bp, Homo sapiens
gtttttattttgttgtagagatgggacctcagtatgttgccacggctgaccttgaactcctgcactcaagggattttcctgccctggcctcccaaagtattggtattacaggcatgagccattgtgcccaccgtctctggttcttaaccttctgcctccctcttccagttttaaagaatgcttgtaattacatgggctctcctagatactccaggataatcttgttttaaggtcagctgatgagcaacattaattttatctgcactcttaattcccccttcctatgtaattgtgctgtgtaacataggacatgagcaattggtggcggtgggggttattactttggccaccacagtaactattttatgccaggtactcagctaagcactggtgaattaagcatgaataacacacactccctaatctccatccattcatgggaggagcacytcacctgccatgctcctgagaatctcgggagtcagagaagtcttctatgaggaggtgatgccaaagcggacaagtgacagaggagtcgaagctagctaggmagagagtagaggtttaaggggaagcataktataagcagaggatattacccacttcagagactcccagaggagaaagagtgtgcgttsaaggggcagatgaggctcagttggactccatagcagatgwaatggagaggggcaagcagtgaggctgccttgcaaggcagggcagagcaggggctgttaaggagtttggacttaatccctgaggcaaggagaagtgatgtaaatgggggagtaacatgatgagattcatggattagagacatggctcaggctgctgtagagaaggtgccagggagagcagatggctcaatgggtgtgcaggagacctctcactgagtttagggagaggtttgtaaaacagaagaagtttgagtaatttaaatgatgatgggaaggagctaaaagtgggggataggttaaagatacaggaaaaaagaaagaaaagaaaaattccatatctgagtgtttactcctgagtttttgagattgctattaagatcgtgctctactgtgatgatttgggtttgtttgataatcagaaaaaagcatattcttttgggtgttcagccacactgctttggtgtcacaactgcacattggtttcacagctgcaggagcaagttcgagcatcttaaaatgattcaacaggaggagataaggaagctcgaggaagagaaaaaaacamctggaaggagaaatcatagatttttataaaatgaaaagctkcctctgaagcactgcagactcagctgagcacygatacaaagaaagacaamcatcgtaagaagcaatagtttctcttactattctgagagccttatcattctacatcccatcttcctgtgagwttgtctttgtagcatttaactctaattgcagttctcwttttaaaaaytggcttgcttattgtatattttccccaact

SEQ ID NO: 2078 - DNA, 1336 bp, Homo sapiens
  misc_feature (221)..(221): n equals a,t,g, or c
gggcacacgttgtacgtgctgacgtagccgggctttccagcgggtatattaggatccgtggccgcgcggtgcgctccagagccgcagttctcccgtgagagggccttcgcggtggaacaaacactcgcttagcagcggaagactccgagttctcggtactcttcagggatgagtcatgtggcagtggaaaatgcgctcgggctggaccagcagtttgctgncctagacctgaactcttcagataatcagagtggaggaagtacagccagcaaagggcgctatattcctcctcatttaaggaaccgagaagctactaaaggtttctacgataaagacagttcagggtggagttctagcaaagataaggatgcgtatagcagttttggatctcgtagtgattcaagagggaagtctagcttcttcagtgatcgtggaagtggatcaaggggaaggtttgatgatcgtggacggagtgattacgatggcattggcagccgtggtgacagaagtggctttggcaaatttgaacgtggtggaaacagtcgctggtgtgacaaatcagatgaagatgattggtcaaaaccactcccaccaagtgaacgcttggaacagtaagtttttgaagtgtatgttacttgtgatgaagccttactagctagtataacaaatgaacttatccattttttgatttgagggaactcttttctggaggcaacactgggattaattttgagaaatacgatgacattccagttgaggcaacaggcaacaactgtcctccacatattgaaagtttcagtgatgttgagatgggagaaattatcatgggaaacattgagcttactcgttatactcgcccaactccagtgcaaaagcatgctattcctattatcaaagagaaaagagacttgatggcttgtgcccaaacagggtctggaaaaactgcagcatttctgttgcccatcttgagtcagatttattcagatggtccaggcgaggctttgagggccatgaaggaaaatgaaagataaaagaaaaaataatccaaatgtctgtcactagcggactagttaaaaaagcattgcaagctgggcacagtagcattcacctgtgaatacactctactccactctgggtaacatgaggaggcctccctaccttcctaagaaaacccaaacaagcactgcatatctacacggctgagtctacaaacatttaacacaaaagaagaaagacataggaaactcttgatattccctcatgggatggtctccatgatacattgttaagaagaaataaagcaaggtgtagaaaaaaaaaaaaaaaaaaactcgag

SEQ ID NO: 2079 - DNA, 2253 bp, Homo sapiens
gacacgagcctacactgacagcccctactcttgccctgcttctgctgccgaaaatttcctgcctcctgacttctacccaccctcggacccagggcagccgtgcccatttccccagggcatggaggaccccccagacacccagttctatgtaggatcttctctgccacaggctggaccctggagagtttctgcacccccttcaggacccccacagttccccgctgtggtccctggaccatcgctggaggtggcccgagctcacatgctggctttggggccacagcagctgctggcccaggatgaggagggggacacgctccttcacctgtttgcggctcgggggctgcgctgggcggcatatgctgcggctgaggtgctccaggtgtaccggcgtcttgacattcgtgagcataagggcaagacccctctcctggtggcggctgctgccaaccagcccctgattgtggaggatctgttgaacctgggagcagagcccaatgccgctgaccatcagggacgttcggtcttgcacgtggccgctacctacgggctcccaggagttctcttggtatggccagctggcaggcaggggtttgtctggggggtagactggttgcccagattttggcttccagggccaggaggccaggggatacccttacccagcagtctgccttctcttcctcccaggctggcttaactctggggtccaggttgacctggaagccagagacttcgaagggtaaagttgggtgtggcaaggggctgggtgtgggttggggtggcttggccaaggtgggtgcagatgcgggtccctcactgtctccattctgcaggcctcaccccgctccacacggccattctggcccttaacgttgctatgcgcccttccgacctctgtccccgggtgctgagcacacaggcccgagacaggctggattgtgtccacatgttgctgcaaatgggtgctaatcacaccagccaggagatcaagagcaccaagacagttctgcacttggccgtgcaggctgccaaccccactctggttcagctgctgctggagctgccccggggagacctgcggacctttgtcaacatgaaggcccacgggaacacagccctccacatggcggctgccctgccccctgggccggcccaggaggccatcgtgcggcacctgttggcagctggggcggaccccacactgcgcaacctggagaatgagcagcccgttcacctgctgcggcccgggccgggccctgaggggctccggcagctgttgaagaggagccgtgtggcgccgccaggcctgtcctcttaggactcaaacccagaccctggactgattttccagtccccaccgtcctgcgggacagccagcgtatgctaatgttgcaaacccatgataatgtatgtggaatatcctgccattggggttttacgttaaaaccccagaatggctgcagaggggtgaacaggccccaatatttggggtgctgtgatacccctcttctacccacaaggagccctcttgatgatttctgtgaaatcgaggccccttgattgtttctgtgaaacaccctgcacccctagtcctttccccactgagatctttcgggttctctcccctaactcagctcttcgttcccagaaacccagatgtaatccccctacgtggtgcttggggcatcccgataccatctcagtaaatctcctacaatggcctcctcaccctccccgggacccacacccttcaggtcctcaccctgagacaggagggaccctctgagatcagggacccttaggtctcactgctctctgattcagagctcagctgggcccccagttccagaccccagcattcccggtcactccctccctaatctgagcatcactcaagctctttattaaactcaatttgggccagatttggtggctcatgcctgtaatcctaacactctgggaggccgaggcgggcggatcacttgaggtgaggagtttgagaccagcctggccaacatggtgaaaccctgtctccactaaaaatacaaaaacaattggctggacatggtggcatgcgcctgtagtcccagctacttgggaggctgaggcagaagaattgattgaacccaggaggcggaggttgtcagtgagccgagattgtgccactgcactccagcctaggtgacaaagagagactctgtctcaaaaaaaaaaaaaaaaaaaaaaaaaaaaaaaaaaaaaaaaaaaaaa

SEQ ID NO: 2080 - DNA, 1481 bp, Homo sapiens
ggcatcaaccccgtggtcccaggggagacctccgctgaggctcgccccgagactcgagcccagcccagcagccccctggaagggcaggccgaaggtagagaccactggttcgcaggaggccccaggaggtggacacagcccctcccctcctgaccagcagcccatctacttcagagagttccgcttcacgtctgaggtccccatctggctggattaccatggcaagcacgtcacgatggaccaggtgggcacttttgctggcctcctcatcggcctggcccaactcaactgctccgagctgaagctaaagcggctctgttgcaggcacgggctcctgggtgtggacaaggtgctgggctatgccctcaacgagtggctgcaggacatccgcaagaaccagctgcccggcctgctgggaggcgtgggccccatgcactcggttgtccagctcttccaagggttccgggacctgctgtggctgcccattgagcagtacaggaaggatggccgcctcatgcgggggctgcagcgaggggctgcctcctttggctcatccacagcctctgccgccctggaactcagcaaccggttggtacaggctatccaggccacagctgagaccgtgtatgacatcctgtccccggcagcccccgtctcccgctccctgcaggataagcgctctgcgcggaggctgcgcaggggccagcagcctgccgacctgcgggagggtgtggccaaggcctacgacacagtgcgagagggcatcttggatacagctcagaccatctgtgacgtggcatcgcggggccatgagcagaaggggctgacgggcgccgtggggggcgtgatccgcagctgccccgactgtggtgaagcgtcatcctggcacggaggccacgtcagctgctcgggggcatgcgcaaccagattgtcccgacgccacaaggaccacgcctcaagtggcgctcggacagtgcccaagactgagcctggggtgcccggcacccagagggtgctgcccaccatgctcctgagcctcccaagagctgcagcccacgggcccggcccggcctggcccttcaggggatggccactgtgaaggacgccttcccagcctgcccgttgccaatctgctgtgagaggggggcctccctgccttggggccttagccctggctctgcacttttcctccggggagaaaggacactgcccctcccccgacctgggcccacactgctgccttctcccaggacggaggcttttggaccctcggaccccatcccactcagccaagtgtctttctgtgtctggggggaggaggggatgatatccgtgtggttcgatgtattatttttaagctccgtgagtgcgtgggtcagtgtctgcatgaagtggaataaactgcccaccgccaaaaaaaaaaaaaaaaaaaaaaaaaaaaaaaaaaaaaaaaaaaaaaaaaaaaaaaaaaaaaaaaaaaa

SEQ ID NO: 2081 - DNA, 1268 bp, Homo sapiens
tacacaaactcttaagaaaacaaatattgatatccaaaacattttaataattacattgaaattttctattgcagaaactgtgtttccaatctaaattattaattaatcctaaccctttcctgctctgggtttgtgtttttgaattcagtacatcatcttacagtttttgcttttgttaaaatactggaaataattttgaggaagaaaagaaaataagaagtgatatgtcaccttctaaattgtctttcctaacttagaagcaaattcgaatgtctctagtatggcttttctctccttatttcccctatcatcccttttctcacacttctctttatttaaaacttgtcttcaaagcacacaaaatagagtcgataagagtctatccagccctgatttctcttggccaaggaatgaaaggctgttctctaaaccttgataggtaaggaatagccccctgtccacctccatcttagtctgtattgctgtaaaggaatacctgaggctggggatttataaagaaaaaaggtttatttggctcatgattttgatatctgtaaaagttcaagattggacattgacatctggcaagggccacaggctgcttccactcatggccgaaggcaaagaggagccagcattgcaaagatcccatgatgagagaggaagcaagagagagaggggaggtggcagactctttttaacaaccagttttctcaggggctaaaagagtaagaactcactcacctgccatccttacccccacagcccccaggatttctctattcatgagggatctgcccccatgacccagacccctcccattaggccccacctccaacattggggatcaaattttaaaatcagagttggaggcgacaagtatccaaactatagcacccacaaaccatctagtttatcttattattataacctgtcatcctaaaagttctcaaaatctggctgggcgcagtggctcacgcctgtaatctcaacattttgggaggccaaggtgggtggatcacttgaggtcaggagtttgagaccaacctggccaacgtgatgaaaccctgtctctactaagaatacaaaaattagccaggcatgatggtgggtgcttgtaatcccagctactctggaggctgaggcaggagaatcgcttgaacctaggagatggaggttgcatgagccaagatcacaccactgcactccagcctgggcaagcgtgagactttgtctcaaaaaaaaaaaaaaaaaaaaaaaaactcgag

SEQ ID NO: 2082 - DNA, 1637 bp, Homo sapiens
tctgcctcccaaagtgctgggattataggcgtgagcaccatatctgttctactgtgaacattttaatgtgtttttttggactttttctaaatacatgcaaatattatgtatgtaggtatgtctgagttttttgggttttgttttgtttttacaaaaatgagatttcaatgttctctttacttgtcaaaatgtgtgtgcagatgacagttggaagagatgccagatgtaaatttacctccctcccctccctctgaggcttgcttgccccatgctgtggttctgtgtgacctcatggacaggagagatttctgtggcattcaggcaatgcagcagggtctggccactgacacaacaaacttgtggttttcaaatacaagtcatacagccaagacacagtgcttgggtttcagggcctggcatagtccagtgtctgattgatttttaaccagctagtgaataaatttgtaataaatgatccagctgaagatctcaatgatttaactgcaatgaaattgcaawgaaacttcccagkggctaaaattttgtgkttcacatttgcaytgctgttagcacaaaagktaattatgatgtgtgtgaaaaatgktagtctgattagttgttcacacacacaaaggagtgcttttcacacatcttaattgcttttctgctaaagaaagtgtaactgcaagtcataaaattataacagcctctaacacgttaattccatttcatcagcggatgatgtatcttgaattttggtgaaaagtgactttagaactcatattgatgaggaaagttgaggttaagatactgctctcatagaagacaattataaaaaattatagttcatactcataaatacacacgtctctgtacagaagtatcgtgaattactattttgggatagtgtcttaggttttactttcttgcatttcgttacccacatggaccagtagattaacagaaaatatggccccagaaagaaagaggatacaggctaaagaagtaaatcaaagaactcgatagcttttctgaaggctaaggtagagaaaatcatcttgaaattcaacacttagaagagaagaaagggttttaaagctgcataaaactaagaagaacctgaaacaggcagaacaccagagtttctatcagagagtaggtaaaatggctagttttttcaccactaagaaaggagataaaagtttctccagcttaaaggagggagggattaaaagagacctgattagtgtctacatgctgcttgcatcccagagatgggcagcaggaaccccaaaaagctttaagaagatggagaatatggggagttttgtttctattctcattgtatagccaggggaaactgcaagtctttcagagaaatgccttgtccagcacagtggatgaggaaagatctgagtgggtggaactgagaggagcctcacccctatgtcagaggcagaggcgtttaaaccatagcaactccatcttgaataggggctgggtaaaataaggctgaggcaggagaattgcttgaacctgggaggccgaagttgcagtgagccaagattttgccactgcattccagcccgggcaacagagtgagactccttctcaaaaaaaaaaaaaaaaaactcgta

SEQ ID NO: 2083 - DNA, 2127 bp, Homo sapiens
ggcacgaggaggaaggcagggtgggctcccgcacgggaggagggccccgctcaggccattggctgtctcctcgctgaaggtggacggcagatgccccaggcctagcctttaaccctaaccgagatgctcagagcagctttaaaggtcagcctctccctggcccaggatggtactcggtacgtcctgacttccctggaattgccacttgcctttgtcatgggtactaggttgggtgatttctgctgatcctgagctttgcttgctctgccccaccaccaacctggtagatgccaggggaccggccattgcggggtccaggacaaggcagagcgaggaaagcagagcacgtacctcctgactccagggcgtaatctgccagcccgatgcggtcctcactgtatcgctgcagggcctgcttcacgatgtggtgcacctgctgcaatgcaggcaccaggagacggttgcagcagggagcagacgtgtccccctgtcacctcgtggccgtgggccaaggacccatgggctgaccccttctaggcttgcactgtgctggtgcccaggcagatgtgggcacactgccacccacccatgccagccccacagcatgcaaagcctcctgcttggcacttccatcctggaacctgccagggtagctggcagtgtgggactgtccagggctcccagggaggagagctgtgggtgggtgtgtggagggggcatgtgggcctcacctcctctgtcactccaatcacaccttctttctgcagcgtcaggctcagggaggccgcggcttccctggccgacttgccctgcatctctgccacatgggtgaggatcttgctctccagctctcgcagctgagcttgcatctcctctctctgaaggagccccacgcggccccctccacctcgggcaaggaactgactgatccaggccgggaactgagattccacctataggaacccaaaggggtgtcaccctggggggcttgcagggacagcaggagctgctatgacagggctagtgcttagctggatagcagggatagggtaggagggaggccactggaggaaagagttatgaacactccatgggcactaacaaaaacaggaagaacgcctgtcagtgagagcccacatgtgtcaaggccaacgccacagtctcttgggcataacagaggctgcaggggcaaggggtgctgctttgcaggccccaggacacgtcgtctcaaaggaggaggagagggaccagcagggccctggtggttcccactcacgtcgtcccgcacggcctggatctgctggggcagcaggcccacttcttccgccaccgagctctgcttcagtgccagagccgccagctcctgctgcaggccggccagctggtcctccagccgcctcagctccttcacagagctctcctggaaggactcctgggtcatgctggtcccagagagagaagagtaagcctcggatctctttggtgggaggtaaggccacaccaaagatgaaagaggaccccctagtgggctcccgtcaggagagcgggtgcccagcactcattgtgaacctgagaaggggcaaggcctctcctgggggttctggctgcagaacccctgcctgtcccaaggagctaattctgagcctgctccctttctaagcccagagtccagaatgtactctgcctcagcctctcacatccctccacaagcatggacatctggggcatgagaaggcagttatgtgaggctgtaagaaaggatgctgtgtctataaatgaatcccggtcctctcacacagcctgccccccgccctcaggacccccctgctaacctccatggcacctcaaagacaggccctgggcaggggtcctgagctgggtttcaacccctccccctaccatctgcttggcaagatgatcagaactctctgctctgcggctctgctccccagtcctgcctggagagtgggtggggctggggaggagcaggccgaggccagctggtggcgtcccagtacctttgccactctgacttcagctgctggatgcgagcctcggactcctgtgtaggaagaagggacaaatacaagaaatactcatctcagaaaaaaaaaaaaaaaaaaaaaa

SEQ ID NO: 2084 - DNA, 1551 bp, Homo sapiens
ggcacgagcctgcctcagcttcccaaggctcactgtgctgtgcaaatattaactcattatcctcataacaaccccatgaatttagtactttgtgatctacattttacagacaggaaactgtcagagtcagaatttgaaatcaggtgttctggctcccaagtccatgctgtgaacctctgtatctgccgcttctgatgtgtgggtatcctagctcctcagaaaattgttctacagtagaagtcccaggaaagccctcagggtgtcccaaaactcctgaaattctatggcaaaatgttgtgtgtacatttttcagcaagagagtcagtggctttcctctgtttgtccaaagggtctacagtgcagaacagtttagcaccacttacctagaggacctttttgtgtcctttccattgttaaaaggctcctgttggcataaggattcttttggaagaacaagatgtttacaaacccattcagacttcttagataacaatgttctaaattaattgcttatccggttgatcttcctgggaactttttcccaaatatttatgccaggtcccagattcagagattgtaattatttcatgyagggtagggcctggcatctgttttgaaaagcctttccagatgattctgatacaggtcttcagttaagaaccactaatattatcctctagagaatggggatactactttatagtcaaagataatcacttgcatttcacatgagacctttacatgacccaccattagcctacccccatcaccccagttttcacttttttttttttgaggcagttcactcttgtcacccagsccagagtgcaatggcacaatctcggctcactgcaacctctgcctcccgggttcaagtgattctcctggcctctaaattctagatctccaaatctggcttctagggtttgggatcagggaatgaggatttgtccaaaggcatggggtgggaaaaaagactgtttgtttacaagaggtaagatgtcaggaagcagcaatgtgcttacaccactgaggtaggtgtgccctttcagggggggagtttccattctggggatccccattctgaggtttcccagaaggggacagttttcaagcccactttcctgacggttgcatcttgtcgcaggtttcatctcacctttgtcttgctgcccgcaatctctggcttggtcagctcaggaaacccctggtgccagagatccggatgaagatgagggactagttcggcctgttgcggtatctcagcggggtgagacgcctcggtggggaaggcagagtggaaaacccgacgccttccaccagcaactcttgtgaatatgtgtgtgttggggttatgtggctagccaggagtggagatggatagtgtggtctgcagaggatgcattttggagctgacagagctgagtttgagccctggttctgccagtgctggctaggctgtgcacccctgggcaagggtcttcacctctctgggctcatgtcttcagttataaaactggaaaataaaaaaaaaaaaaaaaaaaactcgag

SEQ ID NO: 2085 - DNA, 874 bp, Homo sapiens
ctgcaggctcatacacagtggagctgacctggctgtgctaggttcttggaagtcctggctgaactcagagaactggttcttgggccatgccgggggtgcaggcaagtaagcctgcatgtgggtgaaaggtagccccagcagcaaggctgtaaggaaaagagggaatgagcacttagtgtacacctaccgtgtgccacaccccctccatatgttgcctcattctggccactccgcagcctctggtggtgcctcatgcccactttgcagaggatgagccacaggttctgatcaggtgctggaacaaaccacccttsttaagtgagtcccccacgaacttagaatttgagactcactcattggccaggctcaatggcctctgttctgctatcaagaggctgctgggatgttacccatggcagggatagatggggaagtcaccatattcaaaacaatcatgtgttgaaacacctccccagcttctgatctaccggyagtggyagcggaagcaaayacagcaaatctgaaacccgatgcctacagaacaggggtgtgaaatgtgacgccagaggcccccacacagaagtgggtgtggacagccacctgcctgtgagcaaccaggggaagctagcttggtgccgagtttacacagtgaatgttaaaaagacttcgaagctggccccagtgtattcgcacacagttgagaaaggccagggaggataacaagggctagaatatagggtcagctccctacagttgctgtaaccccctgggcagctccctttacttctctgagcttcagtgacctcctctgtaagtgaggataacatttcccagagtgaggattaaataaaaaaaaaaaaaaaaaaaactcgag

SEQ ID NO: 2086 - DNA, 942 bp, Homo sapiens
ggcacgagaccatgtctgccctcccctctcccctctgccccttctgctctgtgctccttctcccgagtcccccagcccgtgtccctggcctctgtcttctctttctctccctcccacccctaacacctccctccactgtgggaacctgtaaaccccagggttgtgccccttcatggtcccccatccacccccgcaatgtctcatgctcgatatacaaaggccatggtgactttgggtgacatttgggtgctgtggagctcagggtggaaatttccttccggccttgtgatttcaaccctcctcccccacacatgcttggggctgttttgagcacagcaggttgccagctccatccacctcccggtaacctatccgagtagttggagttagggagaaccaggctggggtgagggcatcagcaggccccctgcagcaacagcagcagcaactctcattttctgagggggctacttactgtatgccagtcccttcatattcatctcagcaaacccaccgtaccgtgcctccccaaccagttagaaactcagttgcccacaggggctgggcaggaaggtgaggcaaacttgggctgtccttggccggatctcctgcatctggctcccaagggaagccataaatccagatttttaaatgtaaacgcctgaattttaaatgttggtaatcaattcacttaaaaacatcaccaccaccaccaccaccaccaccaacaaaaaaacccgtagacttgtccctgttacaggcactaggaacacagcagggaacaatcaaaaagtccctggtctggccaggcaaggtggctcatgcctgtaatctcagtacttcaggaggccaaggcaggaggatcacttgagcccaggagttcgagactagcctgggcaacatagcaagacccccgtctctactaaaaaaaaaaaaaaaaaa

SEQ ID NO: 2087 - DNA, 1124 bp, Homo sapiens
aaaattataattgaaaacaaaatctgacattctctgctaagtcttatctgaatgcttcagataatggtagtgtagtcagtgactaaaatatttttatcaaatttcctctctgtagacgcctgcaggtattgacgtctgtcagatctcgtcacattggctggtgccgcagctgttggagagtatttttctttatgattattttagaaaaaaaattttcttttccacaatgtggttctcttagaagaatgacgtatcttcttttcctcagcgagttggacacattgtgcccagggcagccctgtccttgggcagcgaccgcacaccaaagctgggaggaggctggtccggggggcctgggcagaagacagtgatttgcaggggtggctcccagacaccctgcccagggatgggctgggcaccacctgggggcggagcgtgagctccagacgagctcctgcgtgcgcgtgtgagtktgtctgcgcccagccatgtgacccygctcgtcccgtctgaaggactctcctaggaggccaggttgcccctccagaccsctcccaacgtcagggggaaggaaacgttgactttcactgcactttgattcgtctctaaaccatttgctggggattcctgagagcagagctcccagcgggccctgcctcccaagtcccgccgcaaggctacctcgggtgtgtggatgtgcgagggcctcccccgcttgcgaaggggacatgcgtgctggaacctgtcggaactccatgccttcctcgcctgctcacctgctcgacgctggaatcgggacaggtgcaaagggacgcagacgtctgggacagctaaggcccgtgtcaccggarggctccgcacagtcgttctggtttcaacgaataagcaaaactcgggcaagtactgcagctatttggaaatgttttccaaaccacagtctctttagaactaagcctatttgaaacggtcggtgtaggcttactgagatcaggagacagggaggccccgcacatcacacagataaagtcagacaattgtaattaatacttttgctgcctcaagttgttttttaaataaagtactttgaaatgcatgagaaaaaaaaaaaaaaaaaaaaaactcga

SEQ ID NO: 2088 - DNA, 1170 bp, Homo sapiens
gctcctgggcctcacaaagtgttgggattacaggtatgagccacggcacctggcctggtctcttaactggttccctaagacagctggaaatagagaatgtcatggagcattcctaaccatgggctccagcctggctttcattctgtttctcccctgaaacaacattcctttagtaatattccgaataacagcttcatcagtctgtctaccgaccactcttcaggcttcatcttatatgacctcccaaactgcactaagggttgtattagagaaaagtggataaagttcggagtcaggctgcttgagcttaaatgccagcttcacttaccagccacctgaccatgagtcagctgcttaaccattctttgccacagtttccttgtctatgaaaagggaaatggctcccacctcaaaaagttgttaacattaaattcaatcatgtattcaaagtcctgagcagaatgtctggccatgactgggacttaacagatgttagcatttattattagtatctgtcagtcttgaaatgttctcttcccttggctttcatgacattccacactctcctggttttctcttacctctctggtaatacctgtttgcttatccttctttgtccagctctgggatgttaccattccttcaggcgtgctgttttctccttaggcagtcttacacacactcatgacttccttccattgtcctccacacactgatgaccctaaaatcagtatctccagcctaaacctttccactgagttctagacccatatgttgtactatcaacctggcttgtccatttgaatgtcttccaggcacttcagactctcttctctagactttgctggactttcactcttccccctaaaactggctcctcttccactgaaacatgtatgtcattgagaggcaccaccatccacccagtgcctaagccagaaacctaggaatccttgatacctgttctctctcatcctgcatatccaagcctatcagttttatctctaaattatattttggtaggtttacttctttccttttctcccaccaccaccctgctccaagctaccatcatctcacccagaggttgcagtgagcccagatcacgccactgcactccagcctggtgacagagtaagactccatctcaaaaaaaaaaaaaaaaaaaaa

SEQ ID NO: 2089 - DNA, 1150 bp, Homo sapiens
gaattcggcacgagaagcagctcaacgtaatctacctgccactgggcaactagctaatgaccctccacagtgatgctgtattgaggacttggtgttgatctctaccgctggtcagttgggcactcagcggtggctctagccaggtcagctttggtgagtggaagtccatgttgctgagccatgcataacctccatccctgtcaccatggctactttgttcatgagcccactgtggaatgacagcagtggckggagaaagagctgactagtatcacagaatgggctctcctatttccttgatcattaaaatacctctctgctaagatcacctgttggtgagcattcacatgggacacaaatatcttcactataaaggcccagatagtaaatatttcaggctttgtggactacatattgtctctgttacatattctccttttcttctctcccctctcccttctattttccttcttctttatagccctttaaaaacataaaaaccattcttacattgtgtgctatagtttgctgacccccagcttacatgttaaaaaatgcaagattcatttaagtgaaaattgtattgggaaggaatccacatttccagataatgagggttgaggaaggcactgcatttattttaattataaattgggatttaaatctaagaaaacmtgaataaagcacccaaaggtattataaaaacacacacttatgtatatgtgtctatgtgtgtgtgtgtgtgtgtaaagatacacacacatacaattactcaataaataattacaaatcacctaatattttataagtttattaaccaaagttactggcacaaactcagatgcctactaggacctggcagataaaagggcatttttgaagtggttaagtacacagtagtaactgaactgcttatatgtcagtaaattcaaacgttagcagaatgactttgccagactttgtgaggactgagtaaaacatggttccaaacatatatgtggcccctgggtaatcagtttttatgatcacctgtaaaagcagaggcttgtttctaacatctatacttttaagaaattctttttttctcttaccctggtcataagaaaaaagaaaaaaaaaaaaaaaaaaaactcgagggggggcccggtac

SEQ ID NO: 2090 - DNA, 2612 bp, Homo sapiens
gggcgatggtttctggtgggaaggcccaggccgagggcgatggtttctgccgggacggccgaggccgagggcggtggtttctgccgggacggcccagacggaagggatgcggcttgggaggtggggcctgaggatgtggccatggcgcgtgctcttcctggctggtgcctctcctagtcagcttcaggagatgggctgtagatgtacctccactgcccagagctctgcaggggaaggcagtaaaacctccctgcatcctgacccacgtgtttgtagatcctttcagctattggcgccctggaggatgggacgggaaggagaacgtggccggtgggtggaggatagcactggtgcctggccccatgatggctgcaatgcggccacattctcagtgggtcatgtctgaatgcgagagcagctgtgttctgcgagtggtgaaacaattgcctgttgcattctatttataggcagaggtaactaaaaacctcagtgctgagaggggcatcatatagatcctgcagttatgagctggttcacttggagttgttttggttgcaggtgacagaaagcacgactcaaggtagcatcaaccaaacaggggaggtgggagcactcaccaggcagagaagtccctgcccccactgcttgcagcccaacagtgtggccccatatgggtctcccctggactaatggctgcggccttggaagtggtgtgctctgggccaggcctggatcacttgtccatcctgagttgggaatgggggcagcccccagagacagactcaggaaagggggagtgcaaggatgtcccccagatgccctgtgctgcccaggggacagctcactggcagtgggacgaaaccgctgtctgtccagggctctcttcctagaaggtcttaggaactcccaaatgggtgctggctggggttgcccggcccggtgctctcaaggagagctgaagctagttattgggtgcagatgctggctctgacccctgccccttcctcccgggctcagcttccccatctgtcatggagtaataacaacccagccttctggtccactgaggaatgtgtgtgcctgtgtgtttgacgctctcagaacaggcctgcagcgctgtgagccttggaagggggcctcacagctgctgccgccaccttggaggcccaggatgggactgagaaggggaagggagaggtcagagccacagctgttgggcagggacctgctgtaggaagagaaggccagggaggcgctggtggtggcctcaggctatgcaggtgatgcccattgtttccagggccatcccagttggaggttcctgtttctagaggaggttcccttgtgaccccctcatttccacacccgagcaatgctgagggctgtggggccccccaggggcttgagtgtggtttatggcacagcagggactgatcacagtggcaccgggtgtcagtggccagtggtcagtggccaggaaccctcaggaccctcctccttgtgtgggtggcatttacccacccacaggtcacgctcaggacccgcatctcattccgatcctccttgtgtgggtggtacttacccacccacaggtcacgctcaggaccccacatctcattctgaaggccgggcacaggcggttgttttctctccaacttcggtttccccatccccactcttagggcacaaatgcaggtgtagcttccccatgcccactctttaggcacaaatgcaggtgtagcttccccatccccactcttagggcacaaatgcaggtgcagcttccccatccccactcttagggcacaaatgcaggtgcagcttccccatccccactctttaggcacaaatgcaggtgcagcttccccatccccactctttaggcacaaatgcaggtgcagcttccccatccccactcttaaggcacaaatgcaggtgcagcttccccatccccactcttaaggcacaaatgcaggtgcagcttccccatccccactctttaggcacaaatgcagtggcagcttccccatcccccactcttagggcacaaatgcaggtgcagcttccccattccccactcttaggcacaaatgccaggtgcagcttccccatccccactcttagggcacaaatgcaggtgcagcttccccatccccactctttaggcacaaatgcaggtgctgtgagcgctttagaatcctctgctgcaggtgactttgcttcagcgaaccacagaatgttcacatggttttatgcatttgttatttcagggaaaatcaaggttaaagatgtcttcagaatttgtatttttgggctgggcacggtggctcacacctgtagtcccagcacttttggaggctgaggcgggcggatcgcgaggtcgggggatcgagaccatcctggctgacacggtgaaactccgtctgtaccaaaaatacaaaaaaattggccggatgtggtggcgggcgcctgtagtcccagctactcgggaggctgaggcaggagaatggcgtgcacccgtgaggcggagcttgcagtgagccgagatggtgctgctgcactccagcctgggctacagagcaagactctgtctcaaaaaaaaaaaaaaaaaa

SEQ ID NO: 2091 - DNA, 1485 bp, Homo sapiens
  misc_feature (1365)..(1365): n equals a,t,g, or c
  misc_feature (1402)..(1402): n equals a,t,g, or c
  misc_feature (1423)..(1423): n equals a,t,g, or c
aggttttgaacaagtaatatgttcatgtggtttaaaatgctaaagttacaacattatacatagttaaaaaaaatctgtcttctaagtagatactccattgtcctctgtagggagaattggagttactagtttcttggctgtcattctatgcatttataaacagttgcatttttttccccttatttttactagcatattatgtatactagtttatacttcgactttcccatgtaatatagaatcttgagagattattctatactgtaacataaaagagcttccttgaaaaaatattcttaaaatagaatattccataaaatattctataaaatactgctttgaatatttgcaccactatctttttttctttttttttttgagatggattctcgctctactgcccaggctggagtacagtggcaccatctcggctcactgcaacccccacctcccaaatctatgatctctttcatatttgcttacttttctattagattgttgatccttcctcttactgatttatagaagccctttgttaggtgcattagctcattgaggtatgagttgaatgtatccagatttataaattttaaaagagggatttacaaaagtcctctaagtcttgctttaagttaatggttagagctgtgaaaacctaattaagtcatttcacacaatgttctcccatgagaaaatccaaagtttgtttaaaattcaaaatttaccattttaatcattttaagtgtatagctaagtggcattaaatacattcacaatattgtataaccaccaccactttctatttccagaagtttttcatcacccaaactacaactctattaaagtaataactactcatttccttcccgtcctcccagcccctggtaacctgtactctgctttctgtctctatgaatttccctactctagatacttcatataagtgggattacacaatgtttttccttttttgtctggcttatttcacttagcataatgttttcaaggctcatccatattgtaagcatacggaggaataatctattggaatatttttatatagcatattatttacatataaattccatatggaggaataatattcaattttttgtgtacaccacatcttggttatccattcatctggtgaaaaataatttgggcctaggcacagtagctcacgtctctaatcccagcacattgggaagctgaggtgggtggattgcctgagcccagaagatcaggaccagcctgggcaacatggcgagaccccatgtctataaaaaatttaaaaattagttgggcgtggtggtgtgcgcctgtagttctagctactcaggaggctgagatgagaggatcacctgngcttaggagatggaggttgcagtgagctgagattgcnccatgcactccaacccgggcnacagagaccctgtctcaaaaaaagttgatgaacgcatacatattaaaaaaaaaaaaaaaaaa

SEQ ID NO: 2092 - DNA, 1566 bp, Homo sapiens
  misc_feature (1013)..(1013): n equals a,t,g, or c
  misc_feature (1020)..(1020): n equals a,t,g, or c
gaattcggcacgaggatttccctgggccattaagaaaagtaccttttaatgtgctcaagaattcagggtttagaaagatttccatccagattggctccttaaagaaaaaagatgcggtgcataatttattttactttcagttatctgctaacgcagctatgcaaaatgactcatttattggggagtgggtggtggcattaggtaaagtcttaccatattgtctattttgactgtttcattcttaatagaagtctacacattgcctgcaattgaggtataattttctttaaagggagtgttgtttcagataaggtagctgcgacctaagaaaggaataattctatatgattttaagtctttagggratggaagcactgtcttawtaattggaaagtcccaactgatagcactgacatawtcatgtgctttctttgcctgcctgctcatctgcagccctgatcacagaaggaagggagaagtagataagaaatagtagttatgaggatgaaacgtgcacatataggagccctctcacgttaggcttggtttggtgtctggaggcacgtgatgagaacagcagtggatctgtgggctcatgtttccttactcctgctctattaggactccagtctgaagggatgatctagtaccaaccaggagatgtttagaagamcgasatgtttcctgaagtattctgagctgtctcargttgattacgtgctttcttatcttagatggctcctggagagctgtctgggtaatatgctctcccactttggtaattttggattttttgcaratgctttttgtaaaagaacacctatgagtgaggcctatggttttggggtttgcagtgcccaaccagtcaagctggtctttgccttttttgtggttggatatggaaagagtggtcagtagatttcccagtgctgtactcatgccattcagctcatagtcacataggtttccatatttgctaataaaaataagaaaattccggaaaaggggagtangttgganttgtcaagttgaactgtgaatggtgtggatgagatattctggggagagaatggacagaccaggtttggcttagctactagttgagtgtcccttctagctctctgggatttctttctaatctgtaaaatcacctattttgttgaagtargcttgcctgtcctttcaattcttggacatttcagaacataagctatgtgtttttctggaaaaaaaaaaaggatatttgttagaattagaatttacttgttatgaatctaaccttcacacaccaaacccccagctaagacagtaagttgcatatataattgtaataaatactatgtaagtctgaaaggggaaagagaacttgagtttgcgacttttcttataatcttgaagaagtaattcccagacttcagagtgtgtaagaaatcactagaatgctagtttaaaaaggcatggattcctataccccagttacacagttcttatggcctgggatagagcctggaagtctgcatgtcacaggtgaaaaaaaaaaaaaaaaaaaaaaaaaaaaaaactcga

SEQ ID NO: 2093 - DNA, 1638 bp, Homo sapiens
  misc_feature (1578)..(1578): n equals a,t,g, or c
tttttttttctctcctctctaaacatttatgatgtatgatacagtgtgtcctggctggatttttcctgttagcaggcagaaagaatccctcctggattccagaataataaatacagtcatgtgctgcttaatgacgttttcgtcaacaatgggccacatatatgatggtccaaagcactatactgtacatcatctcattggaaaaccttatgaaataggagggcaactatcatcataatcatcttccttccccccaccaccaacttcagggagtgaggtcctgggaaatgaagggacactatccatgtgcttggatgtctctatcctggttccgtactctttccgctatgatatactgccttctatatatagataaaagttcaattytctttttcacaaatgagaggagaatatgattgagttttagtaaaattgatatccagtaatactataatgtatttagatcaagttagcacctaaatagcaaacctgcttgctctattaagctagtgatttttcactataggtgctaacaaccattacgtagcatctattctctaaaattgttgctatcggtctagcagaggagcagtgcactaatgtgggtgcagatattatagaaaccagaatacatgggtgatgactgttccactcaccatcttctcatatctctggggatctcattgtggagtaaggggcataatgttagtataccttttagagatcaaaggggcaagtcagcatcagctgaaagttgaatcacctcattaaagaattttatatccctttcagggggttgatttggaaaggaaaacagacataagatttgaatgtatcagtgtggctacttgtgaacatactgcattcaactaatggatagaaatttgaataaaatatttcagaagaggtttttcttgtgtgtgtgtgtttttaaaaagaattttgtaatgcacttcttccatgcatatcttatctactcttcagggaatacagaagcagatttacaaatgaagagacagtgtcattctgcttgagggtaatggtgggtgtcataatactctatgaccacgtacatccagtgggagcatttgctaaaacttccaaaattgatgtaagttattgttttatataaataatttcaaacgagtttctccatggaaaccataggattttattttatgataagagccagcaaaccggactctcacaaaactcagatttatagtttgtgaaatggtggactttcatctcctctgtccctgtgctgtttttcttgtggcctgtattcaggtggaatagaatgatcaaaggatgactatattgtctagtgagtacctcctggaaggcttctactacgtatttggcaatataaatagataattagatataaggaattttgagtcatatcctttaattcctttggccaaaggccatttcaaataaaatgtttatttcagaatgcatataaaaagtcagtagtgctgctgggcgtgctggctcatgcctgtagcccaagcactttggcaggctgaagcaggaggatcacttgagcccaggagtagaagaccagcctgggcngcatagtgagacccccatttctacaaaaaaaaaaaaaaaaaactcgagggggggcccgaa

SEQ ID NO: 2094 - DNA, 935 bp, Homo sapiens
gtggtggtggctgtaggacctggtgaataataaactgaaaaccactgaatcgtaccccttaaaaacacacaaagcaaattgacaaattattgggaggcaacataagagaatggggtgtgaactttggatcagtgcggcctggatatcagctgtgtggtgttcaaatagattgcataacctcgttgagtctcagtcttcccatctgtgaagtagggatcattcctacttcgtagggttggcatgagactcagtgagatgaagttggtgggtcacttggctggggcaggtgtcacggagcgggacctgtgattgttcagccacctactctgtgcccagtgctgtgttggtgaccaggtatgtatgaagtcagtaagccacagtcctgagttatggtgcagaccccacatgcacccagagtcagcttggcaagaccccttgacaccacgtgcgtggagggtgcaggtcggagagctcacctccatggattccgtagagctttgaggcgtatccacaaagtgtccaggagaggtggcgtcgcctccacttgatagaggagaaagcagagatggaggcagccagaagcatggtgcagtggtggggtttggtcattaatttgataatcacatggaatacaagctaatgtttattgagtacttactgcctgcccgctactgtaactaagtgctttactcctgttatctcatttaattctcaaagcagccctgtggcactgaggtggctggagatggagggatgtgtggctgccatgtgtttgccaggaagcagcaggatgggagtgagggcacagacagacacacatgccaggacttgtttgcacgaagctgaggaatgggtgcccatcattcattatactcatctctctgttttatgtatattcaaaaaaaaaaaaaaaaaaaaaaaaaaaaaaaaaaaaa

SEQ ID NO: 2095 - DNA, 628 bp, Homo sapiens
ggcacgagcgggaggctgaggcaggagaatcgcttaaacctgggaggcggaggttgcagtgagctgatgagatcgtgtgccattgcactccagcctgggtgacagagcaagactccatctcaaaaaaagaaaagaaaaattttatatatgtaatttaacttgcaaatgacaagtttttaatattttcttatttttgcttgtgtttgtttatgcctttaattccttgaccagaatgactatagctaaattaactttggtagtgtattttcattcatttactatctcgtcatttccatgggtcaggagtctgggcacaccttagctgggtcctctgttgagagtctcaaaaaggctaaccagaaggtatcagccaaattgtatttatttctagaggttggagtgctcttccaagttcatggagttgttggcagaattcagttccttgcaactgtgggactgaggtagccattttcttgagggctaatggccagaaattgctctcagctccttagaggctattcacagttccttgccacgtggccttctcacagaccctctcagagcacagcagcttttacatcttcaagatcatcagcaggagatctgtctcctgctgcttctctcttac

SEQ ID NO: 2096 - DNA, 410 bp, Homo sapiens
gaattcggcacgagatgccttggtatttctccccttccctgttgtggtctctgtttcagtggtcggactcagaagcaggttctcgactatgttaaagaaggaggacataagaaggtgcagtttgaaaggtaagagaagcttcaatgctacttccagtctgagaaggctcagactcgccaggtaacagtttgttgctgctaaatatttctttacccagacttcagacttgatgtcccttgagttgtaaatgatagtctcagtcatcctcagcaagtccagtgttagagaggaaggttttagagcccaggggcacaccctcgagggggggcccggtacccaattcgccctatagtgagtcgtattacaattcactggccgtcgttttacaacgtcgtgactgggaaaaccct

SEQ ID NO: 2097 - DNA, 1409 bp, Homo sapiens
  misc_feature (478)..(478): n equals a,t,g, or c
gtcaggatatgagtcttcctatgtcattctttattctttcacatttatcatcttttatgatatgtacatatggcaaagattattcccactttacagatgaaggagcatttacttgaaaggatgcagaataaaaacagatataattcatatactaaaagacatttcatagacaatggcacaatgatttctccaaaccgccctacattatatgatttcttatcttcattgtgttgctgattaaacagtttaagtgatttatccagttcctcttaggaagtggcagaatagaaagctatgatggttaattttatgcgtcacttgactgagccatggggtgcccaacatttagtcaaacattattctgtgtgtatctgtgargatccttctggatgaaatcaacgtttgaattgttagactgaataaagcagatttctctccccaatgtatataggctcatcctatttgttaaaggtctganatgttgactctctmtcttagtccgttctatgttgctgtagagagatatgtgagactgggtaatttataaggaaaggtggtttatttggctcacagttctgcaggctgtgcaagaggcatggcacaagcatctgcttctggaaagggacgtcaggaggcttccaatcatggcagcaggggaaagggagaagggcaaggtatgtcacatggcaagagmggaagaaagagggagagaagaagaaggtgccaggctctttttamccatcagttatcatgggaactwatagagtgaggactcagcacaaagtcatgcataaaggatctgacccgtgatccaaacagtttccaccaggccccacctccagtgctggggatcaaaattcaacatgagatttgaagaggacaaatatccaaactatatcaccctcccataagtaagaaggcccctgtgagtgcagtgtgttttagtttaagctactaggaagggtgaggcaggaggattacttgttgagcctagaggttcaagtcctgcctaggcagcacagcaagaccccacctctaaaaaaatggagcccctcctgtcatagtacaccagatatttcctgtcttctaacttgaactgaaacatccatattttaaaagtctcaagtttacaaatcttgggactttttagcctccatatcacacaagccaatttcttataataataataatgatgatacaatatataggatatatattgtttctgtttcactaaagaaccctcatacagaagccaagcagcatcctctctaatgtcaaaatcagtgctttttctgtgacattcatgctcctctacgaatgaaaacctggctcacattttatgctaatactaaggagtaaaaaaacatccattacttattgtatacaataaaagcttcacaacaattgag

SEQ ID NO: 2098 - DNA, 1300 bp, Homo sapiens
gcacagaagtttgaaaagtaaccctgggaagaaatgaatgaggaggaaagaaaatgtacaaatgagaaggacccagtggatttgccatacaaagtacctctgagtaaaaccactaaattactcttggggttgtggggaattkagatgccactggccatttttgccttagttgaccttttttgggtcagtagtttctcaaacatcaatgtgcctaaggatcaccttgtgaagtgtttaagattcagagtcctgagccaccctgagagatctggattaaacagatcaaggaatctgcatttttaactagcactgccagtgagtttgtggactacactgagaaaatggctctacaatgttaaaagcacacatattttttaaaaatgacaaatgccatttcaaacagacttacaacccatttatataggctttccctgcaaagtacacagttttgacttataatcaagcctacaggaatgtaactagcaagggagcaaaggagagcaggagattagaagaagaatcaataaatggctcaaatatgtgaaataaccttgttcatccaaaatacaggatggtggtgttctaactgtcatggtagggttcaattgcctcagttcaattttaggaaaactggcaatcatttcttttgcaggggacacaatttctgaagaacccagtcctttaaaaaaaaaaaagtgagctatcaccccactattgagagagcagctactagctcagtattggtgtacccagatgggcagcctagcagccaaggaaacagaggtgggtctatgtactgtcccatcctgtcaccctttatcagtgagaccttgggcagagcctggctcatttcctggcatacgataggctttcctcatctgcacaatgaatatgcatccacatgttaaaccaccacttcgcaaattataaggttgaaatgagataataaagttgtgtccttagcatacagactggaccgttgagaagtgcagggggaaaaaatcagaaagatctgattttagatttttagtcaaactaagcaagaggacttaacatttcagcaactcagtttgcaccatgaatttctccactcaatttatgagaattactattcccttgaagtgatttaaggaatcattaagatttggcagtggaaggtgggactcatttcatataccattacccttaagccgagactactataagaagttggtacatggccaggcacggtgctcacgcctgtaatcccagcactttgggaggccaaggtgggtggatcacttgagttcaggagctcgag

SEQ ID NO: 2099 - DNA, 397 bp, Homo sapiens
ctcgtgccgattcggcagaggagatatcatctcacaccagttagaatggcgatcattaaaaagtcaggaaacaacaggtgctggagaggatgtggagaaataggaactgcaggttcactttcatwttaggattattgaggtataatgtacatgcaacacgtattactatgtctaatgtacatttcaatgagttttaacaaatttatattgtcatgtaataatcaccatgatcaatttacagaacgtttccacttgctgtagtttggatgtttgtcccccaaagtgcacgttgaaatttgatccccaatgttggaggtggggcttaatgggaggtgttggggttattggagtggatccctcaagaatgccttggtgccatcctcgaggggggggcccg

SEQ ID NO: 2100 - DNA, 964 bp, Homo sapiens
  misc_feature (883)..(883): n equals a,t,g, or c
ggctgaatgagttggctcaggattatcttgtccatgttgaaaactgcatttgaacccaggtctgtctgactccaaaaaccaaatggtttcctcctcatcatttcagaaactagcaaaatgcttttatgtacaccatttgattttagaatcctgtacattttctaaatgagggcagtgagactcagaaaaatagtatgtccaaagtgactaaggtagtagagagaagattcaaaaccctatcccaggccttctgactcccattccaatgctcttccagctacatcacagatcttttgagcaccccctgaaatcgcacccaaactgatgttcacgtggcagatacctcaccaccctctcctcacctcacgccttaaattctcatcttcaggcccctctgtctcaggtgacactcatgctggtaaaatgtcctgtgttttctgccggaagtagccagcccagacaggtgcaggagaggtctgctctagagggatatattgcacagccttgtccctgcctcccctatttcaccgctgatttctgatgggacccccagatgagtatcatccccctcctggccatttacaacctgcaaagcaacttgagttcctccagagggactggcagctctgtcaagaccatatacgattttcccatgaaaagtacctttggaagaagatttcttcatcagtttccaccatgaacacagatggacacgtttctccagaatcttctctgctgtcatttgctgtcctgcaaagaacctgggattgtccttcgctgggacagagagggtcaggcccaggctggaagttctcggttccactggtgctctcggggggaaaaatgtggtatttttccttttgtcttttctgcttttgttttncgctttgctccaagctgatgattctctcagcttctgtcttcatgatgccaacactaccaaatgaaaaaaaaaaaactcgag

SEQ ID NO: 2101 - DNA, 1004 bp, Homo sapiens
ggaattcggcacgaggcaaaataggcaatgtctcttttatcatagaaactatgtcctgattagaaaagatggaaagttcaaaataataattatgaagtgcataaaatagggtgtgttagtcaactatgccacagcagtgctgggtagcatacagccagtaactccacaacagcaagcatgtgtacctcatttatgcaactatggtttgtcctgggtttggctgatctaggctgggcttggctccaggccatatgtttagttcatgtctgttccttgcatctctcactcttctgggaccaacaggttacccagggcatgttaccctcatggccatggaagaactaaagtaggtgagcccaaccactctatcacatttcaaatctctgttcacttctacccactaatatcctgttggccaaaacgaatcatatggccaagcccaaaatcatgtggtagggaagtaaataccatccacaattggagcggggaggccatcaacacttgctgggcaataatccaaactgttatgcagaatgatgtgataaaagggatcagagagaagtgctgtgaggaatggggatgagttcactgggatgatgtcagagaggcaggcgagggccagatcttgctgagctacggaaagaaatggcacatttgatttgtgatttcaaataatccctttcactgctatgggaaaactggattgtaagttggcacgaagagcagatgcagggaagtcccagcaggtcggacactggttccagtgttcctaggtgggtggtgatagaaaggtgttgcactttgaatagtggcagtggagatgaaggcaagcgctagactgagaaacagaagcaaatggacagggtaccaaagtggataacatgtggtccctgaccttaaagagctaataacctacttgatgagaaaaagatgtacagacacagccatggtttggagagatatgtttttaaaataaggccatacacaaaaaaaaaaaaaaaaaa

SEQ ID NO: 2102 - DNA, 1110 bp, Homo sapiens
ggcacgagtgggtccaaaagcatgttgctcattctgttttttatacaggttactggctgtattagagagatggtctgggcttttaaaggcataactgaaaagggaatttcatactagttatggttaatgccagagtgctagaactagtgaagcctactgggagaaggtatgtttttctaaagaaagaattttggcctttaatgttacaacattcaaatttgcatctaaaactttcactctgggcaggttagaaagttaaagatattggtcaaatgattgggcaattcacctgttttcattaatctgtgttttgatccctatgatgtaaacaatattagtggatggattccaggattcttctgagagagggatatctttttgtttacagaaattatttgatgagagattaacataaaaaatgatgatttgaatgcctggatggctgtcccgaaagcaaccagagaaaatggttgataagaaaatcaagagatgcacttaagtttgacttgtttttgttttctcctgggaagatgaatagtgttgaaggattaaaaagatgatagaaaaaaagaaatgagagaggcattatgaaagaacccaagattggctgctgtaggatgagaacaatcactgggtacatgtaaataagaaatattatagagcgtagatatttctaataaagagtttaatctctctttctgttttgtgcaatatatgtcataaatctcatgcaaccctcatgtgattgatttattttcagaggccaatgctggtgaagaaactgaacattttataactggttagacatggtatggaacagagaaatccacactgaaaaagctgctcagaggagaagaaagagtaagtttaatgatcatatgcagaatttgagggctgtcaggctaccctttgatgtgacattcagctgggatacgtgggttattaaagttaacttgattgtaacaataactgataaaagctgctgtatcctcattcataggtagattatgtttataaagaacagtacctgatactactagatcagtttaaacatagttttgctattgttaagagaccaaagaattgctacattttgattggttgaatgca

SEQ ID NO: 2103 - DNA, 639 bp, Homo sapiens
attcggcacgggrttttwatatttcctgatctttgaaccaataaacacagaatacctactgtgtgtcaagtactatgctaggtgttgaaacaaagataaagtactatggaaactattaacacacacacacacgcacatgcacacatgcacaaacctatattcttttttcttaccaaaaccccaaatcatgctcctaattttgaatgtgcaggtgcggtttttgggtgattgggttctttctttgctatgtgggaggactccggtagagtagggtggttgtcagacagaagcagatgctcttatcagccgggcattctcaccccaggtagaagtgctgtctgtggtcgctcagcagatcctcagcatccaacaagccatcattcggaagctaaagacattcatctttgaagggactgagctctctctgaacccaacgcgcgctgtgttcatcaccatgaaccccgggtatgctggcagggctgaactgcccgacaatctcaaggtaaatgccagcagatatacatgtggggtgtgctttttagaatagaaacctctgggccgggtgtggcggctcacacctataatcccagcactttgggaggccaaggtgggcaaatcacctgaggtcaggagctcgag

SEQ ID NO: 2104 - DNA, 1197 bp, Homo sapiens
gagaaactttcccttcctgattctgtgcaagcacggctgtgagcgaacagcctccgtatttcaacaaacatcctacttgtatggtcttaggatctgtttccagacagtcacctcggggctcactctagtcctgaaagcatcttcccatccctttgtgatgttcagtctgttgcgggcattcccctctgacaggtgtccttgccctgctgcttctacagggtggcaaagagcaagggcttcagctcccaagctcagctgcagggcacttaggccccgagtgtgtccccagtgaccctgacttgagggacacactgggcgctgcagccacaaggcactgctcctgtagtcatggtgggcagccagcattgccccaggccacagtgctggtgtcccaggctcctcagggacctgaggacagggccaagtgtgccagtccacaccaggctggccctgccagtccacaccaggctggccctgccagtcaacaggtgcacatacaggtcctgaaaccacctcaggtcaaataagggatttgggggcacacaggttgcattctgcctcttgggaagatgatgcaagggaatgacaggcaggctggttccaacgcattgccaagcgccagctgagcgggctgggagcaggcacattccggtaaccaggacagaagtgggctagtgatacctggtcatgtcttttcccaagacaaaaccaggaagactggcccagcccgtttggtgtgttacaggctgaactgtgcccctccccaaatgtgtatggtgaaggcctaacctccagtacctccaaatgtgacctcacttggagagggggtgtttagagaggtaatcaggttaaaatgaagtcattagggtgggtcataaccccatacaactgctgccctgatatgaaggggaaatctggagacagctgtgtagaaaacaccatctgaacaggaagacagccatctacaggtcaaggggagaggtccgggaccgatcctccctcccagcccaaagcaggaactgaacctgacacctggattgtagacttctggcctccaggacagagacaatatgtgctgctgttgaagctgcccaggcagggttcctctgtgaggcagccccaggggactcagagtgtgccccaggagtcctgtgggaattgccccacccttcctggcacactcctgaatgttctcga

SEQ ID NO: 2105 - DNA, 421 bp, Homo sapiens
ggcacgtaggaactcctgacctcaggtaatccgcccgcctcagcctcccaaagtgctgggattacaggtgtgagccaccatgcccagcctaatctttattatttccttctttctgctagctgtggatttagtttgtccttctttttcttgttccttaaggtgtgcaggtaacttgtttctttgagatctttcttattttaatgtaagcatttccagctgtaagttccttcttagcactgcttttatagcagcccatattgtgtttttgtttttattggccatgttgtgtttttgttttgttttgttttgttttttaagacggagtctcgctctttcacccaggccggactgcagtggcgctatctcggctcactgcaagctccgccacccgggttcacaccattctcttgcctcagcctct

SEQ ID NO: 2106 - DNA, 1112 bp, Homo sapiens
ggcacgaggctccacccgggctgtttttatgacagctggcaaaacacgctaaggcacattgaggactcagtgaggcaggttcctgggcctctgttaggctaagtttgaagttgttccatcactgcctccctctgccttctttgccatttccatccatgatagcactaccctaactagtgatgagaagcagtctttggagttcctcttctctcctgtccctcatggctaatttccctgctcagacttctgcctctggtctctttccttctgtgcacactgacttttttccctctcctgtgccgagctggagggtaggaccctctgctgcagcactgggtcattctcaggataaagtcttggtctatctgggcgaacagatcacttccagctcgattcatacatagtgactcttgcttgaatagcaagatttgcccaaatcagagctttaatcctatatatatggaacaaataatcacttccagatctccagggaatctgctcacccttcataagtttactagacagtttcagaattttggaattgaatgtaagaattatgaagggagctgcccttcaacacgtggggatgatagattaaaggattatgaacttagccagtggaaggtgaagaagggtgtagtatagcggttggggtcacagggctgcttctagatgccaggtggcagcccgtttcttgccccaggtggtagggtagttgtgcatctctgttttgtgtacttttcaatgtttgttacctcacaatagaagaggtttaaaagactattttgtgagagatcaagttttaagtgctttttgcccccatcattggcttggctaggttagaacaaagtgtgataattgtatttcctttttttcttttctttccttcccttctttctctccctctctctcgttctccctacctcgctctttctttttataggaatggaaaacaaactctattcctataagcttctctatttctcctttttttccaaaatggaaaaaaaatagcaccagccacaagaggcctttgtggtgatgacatgctgtaatgaatgttaagttaaccacattacctgacacacaggctcagtacaggccgtcccatt

SEQ ID NO: 2107 - DNA, 418 bp, Homo sapiens
  misc_feature (80)..(80): n equals a,t,g, or c
tcggcacgaggttttatttcatgtattctttgtctatgtgtatatgtgtgttttatatgatttatatttatttatatttnatgtttacttacaaagttggaagccagacctggaaggacttcccctaccatactaaggaaatttaatttaattttgagtataaaggagaggtgctaaaggattttgatcaatgaagtgatagttctagtacccttacggaaagtggattagaggaggctaagaatgaaagcagggaagctggatgtggtggctcatgcccgtaatctcagcagctcgggaggcggaggtgggaggactgcttgagttcaggagtttgaggccagtctgggcaacatagcgagacctcatctctaaaaaaaagaaagaaagaaagaaaaaaaaaaaaaaaaaamtcgag

SEQ ID NO: 2108 - DNA, 759 bp, Homo sapiens
  misc_feature (740)..(740): n equals a,t,g, or c
ggaattcggcacgagtgtgtgccctrcattccaaggaatgggccaagggtttagatgaccctcatagataaggaatgaggctccaggctggccactcctggatttcttagcttggaactccaaaaccagcactcttcttagaccacagggccagtctcagggtatgtttaagttattgctgtcaggtgcatctgccatacactgtgtgtttgtgtgtgtgtggtgcagtgtggtgcatgtgcgtgtgtgtgtgtgtgatgtgctggagttgctgtgtgtgctgagtgggagagctcaacttcattccttgggtgacaagggagaagatactgatgggaggaggcgaatcacaggtttgcatttctgaaaatttagtctggagaaagacggacaggctatggggacatggagcaaagctacttcagtggtccaacaaagagatgatgagggtcagagtcagggacgcagctgggggaaaaacgtgaaaaatactttgtagataaaatggtcaggaccagatccttgcctttaactattcagtgcctgaatatatccttgatgacacagtagactgagaaaggaacaatctgcacaagaatgagaaccttggtsgggggttgtggcttacgcctgtaatccagcamtttggaagccgargcargtggatcacaaggtcagaaaatcaagaccatccttgccaatatsgtgaaaccgtgtctctactaaaaatacaataattngcctggtgtggtggtgggc

SEQ ID NO: 2109 - DNA, 1440 bp, Homo sapiens
ctacgtgccgtttagatgctgggccatatcactgagtgactatagttgattctcaaaacatccatgtgccaaatgattaatgaagtattaatatttatcaaatctactgatttatcaataacttgatttaaggaatatgcatctggaatatatcatatatgaatatgtacttttttactcagcagtaacttactattctttttctatttactgctccttcctactgggtctctctctcttgctctcgctctctctcgctctctgtctctctcttcttgaggtattttccctcctctttctattcaaagctttattttcagtctttgctttcttacagtgttgagttgtttctctgtattcctgtgtgcagattttgttatttttatataatttattcctttattctttgaagctgatctacccctgtctggctcccttttattgtgactagactctgggcagctttttattgacacagaaaccatttttttttccacacacccactcccactccatatcattcgtaccttttgaaggaggaatacacgtctgaaatagtacttctcacacagcacagcctggttcttgtcttgagccaagtctgtaacttggcttaagcagtttcctcattagataaaccctggctcttaaatgaaaaacaagcaacttcattcaatccccaaaacagcctgccgcagcacgaagagcagccacaccccagtggtgccagctttcttctcttttttttccatgtctgccctcttactagcttgcaccagttctgctgctgcatgatgttgtctgtggagtgatttttttaaaaagtatcagctgcttctttccatcctccttcatcatgtatttcctttaggagactttgttcctctaatccgttccaaaaagtaaaactattccaggctcattgcctcagggggagagtcaggccggtggaaaacaaggagggaatggaggaaatggtctcctcttaacacgttccattccagaagtccaggccctttcaggaaagccacgcgttactggcatgcatgaaacatttgggcgacaacctaaattagagcagtgcatcctcctgccatatccccttccccagctgaggagaggaggcagtttctgaagaacaaggaaggagagcatagattttcctaggctttgaggaagaagacctgcatcctgtttggctggactaattgtagggaggcttgtgggatctaaggagagaaggaatggctgtctcccttgctgagaagggtcacagggaggcagccagaacccagtgggcagcaacgacttcatagtgtggctgaacagcgagggctccagacagctcttccagaggccttggtgtccccaaggccctgatacagtagagagagccactgaaccaagggggcccatgcagacaggcacatagggagcccc

SEQ ID NO: 2110 - DNA, 961 bp, Homo sapiens
  misc_feature (549)..(549): n equals a,t,g, or c
gtcaatggctgtccatgtcgcccgtgcttcacctgaggaggctggcgaggtgtatcctctttcacctgcctcagttttcctcatctgtgaaacggcctcatggctttggagcaaacagaatgacagataaaagggacaaatgacacagggctctccatttgtttaacgagtacttattgagaacctactgtgtgcagggcaccaagccaggctgtggagaaaacagaagcgggtgacaggatgggagaggttccagaagccgctaggaggagaaggcagttaagctgtgacctggggcaggtggatgggcctccctgggaagatctgggtgtgggaagcgcctgccaggcagggggcacctcaagtgcaaaggccctgargtgtggacaggcgagacaagaccaggacaagccccgctgttkccgttgtctggaaaccaaggtacaaagagaggaggggacggagccaaggccacgcagctggcagagktggagctgggatgttaggggaggaacagaggtcacgacctctgcaagcttcatcccccanccctcacccctcacccccagccagaatcttccagaggggtggcctccccttcctgagccaccccagctgttgcggaggctgctgctgtcctggttcccttgtttaattacaaacaacatttttcgccctcacttaattatgcaacagacgcccgtggatctgccaccatctggccccactttctggcttgagacgacgagtcgcagtgacttcgagggctgagaggggagcaagcgggaggcacctcggccaggagggcaccgagcttggcatggcctcagctctgtgatgtacctggccacatctctgagtcctcatctgcagaattgggacaattgagggtggcgcaagggtctgtgagacaagagctgcttggcaaagaggagccctcagccctaaagggggcctcgag

SEQ ID NO: 2111 - DNA, 1174 bp, Homo sapiens
cgagaaggattgttttttgttgacttagcaaaaacttctccttacaaaacctcttgagtgtgctgaattgtgaacaggaaattgacttggggtaaggggagagagggaaccagggcactcttaaagagaaaaagacccctgggtcgataaccaagtggtcctgggactggatctggctattacatgcacatcaacaatcttatgtacttgctgattaacaaattatatatattctgcatgtttacacaaacagttcttgtgctagagagtccacatcatttaaactttgtgggagaattttgcaaatgatccaatcctagaggcttgtactctttcttgagccccactcacctttcctttgtacctcaaacctcagtctgactcttccagaaatataggggatggttcccttctcttctcccattccctacataaccctgagtttaaatacaaacactcagtttaattgtttcataaggcttatttttggataaagatatttcattttccctgcacattaaacttttatcacacttactgataaaatgccacagctcttgtattatcaactacaagttcagtcttctactcagataccaattaatttctgtttctttgagtatcatggactgaattttgtcccccactcattcatgtgttgaagacctaacccacaatgtgtttatatttgacatagggcctttaaggaagtaattaatgttaaataaggccataagggtggagccctaatccaacaggattagcattcttgtaagaagaggaaggggcaccagagttttcaagcacacaagaaaggccatgtgaggagccacataaccacggctgtctgcctggcgtcgtggcacacacctgtaatcccagcactttgggaggccaaagtaggcagatcgcttgaggtaaggagttcaagaccagcttgggcaacatagcgagacccatctctagaaaaaatacaaaaattagcagggtatggtggcaggcacctatagtcctagctgttgtaggggctgtggtgggaggatcgcttgaacctgggaggcagaggttgtcagtgggctggaatcaggccatcgcactccagcctgggtgacagagagagaccctgtcttaaaaaaaaaaaaaaaaaaaaaaaaaaaaaaaaaaaaaactcgta

SEQ ID NO: 2112 - DNA, 1939 bp, Homo sapiens
  misc_feature (1874)..(1874): n equals a,t,g, or c
agtaaaataaataaaaatagaaaaaaaaactcttcagtcaaatatggtggccactagtggctattgagtacttgaaatgtagctagttagaactgcaatgtgctgtaagcctaaaatacacacatttagtacaaaaaagattataaaatatcccaacttttatattgattttgaaataatattttgagtatattgggctaaacaaaatgtagcattaaaattaatctcacttctttcaatgtggctgacaaaaaagtttaaattaaatgtgcggctcacattttgtttctattggacagcacaggtggagaaggtctctgaacataaaacaccgawtaagtatattttccactgggactgggggtgggtgctttgggggaagtgcataggtgctgggcagtgttaaaatcagggtgggcgtaggtggcagtgaagggcagtctttgtgcagccagatggcaagtgagagcatgaatgcctgactgttggaaatgacaaaataaatcatggaatcctgaagtttcagggtgtaaaatgctttagaaatcatcatctgacccaataaatgatggaaagaaatgccctggactcggaatctgaatgttttggttccagtctcagctccatcatttattagataggacgtcttgggcaagtcagtctcttttcttatatgtctaatgggggacataaaatctgcttgatctttcctggaaggttatttctattattttaacttatttgaaagcccactcaaaattccaaagtactgcaacaatatgagatattaaatagatgttgcctattttacaatcctggctcagcccagttctacagacagttggtaattttcaaggtgagtaattaatacagagatactttggcagtgaaaatattattagtgtgtttgtgcttatgtctacacagagaagagagaggaggcaaagataaaacctgtagctcccattttcttcttatatatttttacttattttttctgtcacagttataaccccttaagaaaaatttagatgagtactagaatctggcaaaattagttaaatcagactgagatgaataagatagaacaaaatgagctgtagaatgatgttttggctgagccactcactctgccagggtcagcaccttctttaattgactcttttcaaggaaatgcagtacaggttgctctctgttgttacctgtgtgtcatgacccgctgggccattaacccatttgtcttgaatagtcaattctctggccccaggattgtcaggagccaggaggagctggggaacatggctgagacattctcactcctgttccagcctcaggaaaacccactgagcctgggtcaaatcttgggagtaactgctgacaatggtgattcctgagccatcctctctccattgcttgtcctgggtgaggcctcagggaggccaacaatttcctatgcctctctattgctgtacacatctggaactgaaattcattgcatatcccttcacccctgaatttaaccctgagaagtgtgaaaaattggttcaaacgtcctcatcaaaactcatgttgaaatttaattatcatatgtaatggtattggaagatggaaactttaatagatgataggggccagggtgcagtgctcacgcctgtaatcccaggactttgggaggctgaggcaagaggatcacttgagcacaggagtttgagatcagcctgggcaacatggtaagatcctgtctctaaaaaaaaaacacatacaaattagtggggagtggtggcacacacctgtagtcccagctattctagagtcgaggtaagaggttcacctgagcctagagaggttgaggctgcaatgagctgtaattgcanccactgcgctccagcgtggacaacagagggagaccctgtctcaaaaaaaaaaaaaaaaactcgag

SEQ ID NO: 2113 - DNA, 731 bp, Homo sapiens
ggcacgagacctggggttgtcggtgctgctccaggatgtcagatgctcccctgggggtgtgggtgctgctccaggctgtcagatgctcgcctgggtgtgtgggcactgctcctgactctccgatgctcacctgtggttgtgggtgctgctccagaccatcagatgctcacctgggtgtgtgggtgctgctccaggttgtcaggtgctcaccatgggctatgggtgctgctacctgttgtcagatgctcacctcggggtgtgggcactgctccgggctgtcagatgctcgcctgtggctgtgggcgctgctctagactctacgatgctcacctgtggttgtgggtgctgctccagacaatcagatgctcacttggggttgtgggtgctgctccaggtcatcggatgctcgcctgggagtgtggttgctgctccaggctgtcggatgctcacctgggggtgcagggtgctgttccaggctgtcagatgctcccctgggggtgtgggtgctgctccgggctgtcagattctcacctgtgcgtgtgggtgctgctgcgggctgtcagatgctcacctggggttgtgggtgctgttaaaggctgtcagatgctcgcctggggttgtgggtgctgctccgttcggtcagatgctcgcctgggggcgtgtgtgctgctccatgggttcagatgctcgcctggaggtatgggtcctgctccgggaggtcagatgctcac

SEQ ID NO: 2114 - DNA, 1374 bp, Homo sapiens
  misc_feature (642)..(642): n equals a,t,g, or c
ggcacgagagatgttggtcccacgtgactccctttgtgcaaaagcagatcttccctgacagggatctgcaagtgtgcagagatcacagtgctgtccacagtggtgccctcagggggaggcaggaaacgcttccactttttactttttgtaactaggtttgctagaaagcgtatatttatatttgtctttggaaaataatgattagaaatagaaggcataaaagtaataaatattcattaaagaagatgaggcatgaggcatgaggcgtgatcccttctacccataggcgccagtgttgcacatcgtggtgttctttctgggatgtttctcgtaagcacttattaagttgacttgaaactgcagcacgcatgttctcgcatgccactctcccttgcagagcagcccgtggcgcctcctcttcaggggccatctgccagttctttcgggtggttctgtgcccgcatcagctcctggcagccacccgtgtccagcccacgagggagcccacccttggacatatctaagctccccgaccacctccttggcctttaatgggagtgggatcagagacagaggggcgacaagacagagggccccggggggtctcatgggggggcggggcaagagcaggcattgctgaanttgggtcacctgccctctgtcaggagcaacgggggcctgaatcccagtccagcctcagcctcactgtggtctcacctttctccccagtttgtaaagctgtgaattagggacaggaaccctgaacaattttgagagtcacatgagcatttggaagtgggctttgtaggggaaagtgaggaggcccaggaggctggtttttgctgtggtcacgtgtgggcctgggagagcccagccctgctctggcccgcccccgtctcgccatctgtggaacttttggtttcaagcagctgcaagagttgccaaaaggttgaaagaattcagctgcctgactccaggtcctggcatccccaggagaggcccctctttcccaggggctctggtcaaagttccagagcctggcatccccaggagaagagctcctctttcccagagctctgctcaaagtcccagggagccccctggtcctgcatgggctggggcaaccatgctcccgagtcttgtggctggggttcagtgctctgaccaggggacaccagggcagggtggacctctaaaccctgtgcactgagggaggagtgaggggtccccagagcactgctggggcagctgggagcagccagggaggagcctgggagacattccggcggctttgttgtctgagtgagggaggaaaggggagtaaagggttgagtcagggcctgcctggggcttttcctgccaccaaactgaacc

SEQ ID NO: 2115 - DNA, 1000 bp, Homo sapiens
ggcacgagtgttcaagacattttttttcttttctttaattttcagaagtttgactatgatgtgtgttggtaaggatttcttttggtttctcctatttgggtttgctcagattcttgagtctgtaggtttacatcttttgccaaatttgaaaagttttctgtcattattcctttgagtatattttcagtcccaccctcttttgtaactctttctggaactccaatgacaagcgcattagatcttttgttatggttccacagatccctgagcatcaattcattttttctcattagacttaaatagactttcaagggactcaaaacagagtctactttctctcttttgtttagactgggcagaataatggcctccgaaagatgtccacatcctaatctctggaacctgtgaatatgttaccttatacagcaaaaggacttggttgacatgattacattaagaaccttgtgatgaggagattattctggattataatgggcccaatgtaatcacaagggtccttagaaatggaagagagttagaaggagatatgactatggaggaggttggagtaatgtgatgtgagaaggattcgatcctctgttgctggctttgaggatgatagaaggggactacaagccaaggaatgtgggctgcctccagaagctaaaaaaacaatgaaaaggattctttcctggtgtctccagaaaagaatacagcccttccaacaccttgattttagcacttctgacctacagaactgtaagataaaaaatgtgtaatactttaagcttctaaatttgaggtaatttgttgtgagaacaataagaaacaaacacaggaatccctattgtctgtcttcaagttcactgattcttttcttttcttttttttttttgaggtggagtctcactctgttgccccagctggagtgcagtggtgcgatctcagctcactgcaaactctgcctcccgggttcatgccattctcctgcctcagcctc

SEQ ID NO: 2116 - DNA, 1122 bp, Homo sapiens
ggcacgagtgaaagcctagaggtaatgacatgctcggcgagctcaaactcctggaaactctcccaggaaaactcgggatgcgaagatgtactctagaagggaacagatggcttctgtttttgtgtgtggtatggaatggatggcaaaaggtcagtgagctctgtgggagacagcacggtgccaaggggaccgtgtcaccttcctcacctctgcctctgtctcagacacctgctgacatatgaccaggtgcagatggagcagtgccagccacgccctgggatgaggagatcaagctggtgctcagccccagcaaggcggggtcagtgacatccctatatgtgaatggggacacatttgtaagcagagacatgaagtgacagaatgagatcacccacagcgacatctgccactacccaggtgactgggccaaaagtgggctgtggaattggaacaaaatacaacagattgtatttagatattgactccattctaatatatagactttgcaaggtaaacatttcaaaattgctctttactatgagaaccaaatgttttctccagatattttgatataaatttttgatgaaataaatgcatcctaggaaaggccttgctcccatattaggaaagtaaattctatatccaaggacactgggtaactacagccttgaatgttcatgggctacaataacgacgattatgagggaaccagatctctctcctttactgtgtttgggtagatcctttcatcagtatgtcaaggctactgaaatgttagtgtaatcttgatgtcagacaggggacagggtctttgcttggaagcctcccaaatccagggcctgtggaaagccaaagcattccctctgagatttcggcgaaatcttttgtctcctaattcccctttcttttttctttttctagttttttgttttttttttttttaggcggagtttcgctcttgttgcccaggctggagtgcaatggctcaatctcggctcaccacaacctccgcctcccaggttcaaatgattctcctgcctcagcctcccaggtagctgggattgcaggcatgcaccaccatgcccggcaacaagagcgaaatccgcctaaaaaaaaaaaaaa

SEQ ID NO: 2117 - DNA, 996 bp, Homo sapiens
  misc_feature (190)..(190): n equals a,t,g, or c
  misc_feature (985)..(985): n equals a,t,g, or c
ttcctttgccctggaaaagtttcaccacctttatatttttaccccagccttggagttatctttttctgctctccattctccatgtccaaaaacttgctgtcagtccagtttttaatcagttttctccttgaggcttgatctcccatttctctcatcccattatagcttttcatgtagatctgaggcccangttactgtaattcttttttttccaatttccttgctcccaggatccccatcttgtataaagtttctaaggtgctcctcctcaaactccatttttacaatatccgtattgtaaaattttcattttcagtaacacccagtagataatttttcaaagacgatcctcctcaaacacccatttttacaatatctctattgtaaaatttcattttcactaagtaacacccagtagataattcctatggagcagtggtgttccaaattctccattacctctatgcctaatattcatcagccttcattactctctagcatattcaccttgattcaacagattcaaacttcctacagccttctactgatgtcttataagctcttgcctctgtgcctttctcatgctattctttttgcttagattgctctttggtcccagctcatgttcatcactcccttcaaagcctttcttcctttatatcttctgactgagctctccctgattgacatcacctcatgcgatgacctccctcattctgtgctgcctcagcacttatcttttgagtttgtactgtggtccatgtacttactaatatgttgctttgtaattattttctagcactctgtgttacagtttcatatttgtatttatttccaaaattaaattgtaagctccttgagggcaggaataataacttttacatttgtatctctgcacccccgagtgcctagtatagtgctgagcacatagtaggcgtttaataaatgcttgttgaagtaaaaaaaaaaaaaaaaaaaaacgggncgggggggggg

SEQ ID NO: 2118 - DNA, 2111 bp, Homo sapiens
gaattcggcacgaggstttccatctctgagttggccttcaacgttcaagaaaatggatatattattttttttccttttctatttccttcaggaaagactaggtttcagtacggtttcaaataaaagcagtggagtaattttctttcccgtagttctccctcagccccctgaatcataagaatcaaccctcattccttttctcccaacctctcaggtgcatttgctgagtcactgcatgttggcctgaaacagggtccatgtgtctccccaccatttccaaggcatggaggtgggaagtgggaagtggggagggtgagctttggactgaacacccaaggsccacggccaccagctacgaggcttcccacaggcttgtctttctctgwatgtctgtcacaggattccagttctccagtcaaatcaatgatgcttctttggccctgtgctccctgaagtcctccctttatatcataagtaaccaaggagtccttcatgcctgatttttgaatgctagtaaattttcaacatcctcatccaactctattccccaggcttccctgctccaaactccaaatcacctgaaaaatatgttccagtcaccccacctctgcaccaacttgagtgagtctgaactgagaagcatttattccaatttgtcatatttgtggaggatttttcttaaatggtcacaatatttctagttccatgggctcttccaaggctttgtcacttcccatccagargcagtttctgtgttcttccccttgaacgtgggargcatttgtgacggctgccttgamcaacagggtggaagagacactgcatgamctctgagtgagtaaaggccaggcagcccttgcttgactctcttccttgagatgtcatccttagaacctccatgttgtgagaaagctcaggccactgggaagaacacgtgggtgttcccattgttgacagcctacagacaatatcaaacaccagacatgtgaatgaatgagcctccaggtaggtccagccattgagccagccctcagtcaactgtaccagctgtgaccccagacatattggggtagagacaattatwatatctctactctgccttgttcctgttgctgacccacaatcttgtgagtctactgctgggtcatgaaaaaaaacaaattgaactttcattcatwcattcattcattcattcatctatccacctactcatccatccaccaaagacacacttactgatatcccactgtgtatcatagactataagcatgggggctgcagagataaagaaagaagtgaaggtcctgaggagctcacagacatactactcattctgctgttgacccatcaccccaagtaacaaaagagcacccctcctaatatcctgcttcagattttcacagtcgctcatttatgcttgcatttctgctttgccattccaactaagtgcctttagaataagggatcaactttttttctcatggtgcttagcacggttttataaatttaacacatgtttgatatagcttgttaatttttgaaaaatcagtccatatactgctagaggttttcaaggcttcaagtaaataaaagaattacattttggaaaaataacttaataaatgaaatccttgtgccaaaaggagaaaaagaagaaaggtatgaatgatttttgggtccttattagatgactggggcctgctatttcatttactcttcatagcaaacttatacaaattatgacaatcctcaaattgcagactttaagataaactggctaaattgaatgactatcaaatgtggcacaaggagattagccaatgccagggactcttttgcagccactgtggtgactccagcacatgaagatgccacccagatgacatttgctttcaagacctttgaacaggctgccttgaaaagaatgctttccaatgtgcaactctatatcttctgtggctctggtaagtgaggactttacagcttatgttcactctttcctgtaatcatttccaggcctcgtggaaaagtgttaccaattaatactcccattatagaactggaacaaaacaaagtgcaggacgtgggacaaatcagttaaatatcctcga

SEQ ID NO: 2119 - DNA, 473 bp, Homo sapiens
gaattcggcacgrgcaatccacccatcttggcctcccaaatttctgggattacaggtgtgagccaccatgcccagcacatttctttttataattacccaatctgtggtattctgttacagcaacagaaaatgaaccaagwsgtatgttctctttggtatctgctgcttttattcaacattaggtttataaaattcatcaacattgatgtgcatagcaatagttcattcactctcattgccttatgggaccccgctgtatgagccatctatctattgtatctatggctgtggracaaactaccccaaaacctagtgacttaaaacaakaacatttatcttgcatagtttctatgcattaggaatttcaagagcagcctagctgggcagttctggctcagggcctctcatgtggttgcagctgagatgtccttcagggctgcagacatctgactggggcttgaccgttgctcgag

SEQ ID NO: 2120 - DNA, 1478 bp, Homo sapiens
ggcacgagttacactagataaacctgtattttaaaagtattcaaacaaaacacaacacacttacttagagcaataataataaatattacagaataatataatccttcccgttctaaaatatttttaaagaatatgataactttatattgggtcctagataccatactgtatttagggaatttaccaagatagagctggctttattgtaagtcaagcaaaatgaactggcgttcttgtaagctgggttcagtctactattatcggttctgtacagtgtctcctcgtgtgctagtgaaacaggatggggggcgaggaacctccttcccatcttttactagcctgagaagtatcttttcaatattttataattttgcctttggcaaagggctgcttatctcctgggaattcaggcacattttgaagatttccccatagccaatgagcacagaatgattattctcacaaaagttcttaagaaatgtcacctctcttgtgtctccttctttctagataagctctccccacacctttctcctgagacagtctagaatctcccttttatattgctgcagaaacacagactcatttccatacacgtttactccggcacctatagcatagatcaatgctatggacacgtgctgttgtgtgagatttaaaagtaaattttccattcagagatttttaaaaaaaaaaatctggtcatagcagccattagtcaacttagtcttcattgccctcctttttatttctaagcatgattcattcaggatataagattgcatgggcaatcattctagtattaaacaccttggaaagatgaggaccatcttcttcctccctgtgtctgcttctctttctgttccatcttctttccttccccatttctttcactctttccttccctgtccaggtcctgttgaatgctgactcaggccatctgtgctttccaggccagctctttcacttattgctcatgattttggccaagccatttaaaatgcctaggcctcaatttcctcatgggtaaaggaagctaataaggtctacctaatggacccacccaataaaattcttttgagaattaagtgggaaaatgtatattaaacacattggaaattcttgtctacaggggatatgtcatcaatgggagttgttactgctgctgtttctactagattccaaattgagaagaaaatctttctaaagcaagtatcaagtagagtcaggaggaagcatctaaagtttctgcaaggaccatggcacatcttcttgaacactgctgggatgattatttggataataggagttggcaccattttcattattttataggcaatatagaaatatatctgcactcttctttaaaaaaattactaatacataatagttgtatatttttatggggtacaagtgatattttgctacctgcatagaaagtgtaatgatcaagtcagaatgttaaggttgtccatcac

SEQ ID NO: 2121 - DNA, 601 bp, Homo sapiens
  misc_feature (7)..(7): n equals a,t,g, or c
  misc_feature (292)..(292): n equals a,t,g, or c
aggaatncggcmcgagcagatagagaaactgaggtccagacagggaagggactagccctggggccccacagtgccttttggtgagaccccaggccaggcctggagagagacaggcacacacacactaactagtaattcccactcaacagatcaacagattcctcttgcaggaacaagaggaatttcgtttcccttccaccaacaaatcaaagatcwgttatggtttcatgctaaccgccactgakgcttggttggcttttctctcttgcttatcacagtgacatctgcagantaccctgggcattctgtagaaagtgtgcactgcctggggtgggagttgatgggggttaggattaggtagaccccctctgtgctcccacaatctcctgaggaccctgagccccagtcctgaccacatcctcctccagccattcttgatgtgtctccctgctcaattgggacttcttgagcacagggacccttgtacggaattatctttatgtgactgtcacatatcttggaggtgaacttctggagagggggtcagagggagaggcctgggtgagttgtgctgccttccgtcatccccctcagtctcgag

SEQ ID NO: 2122 - DNA, 1120 bp, Homo sapiens
  misc_feature (994)..(994): n equals a,t,g, or c
  misc_feature (1045)..(1045): n equals a,t,g, or c
  misc_feature (1049)..(1049): n equals a,t,g, or c
gttgcagaatttgggcacgaggctccccatgccaggttcctgcttctcatggtccttctcacggttgttgggagttttcctatctctccagtgctcttggaagacggtttatggtatattatcaagggaagcctgaaagggaaactgctagttgtgttcaccacccaacgagatctggagtcctgccttctttctacacttagtcacacagacctagccccacagccctctagttgcagggcttgattgagaaaagtatgcagaggccgagagtgtgtgtgaccgaccacatcatagccatcgaatgtttatcaattcccattcagtgtttcagtgaatcttcagtagtctctgtgttctttgttagtcacctggtttagatgttccatgaattgttcttcctcttctagcaatgatgaccaacgtctatgaattgttaatatttaccggggactgtgctaagtgctttgcatgtgtatttttcatttggtgttcgctataactaggagtaggttgttttgctcctttcacagaggaggaaacaggcttggaaaaggtcactggcatgcataaatcccaagctagtcagtagcagagctagtcggtagcagaactagtccgtagcagagctagtcggtagcagacctagccggtagcagtgctagtcggtggcagagctagcctttgaattgaggtttttctgactccagattccatgccttaaactgacttcctgaatgtatccactgggataaatttctcaaaatggaattggtagatcagatgatatatgagtttaaaatatggatagatagttccaaccggtttttcagggcattgcctggtgtttaccattcttgkgtatgtgcttatttgcaccascagtatttatcttttagttttgcttttaaaaacaaatcttgtaggccaggtgcggtggctcacgcctgtaatcccagcattttgggargccgargtgggaggattgcctgancccaggagtttgaaactggsttgggcaacatagcgaggcccaatctcccanatanataaatgatatttttaaaaacaaaataacacagagcccttggaaatcaaaaatctagcaggaggaaaaaac

SEQ ID NO: 2123 - DNA, 755 bp, Homo sapiens
  misc_feature (512)..(512): n equals a,t,g, or c
gattttctgtaaattaaagttgtttttactaaattatgggccatattttttggatgtgtgctctgaaactaatactgcttgcaaggagaaaaaaaggagatgcaagtgtgtctaatatattggatacataaaagctggagtatgcataatcgtcttgcaagagttcttaaatctctgtatataaactgtttaaaagtaaattaaaattattccttaatgaaatacaaatctgaagtcacttgaataactaatcattttatgacccatgcagtgaatttttaatgcctacttctacctgattattttagatatgtctgtgttgtaaattaaaagctacataaatcattaatgtgttgatacagatcagtgaactgcttacactatatgtgattccttaggacatacaatgtctgattcacctccctccctttcaattatatggctgccaggctctttttctctattcattttttgcaaggtcttatttggtagaactgcattccagggtcttnatcactttcccaagaggaactgatgtttccaatcaaaagagggctcacactgcaaaaatgaacaggtcctaaatccaagagtgtgaacacacaatctacgagggagaagtttgcttttatttttgtttttgttttagtaatctatgctcccaagaaactgtagcaacgaaacataacctctgcacttttttaggtcattgcagcctttttaccttccttgaaaatgtcgtgccctttctgtac

SEQ ID NO: 2124 - DNA, 2388 bp, Homo sapiens
acgaggtagaaaccttgaaattttagaaaacatcaatttcatgcctaatgttttgcctggtataattgttgagcccagagactgtttgtacttgaacagttcaggaagaaaagaagtagaaatgatttttgttgctgccacacttcctacttttttgtatgagcttaaacctatgtcttgaacatttatatcaccattcttgcccctgaacacaaatgaattttttatctttattttatgctacatttctatacaattaaatttatattttcaattgtttgtttgcttgctcccattgggagtcgttaaagtgtaaacagggcatagggactgcaattaaccttgagaacaaaagaacaatttatcactttaccaaacaacaaaattcactcttattgttaataattcataataaaggcagcaactatcaattaagttgagaacagaagtggcaaaacaggcacagtcatcaaatttgcaatagctaactgctctattctgaattatcagcagtagctgagaactacccaaaggtttgctgatggccacagtacagaacgattagtgaattcacggctgcatgtctggtttgctctatttcccaaactgagtaaataaatgagagcttgctaatcaggactattaggggttgctaggaaataaaaaatttgctactatgggctgtctccaacctagcaaggagtttgacacaaaacttctattacacacggttaactagcacttaaaacaaatatatctataagaatttatcagtactggtctgattcgtaggctaccccaaaaccctgcctagccaatgaagtagctggaatagaaggaaaggtaactgttgccaactgattgaacaactttttggttctttttatttgtaacagtgtacccccaaaatctgaggtgtttgagggttacctccctctgccaaacacctagacatttactgaacagacttttactacgaagtgttaatggaagtcagggaccccaaatggagggactggctgaagccatggcagaagaacataaattgtgaagatttcatggacatttattagttccccaaattaatacttttataattttttacatctatctttactgcaatctctgaacataaattgtgaagatttcatggacatttatcacttccctaatcaatactcttgtgatttcctatgcctgtctttactttaatctcttaatcctgtcatcttcataagctgaggatgtatgtcaccataggaccctgtgatgattgtgttaactgcacaaattgttcataactcatgtgtgtttaaacaatatgaaatctgggcaccttgaaaaaagaacaggataacagctatgttcagggaacaagggagataaccattaggtctggctgcctgagagccaggcagaacagaaccatatttctcttctttcaaagcaataggagaaatatcgctgaattctttttctcagcaaagaacagcctggagaaagagagtgtgttcctagcaggaggtctctgaaatggctgctctgggaatgtctgtcttatacggatgtagataagggatgaaataagccccagtctcccgtagtgctcccaggcttattaggatgaggacattcccacctaataaattttggtcagaccagttgtctgctctcaaaccctgtctcctgataagatgttatcaatgacgatgcgtgcccagtggaacatgcaacttcattagcatttttaatttcaccccagtcctgtgatctcgccctgcctccatttgccttgtgatattttattaccttatgaagcatgtgatctctgtgacccgacccctttcctgcttttctggagggtaaggacccctgaaccccttgcctccacggcacgagctcgtgccgttttttcctgtttttggattttatgtaaataaacagagtcataaatttgacactctcaaaatatcccccatcagattcatgtaagacttttattttggtgatacttctccacaaccatcgcactacaacttaccttaatccactcaactaacacttacatatttggctttagagatgtatatcaatatcttctgtggtctggagataattcttatcatattagcaccttagatgtaattgccagtattcatgatatgttaaaaaattattaaatgtctactaaatttgctacagcttagctacttcacgagactctaaaattcggttccctgctatactcttaaatttcaaatataaacatatatacctcttcccttgataaaatcttacttccgatctgtatcttttcttgacactttccttctcttgacacttttggttgactgggtctgtatgttgaaatgtctgccttgatagata

SEQ ID NO: 2125 - DNA, 1245 bp, Homo sapiens
gaattcggcacgagtgcttccaggtaagagccagctgtggtaaaagcagatgggtatgtacttgatctttgtttactgtgtggtactcttttttgtttcagccctgacgggggtggctggtggagctcctagtgaaatgcactgaagtctctgcaggggggctgcactagctccaagtcttagacaggcagaaatgtgatctctttccctgtcacactcctgtactggggctcataactctccatgcagatgcacactgtcgtctgtctccaggccatagtgtgattgagaaccgcagaagacacctctcccctggctctccactggagtggtttcacgctggaactcctcactcagcccaatacagacagctctgtggctttcctgttctccaatgtggtaatgctgctgattgaagcagagagggagaggggctccatcttttggcacatgcaggtgggtgtcagctgtggtgctgtcagctggctgggtcagcctaagctcagacccgatggacctaatagacatttacagattattctacccaacaactgcagaatatgtatttctcatctgcacgtggaacattcccccaaattgaccatatgcttggccagaaagcaagtctcaatacattcaaaaaaattgaaatcatatcaagtatcttctcagaccacagtggaataaaattagaaatcaataccaagaggaaaaaataaggagtttttcaataggtagaggaaggagaatggtgccctggggttaagaacacattaacaaaagtacaagaggcatgaaaatgcagtgtgtaaaggaagagaaaagttaatgatgcaccttcatggtaaaggggtacaaagccggaggtagtggactggacgaggcaaacctccaagcccagagcctgtaaatggcctgctcgatggtgtatgggaagcctcaggcagtaacagctgagttggtggcagaatacgcaggtggtgggaaccccagggttgatcacagacctgtcagcatgggctctyagaagggctycagctggcagctgaaacggttgggtgggarcagggtggccgtgctgstgktctttygctgaggaaggcggactyccttagctggagcaagggaggctggcagctgtgggatgcgtggcccgattgcacttcccttttataggagtggaggtgtatttcgctgttggggacatgcaaacgtgctcagcctccccctctctccctggctcga

SEQ ID NO: 2126 - DNA, 431 bp, Homo sapiens
ggcacgaggtgaattgtcttctccacatatccattagcagagtgcatgttcggtaccaaagggtggtgtgatgcaagctctctttcctgctgctctcgtagtttcctgtgttgctgtgaaatagaaggtgggataaggcactttggttctccaggagtactttcctctaactgccaccgtttttaagcttctcagcagtgtttttcacaccctgctttccgtgtgcatgtcttgtcacttatgattaaactaaacacaagtttttccatttttaatgctgctatgcttctatacctctggtaagtttgatcatcgtgttctgggttgggagggtgagagttcttgtgattccctttgtacttccctgacactaacacatgccctgcacacccatcatgttgcatcagtgtccatggtggtggtataaaatt

SEQ ID NO: 2127 - DNA, 1011 bp, Homo sapiens
  misc_feature (863)..(863): n equals a,t,g, or c
gattcaaaatgcatggcccagctgctcctcatattgaagttgcgaccatgggatttggcaacattgagctccggctctgggcattgctctcacagctgagagtgacgcccaggctctggcagcccagacttgtcatcctgtaaatgaacaatccccagtccccgggcctcattttattcacttggctgagctgcctgtttgctttccgttctgtgctcgccagctcactaagcaagaggatccgtgcctgactgcgtggagaagctgtagaggaaatggccaccctgactgtcccagcacctmccggggtggcccggggcctgggscctgagcagaactgtgataaagggaagcagggaagcagtgcgagarccctgaccaggtgcargagcctgattccgaatccamctctgccatgggcagattgcatgatgccatcagagccctctaamctctggccttcagttgtcacacctgtaaaatggggaaatattctagagaagtggstcaaaacctgatcatccatcagcytccccccaagaacatggggacagtgcacatggcaaggccccatgcccagagtttctgattccacagtttgggatgaagcctaagaatgcgcatttccaacaaggcttctggtgaggctgatggcccagggacctcactttgggaagctctgtagtaaatccagtttctcagccagtctgctctgtagagctcctgagacagactctttccctaggcctcccctgaggttcttacttaagcaagtctccatttttcaaaagctctgccaggtaactctatatggcactagggctgagaggcacttggtggatgtttctaagatcccacgtagntctcacatgccaggatgccatgattttgaagcagagtgcctcctgccttgccaaggctgacagcacacacagggcaaaacgccatcgtcacatattggaatttcactctttgaaaacctggtaatcgtgtgtcccatttcagctcgag

SEQ ID NO: 2128 - DNA, 569 bp, Homo sapiens
attcggcacgaggacttattkgggctaatcagcctaaagaggatgatgcatataatatgcataggagagatctctctgtctgtgtctgtctctgtctctgtccctctctctccctttctctttgcaaaacacgcattcactgttgccgtgaactgccacagatagctccatagtgaaactgaggctgaaaagggtagagtaggggcacaaagtgagccgtggctcttcatggcatcactcagactcagctgccttgagccagctccacccccgactcccaggtattcaacataataaatttggtggtgttgttttgttttgttttgtttttgtttttgtttgcttttttttgagatgtagtctcactctgtagcccaagctggagtgcagtggcatgattcggctcactgcaaccttcacctcccaggttcaagcgattctcctgcctcagcctcctgagtagctgggactacaggtgcatgctaccacgcccagctaatttttgtgcttttagtggagacacggtttcaccatgttggccaggctggtctccaactcctgggctcgag

SEQ ID NO: 2129 - DNA, 1223 bp, Homo sapiens
  misc_feature (243)..(243): n equals a,t,g, or c
  misc_feature (1218)..(1218): n equals a,t,g, or c
ggcagaggccagactttggacctcccactcagaggtttctgtctccatcattctgacctgctgcttgtccacatgtgggccccaactccacttatccacctaggacttggtaaaatgcaaatctgagtatgctgcttctttactgaacacccttcaatggtttgccaagtctttagcatgtggcacatgatgtccttcacaccctgctccctgccttgttctttggccttgtgcctccctatnggccccgcctgcctgcccccggtccccctccccctcacctccaacatccaactgaaagccaaggctggtttgctcctgagacaaaggctctgctccattgcgtcagttcacctccctgccctgctggtgtcagcaaggtaacaatcaagctggtgaccccaccagcctcatctcccagccggtcctgccaaaccttcttgacattgccagtttgtgaccgtgaaggccacatggtcctccaaatcstttctccccaagaaaaggtgcaaaattgaagcacacatgtagggggaccctgggagttcaaggagcccaggttagaaatccttaaacccagcctgcttcacacaggggctggcttgatgaccgtgagtgctgccttcaccttttccccactgagctaactcctaactcctcacccgtgacacggctcaagatcgcttctcttagaaggaagtcccgatccgctgctaccccacatggcccccaagctggattggtgcctgcgttcgttcccagcgctgccgtgaaaagtgactacaaagggagcagctggatacaacagggatttactccttcccagttctggaggccagaaatccaggtgtcaggaccgtgctccctctgaaggccctaggggaggacccttccttgcccttctcagtgtcccgtggtgtctggcatcctctgtgtccctcggcttgggacagcccctctctaatctctgcctccacctgcacatggccatcttccctgaatgtgcctccaaaactctctcctttataaagacaccagtcattggacataagccccaccttactccagtgtgacctcatcttaaatccatgacatctgcaaaggtccttatccaaatggcccttatcccaataaggtcacattcacagggatcaggggttaggcctggaacgtatctttttcagaacactattcagccagcccacaccagcgcccccnacagg

SEQ ID NO: 2130 - DNA, 1626 bp, Homo sapiens
aattcggcacgagacaacaccaacatatctgcagcccatagtgcaaatgtccatgtatgtcagattaaatgttacttattatttaggtctgttttttaaattaaagtttgcacttgctttgcagccagccaggcagggagtcattacctagctctttcacttactcatgtgccaatgtgaatgtgttacttcacttctcctgcctcttgtctacagtgggcaggaggtaagcctcacggtgtgactgtgaagccaagtgaaatctcacacctacctcagaggcctttttcccactctccttttctgactcttttaatattttctcaattatttatagtaataataataatacaatgccaattgttcattcattcatccatttaaatcccaaaggaatttaaaagaagagtaacatttaacctgacaaagacaaaaggaggaagctttttaggtaatattaattatcataaagcaacaataataacaacaataataatagcaagctcatataagcaagaagcaatagtcagtgtgtcatgttttgggggaattaagaatttcaaatagttcattttaacaccacctttctcattccttattctcctaccccactggcctgatcacttctagaaacttccagattctttacctcttcatgacatttataattgctgttctttttttggaggtacaatatacatataaaatttaccatctttatcatttttaggtgtacagttcagtggtaatatatctaaatttatattctttatttttctgttctttatgtctaggacatttcaatcctcaacacttcacattgctaaatcctcatctctcaagcctcagcttaaatattaccttttcagagagaccttcacagatgatgtaatataaatcactctcccctaccattattctcaaagacagaaatctattttctttattttactaatcacaggctgaacttattttgctgactttattatctggctctcctacttgacagtaagttcaacgagggccaggacaaagtctgtaccccagcagttagttagcctgggttccatacatatcatttactcaatagctatttattaactggataaatggaaatgaatgcaagtgatagggatagatacaggaagagaattagataactaaaccaaggtcaggaaatggcatggctaaacgtttgcactaaatctttaaaactctggaaaaatcctggaaggatctcagtggacaaatgcctccaatacgtttctattaaggaaaatcactctcataagaatgtaggggaattgactggaatgagagaactgagggagggagatccattaagggtctgactgcagtaattcagatgagaaatactgcaaaagcttaggctaagttagtggctataaagatggaataaatagagtcaagggttattacaattgaacagaatgtggtgtctgactagaaataaaaagacaatctagagaagtccaaaatgacttatagatttctgacctgggcaagtgaatagattagaaaacaagatttgtagggaaagatgaaaaacagttattggatattttgaatttgatgcaattattggatatgtttcagtctggagct

SEQ ID NO: 2131 - DNA, 1347 bp, Homo sapiens
  misc_feature (830)..(830): n equals a,t,g, or c
tctcccctacactcctctccagccacaggagttcctttraattcttggaacatgccccattcccacttgcctttrggactcactcacgctgtccgtctgcctggaacacgcttcctccttctgcttgcttggctcagtcttacatatcctccagctctcagcttaaatatcagttcctgtagggaagccttttctgtcacccagtctaggattgcactcattatatgctcccaaatatagtgctcccttcatggtgcttggtatgcctagtgcaattctcgtttactttcctgagtccatctcattctccaagaattgtcaccactggtctttatactcctggaaggcatgaacccaatttattgtcttgctctctgctgcatctctgatagccagcccaatgccttgccataattgttgaaacaaaatgcatgttwatctattgaaaaaaaaatttttttttgagawggagtttcactcttgttgcccaggccagagtgcaakggtgccatctcggctcaccacaamctycgcttcccaggttcaagggattctcctgcctcagccccctgagtagctgggattacaggcatgtgccaccacacccagctaattttgtatttttagtagagacgggatttcaccatgttggtcaggctggtcttgaactcccaacctcaggtgatcctcctgcctcggsctcccaaagtgctgagattacaggcgtgagccacctcgcccagcctattgaaaatttgarttggagaataaaaggattttggaataaaaattaaaacaaagcttcccatcatwggayccsccttatgtancttgtacctgtggcaaaatacggarttgtcttctatcarttcttctgctgaagcccagggaaarartgtwtgtaaaaatgtctccctgtggctgagagccagctttatctttttatcctagtctgggctatcatttttatttttatttttatttttattatattagagatggagtttcactacgttaatgttgtccaggttggcctcgaacccctggctcaagtaatcctcctgcctcagcctcctgagtagctgggactacagggatgtgccaccacacccggcttatcatttctaacatgaaaatttaaaagttaactttaaatttaatgcgttaaagtaatctaacccagtaacataaaaatgtgaagttgggctgggcacagtggcttatgcctgcaatcccagcactttggaaggctgaggcgagcagatagcttgagcctggcagttcaagaccagcctgagcaacatggcaaaaccctgtctctaccaaaaaaaaaaaaaaaaaactcga

SEQ ID NO: 2132 - DNA, 741 bp, Homo sapiens
  misc_feature (86)..(86): n equals a,t,g, or c
  misc_feature (92)..(92): n equals a,t,g, or c
  misc_feature (640)..(640): n equals a,t,g, or c
  misc_feature (673)..(673): n equals a,t,g, or c
  misc_feature (696)..(696): n equals a,t,g, or c
  misc_feature (712)..(713): n equals a,t,g, or c
ggaaacagctatgaccatgattacgccaagctcgaaattaaccctcactaaagggaacaaaagctggagctccaccgcggtggcgnccgctntagaactagtggatcccccgggctgcaggaattcggcacgagtccatacggggagcacccagcaaagggccccgcctcccactctgctctgtggtggccatggggatgataatttgggtaaacccaactggcttctgggagagcaagaaaggatgtgaggggtaggggatagaacagcccggggcagacaaagaacctcagcccaggcaggtagggaacttgagacctccaaggtctgatttcccctcacccccaccggagggctccattttgtactctctaggctgttggcaagaatgcggaccagactctggtgataactgctctgagcaccaggcagctcttggttctccctgctgatggggggctcggtggcacacttaatcctggaaccatcactcatccacgagccacttgttgagcccctggcactctctcttgtcccagcatcactgctgaccctgtcagcctctgagcccttgctcgaaggggggcccggtaaccaattcgccctatagtgagtcgtattacaattcactggccgtcgnttttacaacgtcgtgactgggaaaacctggggntacccaatttaatgcttgcaganattccccttttgcaanntgggttataacgaaaaggccgcaccgat

SEQ ID NO: 2133 - DNA, 962 bp, Homo sapiens
  misc_feature (294)..(294): n equals a,t,g, or c
ggcacgagggcagactcagggcaaacaacgggaaaataaaaactcaactggtgaagtcagacaggctaagttgagctacataaaggggaactgagccagacaagggaggaaagagaggtggaggaacctcacaggttggttgtcgtggaaagtttttgttctggctgtgaaagtaagaaggaacataagatttcaggaagcacctgccatctggatgaaggagattgagaatggcagcmattgggartaatggattttaaagatatcttggtgtgcattaaatgcactcttcancccttgggctttttctttagagactgagtatagatttgaattgctttagattatatattttttgaatgacagctgtttctttgaatgtgactccacaccaagattkgaccacaaagctgcctggcatttacagaagaagccaaatataacatggatcaatggtaaaccactcttgataaatacagagcgggcatctcagaraccccgttagcttcacccttgtgtcctgagatgctggctctgaccctgggggctctgtgaagtccagtctgaaatcaccctctagatccacccacagtcccttccaactctaaaagtcattgtgcaatgccagccttgcctcacttttagtcacagacactgaccacagggaaatgtagactctttctgattacacatctgagttgccacattttggaaaagatgcccttggcatggagcctctaccggctctgggccatggggtgtggttttgtgaatgggacccactgtggtgccatggagtccaggtaacatgacccagttctctgccttgcctcagagcggacgtctagttaccaccgccagcctctgcaagacttctctgattacccaatattttcctcttgtctgcagacatgacttctcataaatccctttgctgtatcccctttggaacagggctcgag

SEQ ID NO: 2134 - DNA, 943 bp, Homo sapiens
gtgtattttgataactcagtttcccaccttttttctccaatcagagtcccgcaagagctttatttctatgctgcaatttcaaatgacctacaaattcttagaagtgtaaagaactaaaaatatgtaaccaactaaaattgggttgtgggaggctgcagaaagcagagagagactaattcaccattgctcaaaataaagtgtcaatactgtctaaagaatgtactctccaaacttcacatcaaacttttttgggatgcagtgcgatgtggtacagagagtaacaggttttggagtcagatggctctgaattggttgacactcttactaacttggacattcgaaagttatgtagtcacttattttcctcatctgtagagaaaggctacactggtgaaatgagatcatgaagctaaaatgcccaaaggtaggcctggggcacagttggttatcattaataatagttattatcagttgtagatacttaggaggactaaaataaatatggaacccaatatcctagtagatgagtaagagagggttcgcagacctcgtgggtgtgaacgtarggagtgttgtatggagtcagaccaaccaaacaaagggagttggcatttgcggtcactcagattttatgcagccaggttactgctggctctggatggttgacacacagtgtgatgtttcactgcatttgtatcaagataatggcgcaaccatccccccaaaatccagcattattcataatcgcatctttcatcatcaatttggggaaagtctttggtacacagtcaattcctggggatgcaaatgatgatttcttccttttttttttgagacggagttttgctcttgttgcccaggctggagtgcagtggcactatatcggctccccacaacctccgcctctggggttcaagcgattctcctgcctcagtctctcgag

SEQ ID NO: 2135 - DNA, 1120 bp, Homo sapiens
  misc_feature (68)..(68): n equals a,t,g, or c
  misc_feature (133)..(133): n equals a,t,g, or c
cttgctttggcctcccaggcatgagccaccatgccaagctgttttctctgttttatcctggaatctcnatgggcctcagcttagcaattgtgagggtgggtatgcaggaggtggggtgtgaggaggggctggnaagcaacctttagaagcaggtctgaagggacttgtcaggggttccccaggtaggaaataggggtcacctgtgcccccagcccacctgccattgaggtgctagcccccagaggctgttatctttgtatagatgctgggggcatcaggacagcctgaaacactgtttccaggagtacagcatagaaaataagtctttccatccaaattggaaatgaaaaggccctggtacttgacagatctactccagtgacttggaacactgtgtgggagacttgtccttggcagcagtagaaatggggcggctctgaactttctctctgtaaccccaggcacatgtgtgcagacttgccaggccctgtgggcmaagcggatgtaggacctggctcttatccgggcatttggtaactcgaggaaaatggacttttcctcttctgctgcttttgtttttacctttggggccttatcatttgtggcatctgccctctaggacctatagcttttgggactgctggtagacacctattctactagcagagttttttcccccaaggcaggtgttttgatgagggcttgggtcacagcctcgggactcatggctgctctgtatcttccatcctgctggcctggaccacacggttccatgactttgccagattccttggcaggtttcattaagagagatgcacaggccggacgtggttgctcacacctgtaatcccagcactttgggaggctgaagcaatcagatctcttgagctcaggagttcgagaccagcctgggcaacatggcaaaaccccatctctacaaaaaatacaaaaattagcccacgtggtggcacacacccgtggtcccagctacttgggaggctgaggtaggggttgagccctaggggttgaggctgcaggaagccatgatagttcccctgcacacttcagcctgggtgacagagcaagaccctgtctcaaaaaaaaaaaaaaaaaactcgag

SEQ ID NO: 2136 - DNA, 402 bp, Homo sapiens
ggcacgagcatttgcacacacagccacaaacttgcacaagcagcacttgtacactgacacatatccgtttgtgcctatacagtgcacacttacacatttgcacacagctgtgcttgctcacacatttgcacacacccacctacacacttgcacacatactacacacttgagcgtgcagcacacatacctatgtgcatacatgcacatttgcacatgcacacagcagtggcacacacttctctatcactctccctagtcactgttctcccctgtgattcccacccctctgaccgcccctgctcacttgctgccccctccactggaaggggcctggcctggtgccctgtctctgtctgtctccaccgtgcagggaggtttcacaaggactggctgatgtctcgc

SEQ ID NO: 2137 - DNA, 214 bp, Homo sapiens
ggcacgagcggcacgagtgtatgtgtccctccaaaattcatctgttgaaacctaagacccaatgtgacagttttaagatgtgggaccttttgggaagtgataagtcccgatggctctgcccacatgaatgtattagtgagtgcccttgtaacagggctggagagtactatctacgtaggccctctttgcctttttttttttttttttcctttct

SEQ ID NO: 2138 - DNA, 570 bp, Homo sapiens
ggcacgaggtcgcatgggcagccctggggctctgttagctctcctcccgtcccttctccctttttcctggggcctgggtccctggccactactgtcctcacccaagacgtaggcggccaccaacttttgtcccagggagacgtgcaggacttgaggcagctggctgcagagttcgtccgggagtgggagcagcaggaaggccacagacacaatccccgtcagcaagaagaggaggaaggagctggtggccagttgctggcgggggtctgagaaacaagactcatcagatgctgcagcccccactcctgcccagcccaggtcctccagggagaagcctgaacaaggaagatgtatctacttttttttttttaattatcttttattttttgtagagatggagtcatcactacgttgtccaggctggtctggaactcttggcctcaggtgatcctcctgccttagcttcctaagtagctgggactatgggttcatgctaccatgcctggctaatttttaagttgtttgtagatggtcttgctatgttgtccaagctgatcttgaactcctggc

SEQ ID NO: 2139 - DNA, 1811 bp, Homo sapiens
  misc_feature (5)..(5): n equals a,t,g, or c
  misc_feature (1024)..(1024): n equals a,t,g, or c
  misc_feature (1127)..(1127): n equals a,t,g, or c
  misc_feature (1160)..(1160): n equals a,t,g, or c
  misc_feature (1728)..(1728): n equals a,t,g, or c
ggcanagttttctgctaattctaaaatacatgtcatatctcagtctgattctaatgagtgctttgtctcttcaggctgtgttttttcttgccttttagtgtgccttgcaattttttgttgaaagttgggcatgttgtaattggttatagaaatttaagtaactaggcctctagtttaaggatttatgttcatctgggtaggagttagtctttgtttaatgtttactgtagctatagatgccagagacttccgcttcctctcatgtcctaatttttatctcccttttgacttctagcttctctaagtattcctcatcagaaagagtttatttcttgcatttcttttatcygtaatccattatcatgctcccggaaccctgtaggtctggaggtaaggcgtgagaacattctataatattccagttcaattgtaatcttttagtagtctgggtctttgsctggtgaccttcacaaacatttattctttttttttttttgagacaaagtctcaccatgttgcccagcctggagtgcaatggtgcgacctcagctcactgcaacctccgcctcctggttcaaatgattctcctgcctcagcctcatgagtagctgggatttcaggcgcacactatagtcacccacttaggtgagttaagaaggttaaagggggctgaagtgagaggaatctcctccctcacatccgttggacaaggtcctgataaagtatttcttcataagagtaggacttttattaatggagagggctctgggtatattgcttaaagattagtgtttctcttctgctgttagacccgccaaatatttggggattttccagttatctttcatcaattgatttctagttcatttccactgtggtctgagaacacactttgtataactcttattattttaagtttggttagatgtacattatggcccagaatgtggtttatcttcaccttgaggtaaagtccatggggcccaggccattctttcttccaagctagtacacactcagcctncagcaattcactgacattgccatttaagtattcctaccagtttatggcactagtggattttaccccaggtaggtagatcttggctgkgagtctctggatttgnctctctagattttcgaaaggcagtttgscttgnaaactcagktctttgatgagttcaagaaaagttattgattttctctttgcttggctttttcttgtggggatgggactgatgacatccaggctcttttaaagttggggctgaaacttaaggttcatctttcatcttacgtttttgrtacatattcctmwgttctactgkttttagcwttcctatatctgactgcccttagtgtaccttctatactcaatgtactgctaaatcttgtcctttttagtccaacctaaaagtctttctcttggcttgtacatttacatcatttacattgatcatagtttctgtgaaaatgttttagtttctttcacgttatcttgtatgctgtgtttgctttattgcttcttttcctgctttctactctattggttgcattttcttctgactttaaagttatactttcatttttttttcttctggaggttacaccaggccaattagggctcataactaaatttatttttctttattaatttttaagtttctatagcctatcttccttctgaattaaagaagtatttttgcacacctttaaccctcagccacntctggcttaccatgaccaccttctacccaccatcccctcggtattatgtgttggtattctccaggattaagttcagactcgag

SEQ ID NO: 2140 - DNA, 462 bp, Homo sapiens
ggcacgagcccagctttagttgctggtgcccagatcatatcgtggaattgtacaggtgtaagttaaaaataaacttagagcaaatgattctcttttgattccctacccaatccacactcttccctgtcccctctatgtcattcctggcaggtggacatgaagctccaggtaagaggcaagcatccgtgttcaaatgaccattcccagtttgaatgactttgtttgcaggatcttacttctgcttaactaaatttgtaccccaccctctatgcacttaaaatccctttaaaattcgttgatccttagttacctccctggagctccttctatttatacacaataactggtttccaaatattgaaaatcaactcttgtagcccctctagtttttgtttacttacttgcttcattccccacgggctgaacactccagttccctggacttttctcatatgatatgta

SEQ ID NO: 2141 - DNA, 534 bp, Homo sapiens
ggcacgagaaaattcatgaaaagtatctctttttttcaataattagcagtcttcataagtctgctagtggtgttgattacttatttaatatttggcttactggaaaagacgtccttaattttatctttcagtgtttcctgaatgactccattccccttactctagtaattagcaagcatttttcttgaacacagaatacacacattcacacacttcagtttttaaagcacagttaggcaatgctaatagaaaagtgccagaatcagaattttcttaattcctctgtgctcaacgtctcttcccatccccaagttcttgccattggggagaaaattcttacttttgctatttgatttaatctttaattctatctccatgattttctgttttgttttttttttccttaggatgactgtcttttgaaggtttggtataatgtagaaaactggcggacagctgttacttctccagatggaagttcagaaaaacaatcccaaggagaaattgacttttcttttgtgtatctggcccatc

SEQ ID NO: 2142 - DNA, 1011 bp, Homo sapiens
  misc_feature (383)..(383): n equals a,t,g, or c
  misc_feature (925)..(925): n equals a,t,g, or c
  misc_feature (948)..(948): n equals a,t,g, or c
  misc_feature (976)..(976): n equals a,t,g, or c
agcaaaaagatacacgggcctaagataaaagatcaactaaacgtctcgtaaagcctctaaacagggcaggaaagcctgggccaacgtggagatgttacatcaaaggcagcagcagctcagtgatcctcacacacagtgggctgaagttaaaaaaagcagagtcatcagtggttcacaatttacattataattgtaatttattatttgcatgtatagttatattagtttatgctttgtttgatatttcatgtttaccatatctttatttgaaatatagtaaatatttatttctatacatatttggaaaaaatatattctgaacaactttttcttaatgctagcatccctggtgttgtggcacttttcagaataaaccctagcanggtcaagatgattggcattagccttcttctttaatcatctcaaaccattgttccctttgcttactatagtctttctgtgtttgcctccttttcatttcttactctaaactctttcctgccatagcctttgcatttgctattccctttgtctggaatgttcttgccatgactctgcatagtggctttactgacacatatctacaacacataatttgtacagagatctaaatattttttccagatttacattcaatgacctttgtataacagatatttctattatatcaagtactgtgttatctacttggaaatattgtcctatcttaactttgccacttgtcaattaattaatatcattgccatttgaggagtggaggaatttcagagtggcttagtgawtgcacaaagtcatacagctaataaacaacaatgccagggtttgaacccagggtttctgartttggatctcttttgcattaatctctgacatcactcatgcttttgcctttctgtatccagcagtctctcctatctatttttantaataatcaatggtagtttttgnaaattgtactcctgtgtaactgaakgcntttaakgctttaatttgmacttgtaataatcattg

SEQ ID NO: 2143 - DNA, 1665 bp, Homo sapiens
  misc_feature (1004)..(1004): n equals a,t,g, or c
  misc_feature (1010)..(1010): n equals a,t,g, or c
  misc_feature (1122)..(1122): n equals a,t,g, or c
ggcacgagggaaaagttagaaatataataatgttagaccttaagagtaggacccacgaaagttgcaaacacttctagccttattattcacatacctctcatgaagtttcttggttcttgactctttctattgctaccggttacaacttatgaaaatattacatattgacatggcatgagtttttactatcgttaagcccaaaagctttctcccgctgcttcaactctaaagaatgatcaccggaaaattctgcattgacttcccaggtaatatcttacctcagagttctttatgcctctgcactggtggtggccattcacactttgggcaggttcagggtagctgcaaggtcaaagcacagtatctggaacgtaagtgattcagtatccgtctgttgaatgaaggacacttttaagaaaytttctytcttctagactaaakacagagagmgaggaagatgaaaagaaactacaggctctatctgggttatgctaacttcaaaaatagaagggaccagtgtaactgggtaacacagaaagggggaagatctgaagacttctttggaaattctagcaccagacagccacaggaaagaaaggacccaaggactccaaaaaatattacacaatagaaaagctgggatttggggatgaggcctaccaggaatccatcagcatgtacttcaaaacctctgttactaaaaagacaagggaagaagtttggcccaaagagccaagttggaattgctgatattatacagctgaccttgggtaagaaggaggagaaagtgtattaagcgtgtatcagttggctaacagccaggctgtgactgcttattcagagaactagcattcagggaggagggcttggaggctttccatgcaggagtgggaaaaatgcctcttatttcttttctgggatatgcacccaaggggagagacaaacttgaaaccgcatacaatatgggaaggttctgggcttggcatattatagcatctcttctncttttncacaccattttctycagaaacaactctgaatcacaagaagttaaggaaaatgcaatttcaaccctgtgtagaattgagagacacctcacaaatagatgtggttcccagatancaattttctagggaatcttctcaggtacttggtgtggaaaggactgacccatgtcaaaccttgtcacctctcttgtgtttgaatacaaaatgtggcaaaactaaatcttggcttttctggggacaaataaatatgacatgggtggattaatggaaagacatttaactttcagtttgcaagatgaaaatatatctgtaaaaaatcctaccacaacagtattcaaaccatatgttaatggctcaaaacatctgtagtactgtaacttgtcctgaaaaccctgctggttttaagcactgacgggaaacagtatgcaagctgaagagaaaaccgctttttgataaatatcacctcctcctttaaccagttcaccccctccccctctcaggatacccatatagttcgcaaagtgttgttacataggaaattctaactcttctcagagttttccaatctataaagcagctaatttgtacaggctacattctgaagctaagaaaacattttcacacaataaagaagagtaaagtctggaatgatctcgag

SEQ ID NO: 2144 - DNA, 963 bp, Homo sapiens
attgggtacgggccccccctcgagcattctgcagggactcatcctggggcaggtggggtcagagggcagatggccaggagcagagccagatggggagcaacagccttccctctgccaggacagggagagacctggctgcctcacagtgagaggtctggcagccagggagggcactggggacaagggcccagccgggcaccctacggagcacatgacccccacctgtccatggagcacacgacctccacctccagctgcccctgtgctgcagacaactcccagggtggcgagggtggcatcctgatcccagcagcgcctgcaggactgggaacctgctgcccacccaccccctgccacttgctctcccttccttgcccaaccccaggagctcaatgcctgctcagggcrggaataaraggcagaggaggggtgaggagagaaaggagtcattaggggccttgctgatccttcgtggcgcctccatgtccctatccctcatgcaaagcactaacctggaggcggagcatttcatcgaagcaaagcatctcctgccaccaagcacgtccacggtgttggggattgattgcttctatcctccagcccactctacggagcacccaccgtgtgacaggcgcggcgctgggcaacgaggataagaaaatgaataggccacgacatgtgcgcctgagaagtcacagactcagacgggagacaggctcgataccacacaccaaggtctggatgcacacaggacactgagtaactcctgcagggtgagcgggtttccagggcactcgacaaccggcagagtctggaagcagcctggaggggaaagggcattcctgacgggggcacagcagaagcaaaggcccagtggcatgaaagaccaaggagtgttgagggaacagagagcagcttggtgttggggcggcatcagcgggtggagctggagccgctcgtgcc

SEQ ID NO: 2145 - DNA, 1573 bp, Homo sapiens
ggcacgagtgataactgtccaaagaaatgatttttctttgctttcttggggcctttcccttttactttgataagtctttcaaggggtttgcagttcccccataatcgttttgataggagaaagattttaaattgggaagctcacagaggcaagaggacagcgtttctcagaattccagtttgaccctcccctacccttcttccttgccacaggccaaggagcgggagctggaactgaagaacacctggtcagagaacaagctcagccgccgtcagacccaagccaaatatggattctagggctctggaactgattgctcccaggatctcctgccagcccagctggcctggcccccagcttcacctctgggaccccagctgctctaagcccaggatctctttccccaaggacccagccctcgcctctgcgagaatgaacatatttgatagattttcttaacaagttagaaaattcagctccttctgtcctggagctagcaaagacttgtgtgatgcctccgaaggggctctgagttctggggtgggagttttgctctctgtcaggtgtgataaaatgttgaaccctccccaccaccacttttttttttttaaaccagggatgtctgttgaaataaaacattcagtctgacaaacattgcctgccctgtccctggatttgtgtttaccttgtgtaaagcaccttccaaatgatcttgagctgcctgattgctttgctatttttcctctctatccaccatctagctgggtttgtggccattggaaaccctagaaatggtatgcacaactttatatgaggcaggatgattttcagagaggcctgtgatcccaaatatgtattgccaatctcaggtacctctggagactgggtgaagtcaggaggttttttctgtagtacaaaatagtgtcaggcataaaaatcctatccagcaggaggtaaagtggcaaaatccctgtccctgaagatgattcagattgacgctggtagtcactggtctggatcagtttggaagcttcacattgaacttgggtgctagagagatacccttggagacttccagagccctagccttcattgaagaaaggagtacagggtctgtagactccaattatctgtaaggcactgtgacgcccagaagtggcaagacggatgggatgattccaaaaacagtgtgcaaatcatactgcaaaccaccactgaaaaatatggctaagggtactaggatccagtagggcttagctgctgtggtttcctgcaggaaagtagcgttgaggaaactcctgcagagaaggcaggagtgtggtgtgggaaatgtgatgaataaaagcactggaaagactacagctggctaccatcaataatgaagagaacacagaagagttgcatgctcagaatctagggactccaggatttctgaggtgctgttgtgcccacacctcaaaaatgtgctgagccaggtcccagcttgaaacaatgaactaaccggggccgggtatagtggctcatgcctgtaatcccagcactttggcaggccaaggccagggtaggtggatca

SEQ ID NO: 2146 - DNA, 1361 bp, Homo sapiens
ggcacgagctcgtgccgctgacataggacaggaatgagccttagtatctttgccatgaccagttgttggtacgtggcctcaccacaaacacagtgatggatttcagagcccagcagctgaggccgatggtcagttatgctctcatggttaaaggtcttccaggcacattctcatgacagccacgatatatttttgtaagaaattctaccaaggcaaaatatgattaagataggtagccaaaacaaacaaaaaagaaagaaaagccgcaaattcctccctgcttgctctttatgcatgctcctttgcaatgtgattttgctattagctccatcaagagatgggtctcctgaatctgagcttgaccacgtgaattgctttgaccactggagcattcacaaacatggcacaacggaggcttgaaaaatgcatgtgccttgggacttgccctctcttgttacttttggaaccagagacctccatgcaatgagcctagactagcctcctagaagatgaggacaagaagaagcagaaatcaagcaccttcccaccaccaggcatgtgagtgaggccatcctagactgtccagccccagccaagctgtcagtgaccacagagaccagctaagccaaactaaaaccgaaaggactgtgggaaaacctatagtactgtgagaaaccataaatgcttgttgttttaattcactcagttttgggacagtgtgttatgtagtaaaaactaattgatatcatttatgtccattttatagatggaggaactgaaacctggagacatgagaaagcccctcaatgaatggaagtctcaaggtgttcattggtcttcctcagagcctcctacagcaagctgggcttgatcggaaggctctgagtttgggggtagctttactcatttgtgttatttgcctaaaccctggagtctactgagatcgagacccccgaatttgatcattaataaatctcttttggatgaataatataaaggtgttaggaggcccttctaggccattgaagccactagaacagaagtcaaggaattctcaatcttcaaagcatgggaaatgaggggtacagggattctccctagcccagttagaaactccttcaggcaggacgtaaaatttatatttctcttctattcttcttcactactgtgctagtcttataagtctattgttcattcattcaacaaatacttattgagtgtgccaagaaaaaagcaaagatctttgccctcatagagtttactttctaggagggaaatagaaaataagcagaataaataagagaaatatatggtgtaccagataatgatgtgtgctaggaattaaaaaaaaaaaaaaaaaa

SEQ ID NO: 2147 - DNA, 1043 bp, Homo sapiens
  misc_feature (927)..(927): n equals a,t,g, or c
gaattcggcacgagtttccatatgttccctagctatttgcactttatgttctgtggaacgtctcgtggctgccactgctgccctaagaaaggcctggctgcaaggctgggaactcggctgggaaacagttccctgactgatataaaccttccctaatgacgaaggtggtttgcggttcctaatctttacaaacaatgtggtgtatgctggacatcactttcctcctagggctctggaattttggtatatgccaggcagagggtatcaatgtgaccaccccccagtaaaaacctcaggcaatgagtccctaatgaacttctcagatagacaacacttcacaaatgtcattacaacttatgcagaagttaagcacatcctacaggactcccctgggagacggctcctggtgcctgagccctgtttcctctgactcctgggagacggctcctggtgcctgagccctgtttcctctgactcccctgggagacggctcctggtgcctgagcccygtttcctctgactcccctgggagacggctcctggtgcctgagccccgtttcctctgactcctgggagayggctcctggtgcctgagccccgtttcctctgactcctgggagacggctcctggtgcctgagccccgtttcctgggtgcctgaggccccatgtgccttttccctttgctgacattgctgtgkattattcactgtaatgagtcttagccagagtgtgactgtgtgctgagtcctgtaacactgaatcacctcaggatgatcttggggacccttaacacatgcctggtccagtcttttgctttctttttttgagacagggtctcattctgtctggctagagtgtagtggtgtgatcacagctgactgcagcctcaacatcctaggctcaagtgagcctcccaactcagcctncctgagtagccaggaacacaggcacaggccaccacaccccagctaatgtttaaaatgtttcatggagacaggatctcgctatgttgtccaggctggtcttgaactcctggcctcga

SEQ ID NO: 2148 - DNA, 1113 bp, Homo sapiens
ggcacgagctgctcttaacctaaaactaaatacacaaaatgtggcgtcaaaaaaccctttacttcactttcctattaaatgtctcgtttagcctgtacttttccttttcgctttggtacttttttacaccatgcccccacccccatccccccacccctactctcgcgcttcccaacgccaccaagattgtcttgataagaactccaggttctcccacgaaccgttctgatactattaattaaaagcagtggcctcaggcagagggctcaggaagtagggagggcgcgggcccgcgcgcacaacttcagggaaaaggtctttatgatttcagcatccagagaccctatttctgaggacaactccgcacccatgtcctggtacatgaaaccatcaccaaacgcgaacgggaagtgtcctcttcctgcctaggtgctgctggggcgctgccactcctgctgaccgggttcagaacccgatttttcgcaaccgcggtggcacccacgccggagtccttacctccccgcgcgggctcaatcagtggggattaccgcccacccttaccccagtttacacgcaggaaggggggaaaaagggaagaaaattaaaagctcatgcagttctcctcccattcttttctagatttgggcacagctcggtgacaccttcaaagccactcgtatagaaaggaccgcgggcgggacgcggccaccggggctcaggttaaatttaatctatagctgagctactcgctcctccaactcacccagtggaccagtgtttgacccagggggcgaaacaacggataaagcagcctccgccagaatttcaaaaactccctggaggccactgaatgttttatgcatcagaagggaagtctgggattccggtcactgtggctaggaggggggagggctcggccagcagggtgagggtgggggcggaggcggtttcagccttaagccatccaggcctcgggtttatggcccggggctgcttctggccgcggctctctaccttgttgccccggcctctttcaaaaaagcagaggttttttgctccctggcgcagcccaaagcgagggcacagattgtcggagctctaaagctgccgact

SEQ ID NO: 2149 - DNA, 495 bp, Homo sapiens
ggcacgagcttgccttgtggcactggcagcagcagccaaccacagtggcagatgcagatgagaaatgtcaatggggctacagggatgtggagatgcaggggctattgggcccctgggcagaatgcaatctggtggctggctctcaaaatggtactgtgctgtagctgcttagggctcggggagttcatgagacccagcatgagctccctgtctggagcagtgccattatgaggtctctaggaagctcctcatgttagtctcagggcctgtgagggttgaggagcattcccattgataggattgcaggagtcttcaatggaaatatggaccactgggggtctctcatctttctccacattgagaaacctctctgcgctcccagctaatcctggctgaccacgatgcctggcttcctgtccttccttggccttggatgtttcctgtcacttctctgtttaatgcaaaaaaaaaaaaaaaaaaaaaaaaaaaaaaaaa

SEQ ID NO: 2150 - DNA, 1099 bp, Homo sapiens
gtccaaagaatctctggcttggagtaggcaagtatgatacaaggcagaaatgagcagtgggtctgaaaactgaggtgatcacttgaattcctatatgtgaaatgctgtgctccctgtcactttctctattactgtttgccaacagctcaacgcttaaccccaagtcataaaatgagggctttttttcacaacataatttgaggaaattatctggggagtatggccccagagaaaagctgttttatggcaagaaagagggaaaatgccagaaacagaaagacataggataaataaaatggtgtgcctaatccagagatgtctcaaaacacacaattgaaaggacgacatacggtttcagaagaaatatctctatgggggaaaaaaaagaagaagacttcacaaaatagttattatgattgaaagagagaccaaatttaggctatgatcaagattcagaacctccagagaaaacaaaaaatatatataggaaacgcataacccaaacataaactagatcagtgtagcacaactttaagcaatagaaaagagaatctatttgaccttcatcataaatcattcccctctgagtggcccaggggttgtgacattgggtccttggagaagaagatatgatttcagtatcctacatcaccctgtactaaataaaatgtatagagtcacagtaacattaatggtgcactgtgattttcaacttttactattagctaacgaacaaatgcagatgacttcattatggttgcatatcagaaattaaaatgttaacaaccttggtcaggcttggtggctcatgcctgtaatcccaacactttgggagggccgaggcaggtggatcacctgaggtcaggagttcgagaccagcctggccaacatggtgaaaccccatctctactaaaaatacaaaaattggccgggcatggcggtgggtgcctgtagtcccatcttgtcagaaggctgaggcacgagaatagcttgaacccaggaggcagaggttgtggtgagcagagatcgcaccactgcactccagcctgggcgacagtgggagactccgtctcaaaaaaaaaaaaaaaaaaaaaaaaaa

SEQ ID NO: 2151 - DNA, 670 bp, Homo sapiens
ggcagagaaaaaatggcagaatcatgcctgtacacagccacacacctgtggagcgccttgtgtacttgactttgttcttttctctgctgaagaaatgccatttaacaaattcaattacttcataagatcaaacacagccattcatcctatcttccctcccccaccaaaggaatgcattctctttgaaagctccagtggaaccaaggaaaaagtttacacccttctaagactacccccggcctactcagcaaggtcaacacctgggcctggcatgcagaccattcttcaatgtgactcagcttccccttccagacctccttgcccaagaggtcaagccccaggccgacacctcttctaacacacactgcttttacatttccattcggaaaggatgggcctttacatgcccatcccctctgggagaaccatcccataacgtcatgcagtgtgaaatgccacatcatccttacgtcctgtctcagctaccacttccctcaatagggctctcctctctccccagctggacgtaagcattttcgccttttgaactacctcttccccttgtgcgtgtctcttctcgtattctgcctactgcatttcttacacagttatgtgtatactcgtcttatccttgatccttgtctcccaccctctatcagagtacaggctc

SEQ ID NO: 2152 - DNA, 1360 bp, Homo sapiens
gctcgtgccgccagtgcttacacatagacggtgcattctctggaattcaccctgggtcagagccttctcacctcccagcacaagccagtagttaagcctcagtgtcccagttcggtgcactgggcaggagatgggtctcccaagaccactcagccatgtggttccttcagctctcagcacagccgagtccaggctgcaggctctccmtcrcaagccaactacagagtgacacatgttctctacacatgccgtgactgawtatgttgtgttctgaaaatatttgggagttaatttgtgttttgtgcctagtgcttcmyggaccggtgctcattgcatccttacagccatctacaagggtgtcaccattatttgtattttattagacttagagaggtgaagtgacttgctcaaaataatacggttagcaaatgactgaaccccgacccaacagggagaatgtgggaagaaatcaacaaagcttatttaacaggtatctgccaagggttggaaaaaataagatttattgytgctccactgagcagaacacagcccatcagaggttactgcaccttcaacgacatgtgcttttgactgacccatcaaaacactggtggcaagagcactaaataagttgcctatcatacttaatctttccaggattcaaagaggagtgtagagtgaaatgacctataagactcctgagcctaaaatataatctaatggactcagctttaaagcgctcattgagaggatggccaaaaaccagccgccacagtgcgaagcacgattcctccaccatccgcagtccactcgcacaaataccctcagtgaaacacttctttctctccacccacttttgagtaggatgaaatggcacattccattttcaaagtgggcagcttgcacgtatcagcagtgccaggaatttggaaaacgataacgtggaacccacagtaacttgctggctgaatttactcacccaggtgacccaggtcgatgagggcttcagagccacggggattttaaatgccgcttcaaagccaacaaggagcagaaccagtgctgattcgtgtttatgataatgacatttgaaaggctaaaaattacaaagttgtttacagagatggacttagaaaataattgtatctaatgtctcataaacataaaagaaagttattttgtggtagatgattgaaaagaaaaaatctcctttaaaaaggaaataaatatactagtttyagacagaaacaacttcaaaggcaatcagaaaattcagtggaattttaaagagggartctcactcaaagaattctctaaaattgcctaaacttaaaagcattatttttctcgagggggccgg

SEQ ID NO: 2153 - DNA, 840 bp, Homo sapiens
ggcacgaggcacgtgtttgcctgtgttcatgtttgcctgagtgcatgtgtgtttgcctgtgtgcctgtttgcctgcgtgcgtatgtacacgtttgcctgtgtgcacgtctgcacgtgtgtttgcctgtgtgcatatttgtctgtgtgtgtgcacatctgcatgtacatgggtcctgtcattgctgcccgtctcctcccgagagctttctctgcacgttggccctgcctttgcagcttctgccagccccgtggcgccgagtggccttcttcccagccccagtgggcgcagtggggtgggccgtcctctgagggcacccgagctgctgcatctcccgtcttcccgcatgcagtcctcagggcacctgtccatgagccccattcacaggagcagtccccaaggcacctgtcccacctgggccacccttggccctgcgtccgtagccagagcttggagggctttgtccaccaggcctgggaccctgggatccttcctcagagtcccccggcgtgggggcagtgtggagggtggcgcgggtggagggtggcccgggtggcggggtgaattcctggggagagcctgccccctggcggccacctgggagaatgcagggaacatggctgagcagcgtcggctgtggagggagggcaggggcaggggtcagggctgcaggcgtgtccctggggctgatagcggtgggatggggtctggccagtggagggtccatggggtctcctagcaaacgcagtggcgctccttaaatgacggtgccaggcggggctgttctccttggttggcctctgtgtcccttcaggctcccaaggcccctcctcacatcctcc

SEQ ID NO: 2154 - DNA, 1590 bp, Homo sapiens
gatttttgtttgtttgtctcttttgaccacctctataactcttatggatattcatcaaattctgtatcaaagaatttaagatttagtcagtaaaatatagctatgatatgacacagcacgattctgtgtaaagccagcaaactaaccagcagcctcagaaattttatggttctttctattgacagtctaaggtcctccctggttaccatttccccaaaagaacaatgaggaatttggaggttatgcattctcgcagtctggggatctgtgatagtcactctgttaggtgtttttgagccaccaggttcctcatagcagctttcaaatctttgttcctcgggctgtagatgatggggttgagaatgggggtcaccactccatagaaaatggagatgagtttgtctgcaaggtcctgtttgtctgctcccattgggtccttagacttgggcttcccatacatgaagaggatcatcccatagaagacgatcacgacagtgaggtgggcagagcaggtggagaaggcctttttcctcccctcagctgaggggattctcaggatggtggcaatgatgaagacatatgagacaaaaataaacaggactgggagtgcaaggaagatcatgttggtcacaaccatgctgatcacgttgatgcagatgtcagcacaggccaactttagaactgccaggatctcacaggtgaagtgattgatgacattgtccccacagaagggcagtcacattgctagggatatctgtactacagagttggtgataccagctgcccaggagccaacagccatgggcatgtaggcagccttgctcatgaccacagggtacctaagggggttgcacatgtccaggtagtgatcaaaagccatcatgctcaggagaacacactctgtggctcccatggcaaaggagaggaacatctgtactgcacaggctgagaaggagatggttttcctgggggtcaggaagctgtcaaggatgaggaggttgtatagcagatgtccaggaaggagaggttccccaggaagaagtacatgggtgtgtgcaggcgggagtcaaggatggtcaccaggatgaggaccccgttgcccagcaggatcaccaggtacaccagcaggatgaacacaaagaatgtcttctccagctatgggtgggcagagaggcccaggagaacgaaccccaacacaggggaggcctcattggacctgttcatggtgcatctgctctgtcacctggaggaactcagaggtcaacctcagcatcctcttactccaaaagtacctggaaggccaggcacaaatccttgccctgctgagcaactggagaatagcgctgatgatttgttcatctctatggggttctaggaacaatgtagtacaggtcaatatttaacttctgcttctggtaagaacaaacaggctaatttggactaactgtcttgcagatgaccattagacaaactggaaaaaatacataaaacattggagaagtaataagacaatgaggaacatagggttatgactctggggaaaaacaaggacctagagatgtaagtctagcacttgtggctgtgattcaa

SEQ ID NO: 2155 - DNA, 177 bp, Homo sapiens
ggcacgagtgggctgtgtacgtgtttgtgccatttttatgactgggaaaatgacagtgatgatgaggattcctagttctattgttactaataccgctatggagtctgaagtgccaggttttaaaacccaggtgtatcgctcattagctgtgtgaccttgagcaagatcttcaacctc

SEQ ID NO: 2156 - DNA, 1014 bp, Homo sapiens
  misc_feature (930)..(930): n equals a,t,g, or c
  misc_feature (949)..(949): n equals a,t,g, or c
agggataacctgtcatctacatttgaaaattaatgaacaattctcgttacatagataatatttttcagtgacagtcgtatttttttctgtgggagggtgcacatttatattcatgaaattttagtttccagctttgaactggcacccttgttaaaaattctgatttttttttttttttaaactctggggattttacttaacaggttctgaaaggcttggaggctataacattctcacattggaaattccttactaggaattacttagtttgaacttagaatgatgatgaacttttgggacttaaatatactataacttttgtcactaggatcaggaatattcagagtgtgaagtcaagtgagtggtgtaatcaaagagtctgaaaagaaccatgagacatcatgtagcagtcttgcctttaggcagtaatgtattaaagctactttgcttattctttgaaaggaacatctctagagaagttccaaagtcatccttggtgatatctttcaatgatgcagaaatcttagtcaagaaattaggaagtcttccctaaatatacattctgaatccttcctgatgtgatagtttatttgccccttttcatgctcttactagcaataagagtaagccgctcaaatgtcactcatcttttcatatctctgaataatgtgtttcctttcttttttaatttaaaggatgttcactaaacaaagttttggggaacaccagaaaagtagaaagaacaaaaaagataatacccactggtattgcactatccaaatatgtaatcactgctaacaattcctgtgcatttttaaaacttacaggcgcgagcactgcgcctggccacattttcatattactatggtatcctttctcaaggactcatggtaccctgtccacttttatcttattaaagggaaattgtgntaatataatggacgtctgnttttgcatgttgaagtggtcacatatgcctgtaatgtggtgctagtgtttctgtcccaaacagtg

SEQ ID NO: 2157 - DNA, 1270 bp, Homo sapiens
  misc_feature (155)..(155): n equals a,t,g, or c
  misc_feature (752)..(752): n equals a,t,g, or c
  misc_feature (767)..(767): n equals a,t,g, or c
  misc_feature (835)..(835): n equals a,t,g, or c
ggcacgagaaaaatcagaaaagaaaattaaaattccccaccaatgataacagccattggtatttttacatgcatccttctgagttttattagtcccatgtatatataaagaaaagttggaatgtactttacagccagctttatatgctgcttttntctctagctcttataaatgcttatttataagcattttctcaacataaattacttttgaaggtttcatttgatggccacgatatgccatcacaattatttttcagtcataatttatgtagctgatcttcattgttacacacatggatgttccccaccatgtggctgccataaatgattctccgatgaccaactctacacatagatccttgtcttcatctctgattatttccttatgatagatttctggtctcatcaggtcaaaggatatgggcatttttaaggctttgatatgtgttatgaaattgccctcctgcaaaggtggcctgggttccactccccatgaaggctcaacaggtttctgaggcctccctcacacctccttcagcatcttctctctcactttcctgcctcagcctcttctccctgggttcccttgtgaaacacaatagtaaaggattatattatcaaatatttaattatgtatgtatctgaaaatattttaaaagtcaacataattactctatttccattagtttgatttgcagcaaattatgcatttagtgtgaagttggaggtgcyttgctggttggagygcanatagcgkttggctgnctacaatggggcgggcgctggtgacaacagctcaggctggtaaagccgtatcaggtccttgcagaggnagggcttcctcccagctggggagcctcagtaccttggagctctgaaatcacaccaacaccacaaatgaccctggggactgggtgtcttagttatctattcttgcataacaaacaaccccaaaacttgtggttgctgaaaacaataaatatttactgtctcacagcttctgtgggagctctccatccgtggccagcagctcaggctcaggatctcccaagaagctgcaatcaaggtggccccatggccgcagtcaactcaggcttgactcagggagaaagtatctgcctccaaccttactcacacgatctctccaaagggctgcttcaggacgtgacagctggcttctccctgagcagacaattccagagaagcactcaggtcggcacgcaaggttttcccatccttttggcatagaagttagagcccagctcgag

SEQ ID NO: 2158 - DNA, 1100 bp, Homo sapiens
ggcacgagattacataaaaacaaacaattctcccaccatattttcagtacagctccgctaatgaacatcctcaaatcataccagacactctgtatttatttttctgatgtacttccctataatctgtttcagattatttttatttacagaaatgattttttccaagattgggaccaccaagaaactacagatgcagacatacgtcatatcactcctctagtcctgaatttataatattatttaactcagtttttctttttacctgagaacaaataaacaaaaataacaaacaccatctcccaccaaaataatacaaacagcaatgaaaaacttttctaagtagctgtgagtcaaaaaggtgaaatttcattgagctgcaaaactaatccagcagttttaggatatgttcacgttttggtaatttagatgactatttctacatttccctatgatccaggataccaagggacctgctgcctgagacgttgagatttagagggctttttctctgttacaatgactcagagcaaatggagagagtgtccatttttcatggatgatgatgcttgtaaattttcattcatatctttgataactgatgtacttagcaacttccagataacattggttagagttagctctgcttattttggttctaatttagaaggaagacagagaaaatactcattctaagtacctactttttgtcagtaactatggtagctactttatgcactttgtgtccatcagggttttccagagaaacagaaataataggatacacacacaaacacacacacacacacacacacacaggtttcacatccatagattcaactaacaggctctaaaaaaattcaaaaaaaaaaattctacaaatttccaaaaggcaaaacttgaatttgtcatgtgctaaatatcacacaaaagaaataacatgtaggcatggtattcaattgaataattaatctggatgggtgtggtacttcacgcttataatcccagtacttatggagtccaggcagaaggtctgcctgagcccaggagtttgagagcagcctgggcaacagggagagactgggtctctgaaaaaaaaaaaa

SEQ ID NO: 2159 - DNA, 1473 bp, Homo sapiens
gccacgaggggaggttggctcttccgggccatcccggcctctgtggagcatggccgggtctatgtgggcaatgttgcctggatgcacgtgctggcagcccgggagctggagcagcgggcagccctgatgggcggccaggtatacttctgctacgatggatcaccctacaggagctacgaggatttcaacatggagttcctgggcccctgcggactgcggctggtgggcgcccgcccattgctgccctactggctgctggtgttcctggctgccctcaatgccctgctgcagtggctgctgcggccactggtgctctacgcacccctgctgaacccctacacgctggccgtggccaacaccaccttcaccgtcagcaccgacaaggctcagcgccatttcggctatgagcccctgttctcgtgggaggatagccggacccgcaccattctctgggtacaggccgctacgggttcagcccagtgacggtggggctggggcctggaggcccagatacagcacatccacccaggtcccgagccctcacaccctggacgggaagggacagctgcattccagagcaggaggcagggctctggggccagaatggctgtccttgtcgtagagccctccacattttctttttcttttttgagacagggtcttgctctgtcacccagactggagtgcagtggtgtgatcatagctcactgcaccctcaacctcctgggttcaagcaatcctcctgcctcagcctcctgaacagctgggaccacaggtgcacgccaccacacctggctttttttttgttgtttttagagacagggtctcactatattgctcaggctggtcttgaactcctgggctcaagtgatcttcccacgtgggcctcccaaaacgctggaactacaagtgtgagccaccgcgcctggcccaagccctccacattttcaatccaggagccttgagtctgtgttgtgtcctgacacctccaagttctagggccgtcaggacacgggagggtttggggacagagtgtccttcctctgtcctctcatcccagtcctgatggccgcttggtgagtgtctggtgccctggtggcctgccccagctctcttctggctttctgagcaggaagcgagcagaggctccacaggcttacgctgctctcctgacagccacacgcgaccctcggtgcagagtgcagaggcggctctggttcctccagccacctcagtccctctttgggaggtgatgttcccattgtttttcaaaggcctcaccttcaactgtctgtcttagaattcccctctggagggctatggcctccctatgctttcacttcccacctctctacctaagttccttcccagcacatcgccagccctgggcctggggatgtccccaatgctgtacctggctgaccccggattaaaagcctcatccacgaccgtgaaaaaaaaaaaaaaaaaaaa

SEQ ID NO: 2160 - DNA, 1291 bp, Homo sapiens
ttcggcacgagctcaaacacattacgtggaatgaggggggagtgtatgaaggaatcattagcaacagattagagtccccaccaaagaaaaagaaacaagactcaagggctttttgagctgccacctctccccagagagggctcagaaaaaagatggcctggactctgctgggcagggtggtgggtcatcacccatgaatcaaggacatgaactaacctatatacacctatgccagcattgcagctttggcatttctgggtatgagggatgcaggagcagcaagcttgatgcaaggggacttaggaacgggcctctaaacaaagcttctctggtaagcacaggatcttcccttaaattacgtgcctattaaggggtttaggatgccccgcccaagctgtggcttggttcttcttctatacacacacatacattcttaaattctcacatatttatagccctcacatataaacacagtgtctgaaacacaacataagcctttgcaaaaatatgcactagatagggaaggcctggaggatgcccaggcatgaaagtgtccacttctcagaggaacatggctttgggtcactgtcatttgcacctgcactgcattttcctttctctcatctacatgcagaatgcttcatattcaagggaggtgccacacccagtcagctgagctgtttacacgtagtgggctagcttgctcatgcttacctgctgtgtcttctgttcatcagttctttctactttgttttacagtccattcgtggaactctagctttcaattattgtttcataaatacaggcaggtaggacaaaaatgtggctgaatcattgcaaaatcaaaatattttctgggagaaaaaaatcatagcacttcttctactgacaagtcagaaacttcatgctctcatctatgtgcccatctgtgcatattcctccattttgtacctgtccatgcattcttcttacctctgacaggaaatttccacattctactcttgaatcctccttaatttagtacctgcagaatgtgcctaacagatgcttgataccctaaattacagtcagataaggcaggatgttaggggtccatgattctttggggagattttttgcaagtacatcttccttcctacaaaaggtaaaaaaaaaaaaaagcacccacagcgttcaagttgaaataactccagcccaatttttatgactccttctctgtacttccaatactcccttcctacaaaaaaaaaaaaaaaaaaaaaaaaaactcgagggggggcccggtacccaa

SEQ ID NO: 2161 - DNA, 582 bp, Homo sapiens
  misc_feature (297)..(297): n equals a,t,g, or c
  misc_feature (335)..(335): n equals a,t,g, or c
ggcacgaggcggcggtggctgcggcggggcgcccgggtgctcggtggcctccgagtacttggtgaaaaccagcggcacagcgatgtccgctttgtccaactggttccagaagcgggcgatgcagcaggccctcgtgatgcacggccacgccatgatgctagctgaaaagccggcctcctctttcttcttgtggttctaaagcaagtctctataatcttccttcagcctccgatcctgacggccaatgtggttcccaccgttttctacccccgatcagccggagctagttcgccctcntccctcagcgagcacccggggagactgtcctaggagantctgtagagtccctcgattaccggtcgcaaacgcctttgggagcgcagtgtgmtgcgagcgccgaagggtgagacgcacggcgttcccgagtccccggcgagggtgtctgggacgcgcccctccctacggctgcggcggcgcacagacctcggtcgagcgaggcgacgtgaggagaggtggctacaggcttaagccatggcgcagaggaggggccgggcggtgtggccgcagggtccgcggaccggg

SEQ ID NO: 2162 - DNA, 1219 bp, Homo sapiens
  misc_feature (888)..(889): n equals a,t,g, or c
ggcacgagcatgaagatgcaaaactatgagctgatttcatattttaaatgcaagttagcaaaatttaccttctacaattatttgacaagaatttaaagtgcaattgacaaacctttcagaaaaaagctgggaattgggcctttggggtaaggttgccatatttagctaattaaacatacaagtttcccagttaaatttgaatttcagataaatgatgtacaatatttgggacacacttatacaaaaaatgctcattgtttatctgaaattccaatttaactgtgcatctgtattttgcctgggcatcctactttggggtacttcgaggtccctggctagctcctggtctatgtcttagtccatgctcagaagtcccatgtattcaaccagctgcttcttcctccattccagtggttcttttacaggtaggtgaggtcttaaagaatcttttgaaacttttgagccattccccaggagaatatctacatacaaaatttggcatctccagggtatgtgggtcccacgtgagccccaccccacaatggtcggacccaaggactcctcccacagtccatggcactgtgcagatggccagctacgaggaagtgagcatgttggactttgaggagttcaaccagactatgaaacagcaaaatcacaagaccttttttgccttctttgccagttccaaggacattggaggtaacagatatagccccaatggcatgcgggccaaaccagttgtagagacgggctgaagcatgttcgggaagaatgtgcattcatctactgccaagtaggagaaaagccttattggaaagatccaaataatgtcttcaggaaaaatttgaaaggagctgcagtgcttaaccatggaacccaggaaannctgatagaatctgagtgtcttcaggccagcataatggaaatgttctctgaagattaagatttgatgatggcagtcatgccttgatttcctgctctgttctggtaaactgcatacttggtttgaattcttgttagcaataaataaataaatgatgatgggctgggcacagtggctcccgcctgtaatcccagcactttgggaggtcaaggcgggaggatcacttgagcccaggaggtcgagaacagcctgggcaatgtggtgaaaccttgcctctacaaaaatatttaaaaattagccaagcgtggtggtgcatgcctatagtcccagcta

SEQ ID NO: 2163 - DNA, 1543 bp, Homo sapiens
ggcacgagtgtaactgtataatattgacaatcgaacaaacagcttcaatcatgtctattcatatctccaggcaaagttttgttcttcttcctttattttacaaatgtattgcttcaaaggacacatacttttgtggataaacaatttccactagaagaagaacaggaaaggtagctatttaatatatgcagttagagccatgaggtatggatcatagtaaataatattttgcaatgatactagcactaataaagatgatgacatttgcatgattagctatgtttttagtaaaggaaaattaatggataggaatatttagcttgaaggatacatacaacatgctgacaaacaaaactgagtttcagcataaaaatggatatattacacagagagtatacataggctcctaatgtctctgtgtgcatttgtatgcatattattcatctagtattttctttttacttccaagttggaatgcatttacttcatatcttattataagcccatttggtaacacttctgtcagatttcagttgcatattcactgttgaataaatcagtggttaataaatgtccttggaaatgtgtttagagataaataatgaactgctgtatctgatcattaagtgtacatcaagctcacatttttactctcagaatcctaaaaggaagatagcatgacctactatatatgtacatggaaaaaagggaaataattatagagaaaacatgtaaaaggagcctggtttattactcttaaatgggtacatgatagatcaaaataaatgttattacaactgatcaaaaaatcctactgcaaaggaaataataaataaagatggagagtcaacctgtccatcataagtgctttttgttacaaagccaaggacttggagtgtggacccaaccccacagcatgcaaaaccgtggggctctcaggattccaagcctagcatccccaccctctcataggcgcttcggagctgaccgcaggcacacttttaatttgtggcaagatggtctgacaaacagcttgggaggacagcacaggtgaaaatacagatcaagtgcagataaaaatatgttcaccttgaaaaatacaaacaagacttttaggtaataatgcacagggaaatcctatcaaaaaatgagaagaatagaaccactgctttctcattaacaattttcacaatcccttttagcttgtattccaacttctgtccataatccaatatctgcatactccttacatctatacttaaataatatagatttttgtcccctgtacatatcttataaatgtcaatccatcccacctcaaagtttcttggtattcagcaagttttttaaaaagtcaatcatgtaggagatcctttagcaatacttcaaggtatcatccctataaaaagtgaagagggatctgaggtcctaaaaagaaaaataatgacagagaatggctgtaatttcatatgttcctgatggaaatctcactgctcagaaaaaaaaaagaacacatatgccaaaataaaaaaaaaaaaaaaga

SEQ ID NO: 2164 - DNA, 817 bp, Homo sapiens
gcttctaggcctgcggaatgcacctctgctgggctggggctctgagttttgtgttttgggccaacctgatcctcatatatctatttggaaccagcgagtctccccagaatattttatcaagttattttgagttaggagtttaatagacatagaagcctttaaggagagtgagtaaatgaagttggcaaggggagtaggcaggggagagaggaggaaatcccaggctaagttttggaagagggcttgattatgttggtgacagcaggctgcatcttccaggacaggaatccccccgtggtttacaaaacacttccccttacataatcctatttaattcacacgacaagcccaagagttagggarggttcattgccttattagcctgtgtttacagatggtgaaactgaggctcagagaggtgctgagatcacacagcaggatcatgcagcagaccacgggcagggctgggattccggaccaagcttggcattcttttcctggcaccacagtattccctgcaagccctctgtgttttccactcctgagttagatgtcactggtggtgctgtagagggggctgctggagcactgtccttcatgtgaaagggggttccctttgccctttttgggtgcccacccacaagcttctctgtgctctgcttcccttcgctctccaagatgctaccttagagctactggagccactttgttcaggcagagggctgtacgtgccctagggctgatgtgcccctggaaaggtttgcagctaaggactgcctggagcagggatatgaaagcccagctttcttggctcgag

SEQ ID NO: 2165 - DNA, 829 bp, Homo sapiens
ggcacgagaaggcaggggccttgaatgaacaaacgaacctgactaggggctacatgaaagccatactgtgcttcctcctccttctcatgaatccctttcctcccttctcttttccatcccccatagatcagaaatgtgaaggcggttaggaaatgtccagactccaaacagaaaaaactgtgatcctcagcagacacaagacataatattggattatttccagcttcatcctgggaaaaatataggagactgaagggaaacaggaaaataagtaaacacccatagaaaaataaaatgtaagataaaaactgaaatgtaagaactatcacatggtgagtgtctatattcactcataatagagtaactacaaaatcataagtttgatatttaatcctaatgggggtgaataatttttttaaatgttgctactgtcgtgataaaacaaattagctacatactgacaaagtaaaagcgtgttttctaaaattgaaataattctcaaaataacagtttagaaaggctgcacattttacaggaaatgggttgaacatcacatgatttactcattaaggagataattattgagcgcctaaatgaggaaaaaagatttatagattttaaacaagcatccaattaactaaatattactgagtaaaagaaaaacaagttaatgatacttttgtaccaattttattataaaatgtacgtgaagaaaggctattttgtcaaactgtttttccgtatcatgtcatattttatatttacagcaacatcctgaaataggaatttctgaggatatgcttcccatttgagagatgaaaacctcgag

SEQ ID NO: 2166 - DNA, 783 bp, Homo sapiens
  misc_feature (743)..(743): n equals a,t,g, or c
  misc_feature (752)..(752): n equals a,t,g, or c
aaaacttggagctccaccgcggtggccggctgctctagaactagtggatcccccgggctgcaggaattcggcacgaggaggcaccgcaaagatgcaagaagtcacccggagtacaaggacaggacgccaggctttcagggggacgttgaggcagtcaaaggaaaaaaatggcaaggcagaagaggaggctgtggtactccaccggaggccagtgccttccatgcatcccctgccccgggcctgggggttggtcgttgggtccctggctttcacccagggtgcgtgtctctctcatggggggcagcccaaagtgggaagaagtcccctgggggattgggataagatgccaagctttcagagaaacgttgaggcatctcggaaaaaaaaagcagtgaggccagaggagtctggggtcctccaccagaggccagtgccttctgggcagcccctgcgttgggccttgggtggttgtggagtccctggctttcaccaagggtgcgtgtgtctcccacggggggcatccaaaaggggcaagaagtccactgggggatggggacaagatgtcaggctttcagggggacattgtggcagcccaaggaaaaaagtgacgaggctgaaraggaarctcggatcttccgytgraggccagtgccttccgggcagcctttgcgccaaktcraggggggcccgyacccaattcgccctaaagggagcggattacaatttaattggccgccgttttnaaaacgtcnggacttggaaaaacccctggggttacccaaa

SEQ ID NO: 2167 - DNA, 578 bp, Homo sapiens
ggcacgagctcataacaaaggccagaactgttagaaacacacatacctccccacacacccaaaacctgaacatgtcatcttcctacttacaacccttccatggcttcctactgtggttggattaagaccaagacccttgcgtggcttataaggtctgcaggttttggctctgccaacctgtctagcctcctggccctctcaatcagcttgctgtttccctcatttgttacacaagtttcatttttaaaaatgcatcatgggctgtttcctcctcctggaacattcttccctccctttcccctgacctgtcaatttctattatccttcatttccctgcttaaatgtcactgtttttgaggaagccttcaaatccccagattaggtcagaatcccctaacacactcactcttttcgcaccccatacttaatttttgtattatttttctccaagtgaacttaaataaccatataactgattaaaattgttctcccctgccagaacaagacccatgaggacaggagacccttttgtcatggcttctgtagcacccggcatagtgcttggaatagaggagaca

SEQ ID NO: 2168 - DNA, 1142 bp, Homo sapiens
  misc_feature (954)..(954): n equals a,t,g, or c
ggcacgagcatagatatcattccaatttttcctgttgcaagtaacagaaaaccagaccccatctggctgaagccartaagagaaaagactaacaggagggccagcctcaggactcaaatacgtcaccaggacatgggttgcgtcccagtctcagctctgccagttcctgtagaaccctccttccaaggttcacagggtggctaccatagcttcaggccctcacctcatgataagacagcaatacaackgccatttcatgtctgttgctgtttctacattcagttagaattaaataaattttccagtagcacccacaaaaatactgagtccacctggttggcctacctagatatatcgccagccctgatcaagtcactggtcacgggcctggattttctggttcgcttaggctaatcatacgtcccatcccaggactgaagaagtaccagggctgttgctggagagtggctaatgtcccctttacaaataaggagctcattgtttaggaagatgagcttgccaaaaatcacacacttgtaaaataagtcaaaatttgaacttaagtctacttatctgagcccaaagtcttacaaccatttatggctgttatcctaacacctacgtcgcggaacggaagagtcctaagactgcaaagacccttccttttcttctagatccagtctaagttggttggtaatttctttagaccctgctttcagggaagtttaaaaaaaattacttgcatttgtatattttccttgtattttcggccaaatttcttctaattaaagtacaacataagttgaaccaacacaataattgtcatattaagaaaagataaaacaaactttactcatttctgcttctgggcatggagtgtgagggaccagacttaagttctcaaacaactacaaaatcagaccaaaaaatacaatggtttccaggcaccggacnacaggcagtgcagggctgtgatccttaagagaagggaagcagcgagccagagtatccaggccacaacccaaatggaggccaagagaggaacagcagaggatacagagggagggttccaggggccaagacgcaatccgaggggaagcccttccggggagagctggagtcctggggtggccttctcgagg

SEQ ID NO: 2169 - DNA, 2478 bp, Homo sapiens
  misc_feature (591)..(591): n equals a,t,g, or c
  misc_feature (599)..(599): n equals a,t,g, or c
  misc_feature (1252)..(1252): n equals a,t,g, or c
  misc_feature (1272)..(1272): n equals a,t,g, or c
  misc_feature (1275)..(1275): n equals a,t,g, or c
  misc_feature (1402)..(1402): n equals a,t,g, or c
  misc_feature (1480)..(1480): n equals a,t,g, or c
ggcacgagtgacctttcaaaagttgatgaataataaaaaacaattcatatgttctctctgtctcttatactgtactttgtttcacaaatatttccacagttttcctggctcaatcattttaattgcaaaggcaagatttatatatcataaattattacattaagcagtagaaatcagaaatactgaggtgggaaatatgaactatccttgcataggaacagctggaataacctggtccaaaaatgtaataataaaaacaacaaccaaacatactgctctactgataattcagatttttttaagaaatctaatttttaagaaaaatcttgttcaacttgccagaagacaaaaatgatttgaaggttttaaaaagtgttcggttcattactggatttgagctggactcaatgtatctctactattattgttaaagcagaattatgtttaccacaaaactaaacagtttgcatgaccaataatgatttttaaaaaatgtttagctatgaaactcttatgtggttgtctcttgatatctagagaaagagaagggaaaaaattatatttatcaatgttgagacattagtttcattntacctaanaaaaatttaaaagaaaaacagttacataggaattgttaaggagtttgtagaacactcactcccttcatatgcattgtagttgggtatcacttaaacatctcaactaagctggatttctactacagcggtctcctaagtcaatcaggaaaatgttagtttttttggttgctttaaatgaatgaatttctcctagcaaatagaagcaatatgattttaataaacagtgatgaagactctgggaaacccttacaatgtagggtaataacatctttctattaaaaacaataatgttataaacatttcaacatccaaatgatgggacatttcacatactcatgccttttgattattttcaaagatgcttcattacctaactcattcttgtcacagaattcttgtagctaaaagcaaaaatagactcaaattgaaagatttttaaaagataactacttggcagcaattataggtgtatatacccttgaagatacaaagacttaataataacacctgaagaatatttccctgccccctyccacacacacacacacacacacacacacacacacacacaaatactagggaagtgtgctcctcctcagatcctccagctgtgggcttcctaattaaaaggctgasctgtttcctgctcaaancmcttcaaaagcctttttgntgntctccacttgcatatagttcgcagcacttgtccttcttacctgtccattcttatttatagagagctttcttgaatcagaaacccaagaagtgatgcagagmccattttattttataaagttgaaggncaataatatttatgttaaaaaaaaatccaagtagctgaattagcaactcagtaattttgctagactggcaaaaaggancaatgcatgtggcatagtttttaaaacataaatttttatagcataatttaaaaacagtatttattactggctgatttttaaaataaatgggtattttcacttgctgtaaatgtgacatgttaaaatctatttttaaaaaaatactgagtttgatattcatgtttaaagttggagactgttgtaaaagtctgcctctgaatttgatatcttagacaaggaatatttaccttggtacaaatcaaatggatgagagatctaaacataaaatagtcaacagaatcgtcttttgtggattcaaaatagaaacggtwcaagtrgcaaacactgacaaatwgccctttttaaaagcccaatctwaaaatcgacgtccacaaaagctttcttttccaagtatttgcctataaagttatttcaacacggctctgacaaatgcctgtgtgtcctgtcccatagggaaaggtgtgaacgcataacgttttgctctttgcaaaaaagggtcgttaattgkccgagagcasccaccgtttagggatgaagggagattaagtgatttttggccaatgcatctgccaattcccttcagggtagtcaagaatgggggccggcagccmtgctgcagttggaaggtctgtccaaaaaaggccgttttggagaaagagggagagactgcgagtggccgactgcgcccccctcccagccctccggcccgggcgcctgagccgccgctcacctcggtgtcattgttraggttccagaggtccaagcgccccatcccgtccacgcaggcaaaaarcscargatgcacgggggaccacatgacatcgtacacatagtctgcattgtcttcaaaggagtagagcggcttgttgtgctgtaaagcagagagaccgtgaagactttgtggcgctgctgctgcctcgggctgtctagagagcctaattaaaaactttgcacattcacaaagtgtcataaaacttcccgagatgaaagtcctcgag

SEQ ID NO: 2170 - DNA, 1092 bp, Homo sapiens
ctgcaggaattcggcacgaggttcatttcacttttcagaaaggagctggctatcaccttgatttgctcatggttggcgttatgttgggagtttgctctgtcatgggacttccatggtttgtggctgcaacagtgttgtcaataagtcatgtcaacagcttaaaagttgaatctgaatgttctgctccaggggaacaacccaagtttttgggaattcgtgaacagcgggttacagggctaatgatttttattctaatgggcctctctgtgttcatgacttcagtcctaaaggtaaaatttctttattgccgtgttttacaatcttattataacatttatacttagttatgtgaacatgaaacattaaaatatacttaaaatacctaaaattaggtttgttttccacagtttactttggaaataatttcattaggtttttagtatagcaagcatttcagtggtaagctgtatatatttttaaaataatgtataccaggtgtagtggcttacgccwgtaatcccagcamttcgggaggctgwkgcgggyagakcacttgcgsccataagttcgagaccaacctggctaacatagcgaaaccatcatctctaccaaaaacacaaaaattagctgggcatggtggcacgtgcctgtagtcccagctactcgggaggctgaggccaagaatcatttgaacccaggaggcagaggttgcagtgagccaagatcatgtcactgcactccagcctgggtgatggagtgagactctgtctcaaaagaaaaaagaaaaaaaaatgctaggaaaaagaaataagaatgggaaaagctcatgaaaattaaatctataaatatcaaaataactaaaattttgtagtaataattttcataagactgaagaccaatataatgatatgaaaaaaggagaaaattttctttaatagcaagggggaggagggataagaatattagaacaaatccaaaaggtctgagatctgtttagctggagttgaagaaatttgtaacagagacaacagacgaaaagggaagtaaacaggggaagaaaattctcacagcagaaggcacaggtttctcgag

SEQ ID NO: 2171 - DNA, 846 bp, Homo sapiens
  misc_feature (22)..(22): n equals a,t,g, or c
  misc_feature (823)..(823): n equals a,t,g, or c
gatcactataaaaaaagcaggnacgcctgcaggtaccggtccggaattcccgggtcgacccacgcgtccgacggctgcgagaagacgacagaagggtacggctgcgagaagacgacagaagggggagaccggaagtgagtgatcgaaagcatggcgtcggtggtgttggcgctgaggacccggacagccgttacatccttgctaagccccactccggctacagctcttgctgtcagatacgcatccaagaagtcgggtggtagctccaaaaacctcggtggaaagtcatcaggcagacgccaaggcattaagaaaatggaaggtcactatgttcatgctgggaacatcattgcaacacagcgccatttccgctggcacccaggtgcccatgtgggtgttgggaagaataaatgtctgtatgccctggaagaggggatagtccgctacactaaggaggtctacgtgcctcatcccagaaacacggaggctgtggatctgatcaccaggctgcccaagggtgctgtgctctacaagacttttgtccacgtggttcctgccaagcctgagggcaccttcaaactggtagctatgctttgatgtcctgttgaggccatcggacagagactggagcccaggtgacaggagatggtgataccagaagtcaagggttggggtggcgacacggcctcccgaggaagaggtctgcttgatggtgactctgcaggagactctgaagtgactgctgggaaaccctttgggagacctgacctggggccaaaaataaagtgagccagcgtcatgaacgcatgctatttagggacanaaaaaaaaaaaaaaaaaactcga

SEQ ID NO: 2172 - DNA, 630 bp, Homo sapiens
ggggctgcatttcatctggaggctctactggggaaaactccccttgcaaactcactcaggctgttggcagaattcatctctttgtggctgcatggctcagggccacagttttttttgctggctggtggctgaaagctacctgaatttcctgactctgtgggcttttttaatgtgcccagtagcttcttcagtgaggagaatttctctagttcatgccagcaagacagtgtcatgtatatacatgtatgtgtgtctgtacatgggtatgtgtgcctgtgtgtgtgtgtggtatcctagtcacctttgccatcttttcttggttagaagtcagaggtccttcacacactcaaaggcaagagttgatgcaggtgtgaatcccggtgccaccgttggtctgtctgcaacaccagcttccatgcttggatcacacctcggatgcacacgcttgaagatcatgtgccacagaagctcatttgccaaccctttcaccaactctggtccatgcactcggcagccttcaggccacccttgaaggttccacagagcctccacagacaggggagtccctgaaagtaaaaatacctcatggaccagacaccccccaaaacaaagcaaagccactgcctcgag

SEQ ID NO: 2173 - DNA, 2521 bp, Homo sapiens
cttgcccaaggttatgtgtctattaaatggctgcgtctgtaaaattaaaatgctaactgtggccaccctgcttctctcactccccctagggctgctgtgatgagagcaaacacacccacaatgctggccacacagtaggatgtaataaatcgtggctattattactactttttaatacacacaatagccacagccagtctggaaggctgtagtggcaatggcccgagggcaaaaatccttggggccccttcttgcttggtctctcacttcaaaggctatgcacagtcagtcacaggaaacagaatcagagaaggactcacaacatcctggaggacgtgatgcctccaggacacaacagaggaccgtgcaccccagaatcaactactttgcctcatctgaccttccaaatagtcccaaacagaagggagcaggagatgatggccattggagagaagcctccagggctgaatggccccatgaatgggatgttgattctggaccagaatcaggccttgtttctgtgctcccattgggccccagtggcacagaccagcccttgtatgctctccacggctgggctggaataggcttttgatttcttcccactcctggctggaggacttgccggttaagctctgtggagtgtttactttttcaacaatggcagcaggctgaagaataggaaaaaacctggcccctttttctaacttagcaggccagggtccccttagtaaccaaaatgccccgagcaccagtctccaggcaggagctgggacggcacagtttcctcttgaaggacaatgctgccctcctggtggcaaggcctcttccaaaagggctggcgtggactcaagggccttcctgaagctcactgttcccaaggaaagaattggagcccagctcgctggacagtgcccggtcccccaaaggatcaaggcaactaggggaatgaagaaaggcaagaaaaactcaaactgggggtggggacaggaagcgcggatgagaagaaagccagaccgtcgccaggtgccggtgcctctcatcttaaccatgccatcagtcagggacactagcatctctgcatgggaaccaagtgggggcgcagagaggtcaaacaagctgcccaaagtcagagctaggaagcagcagtcaacttttgaacacagtcttattgcgggatctggccagcagcccgcaatgcaacggggctctctctttgttcccaggtggatcggcaggttgagaaataatagacacacacgagatagtgaaagctgggtccaggggggtcaccagcttctggtcctgcggtgccaacaatgcactggatataccagcatttattattaagtttagtgaaggcgggggtaggttagtgagggatttagggtcatttgattatgcggtgagatggtcacatggggatgaagtaattctttaacatagcatttgtttgtagaagtacagagcataactgagtggctcagtatatagagtacacagagataagaatttacaatatagtgtgtgcgtcagtaatttctaacagagccttaaaacagaaacacaatctttccgtaacctatgattagcaagctattaatcagcagtaacaattgcaacaaaagctggttacaaacaatccatggaaacaggacgtgaagctagacaaccagttagaccagaaattctcagaagggagtatgccctaaccctaaagaggcctagaagagccgtggcaagatgagggcatttatagccctatcttatccatatggacaggcgtccccccatgcgtccgtttataggctctccacaagggtcgtattccattcccagagctatgaacatcttggtgatgtgaaacctccctgactgcacgtccattcataggttctctgcatggggaatcacatcacacactgttggctcattttggcagtccaacctggcattgtctttacacaaccctgcatgcaattttgtatttacaataatcaggagcatttcatcttttattctgtagcaatagtttcagggggtctccctaaacagtctgaccccaaagctgactttcttctgaagatacccctaatccgatcgctcagacatcagaatgagtacctaactgttcaggacacacagttatatcaacatgctcagagactgctttctcttacataaaatactactttcctttttatcataaaaaataggatgggcatggtggctcacacctgtaatcccagcactttgggaggccgaagtgagcagatcaccagaggtcaggagttcgagaccagcctgaccaatggagaaaccccatctctactaaaaatacaaaattagccaggcatggtggtacatgcctgtaatcccagctactcgggaggctgaggtaggagaattacttgaacctgggaggtggaggttgcagtgagccgagattcagccattgcactccagcactccagcttggacaataagagtgaaactctgtctcaaaaaaaaaaaaaaaaaa

SEQ ID NO: 2174 - DNA, 1475 bp, Homo sapiens
  misc_feature (40)..(40): n equals a,t,g, or c
gaattcggcacgagattgacttcaactctgctttgcaggnaatgccttgagaaataagagggtaaatccatttgctgaaggatatcaccatacgtgaaatttctatctctccaacacactcctagttaatccactggattcttaattgagaaaaatgaccattcccaaagatagcttgattttatttagactattggctttcatagtatatgttttatggttttctacgaatattcactaccctcaataatctccacctacaataagctgcattgccaaagggtcctgccactgccaagtcatttgtttgtcctaaacttctttgttatattatttktacaaattcttaaaagaaataattgtcaataatcagttcttgagcatttactatgtgktttacataatagagatgatattaaatcagcatattttccattcccctgcaaatctctttgccttgaaaatcacatactctaacagtctcctaccattcatgctaagtaagaaaaatcaacccaggaaagaaagcacaaactacaacaaatcaatcttttgtcaactcaaagctgactctcttgagtccttagcaaatctaagtaaatagttttaaaagccaggatttgtgaaaacaaaatagtttttctgaattgtaatagctccctttacacatgttaaaatacaggcttatctagatcatggaaaatattatttgttctttttttttttttttttgagacagagtctcactctgtcgcccagcctggagtgcagtggcacgatcttggctcactgcaagctctgcctcccaggttcacaccattctcctgcctcagcctcccgagtagctgggactacaggcacctgccaccaggcccggctaattttttgtatttttagttgagacgatgtttcaccgtgttagccaggatggtctcgatctcctgacctcgtgattcccccacctcggcctcccaaggtgctggaattacaggcgtgagccaccacgcccggscaatttgttcattttcaagataatacctccattgattgctctattatgacaagcmctgawtgatataagtgttttgcatgtwttcactcctttctaccttacaacaatctccatctcatttgttcactcgtgtgtcccaagctcctataacatggactgatagacagtggacaaaataaatatgtgctatgtgaataagcaactttatgaaatatatactggacagtatatatttctatgtacattttgcagataaataaacagaggcacagagcagttatgcttcatttccaagattttatactcagtagtaataactaagattcaggatagggaaagtgattctcctaaacttcaagtgaggtggtcaacgtcattagagccaaaacaactctagattctctaacttcaaacctatacataatttataggattttctgccaaaaaaaaaaaaaaaactcga

SEQ ID NO: 2175 - DNA, 1784 bp, Homo sapiens
  misc_feature (555)..(555): n equals a,t,g, or c
  misc_feature (559)..(559): n equals a,t,g, or c
ggcacgagctggtgtgttgataatgctctgtttcttgatctggagactagttatgtgggtgtgttccacttgcaaaaaaatgcatcgagctcaagataagtgtgcttttccgtaaggatatttcatctcaatagaaaatttggcttttgtgtcaactctgcctaaagtaagtgggaaactacaaaaactggggacttggacatcttttaatcaaactatgtatcaatgtcatgtcaaaggttttgttatgtgtcatcttccttgaatgagaatggcaacaagttttttttttatcacacagatttcctatgtgccttttttccccagtcctgatagtctatgaaccaaccaaacttagggaaaagtaaaacagttaagtcctgtatttccaccttatttacaatataatgccctctacagaaaataatcacagaaacacagaaaatgacttctccagagatgagaaatgtgcatgtgacgccactctgagttatctccttcaagaagtatgtattcyataatctgggagaagagtaaattaacactccaactccnaagntcaataattataatatgagagagacaacagtggaaagaatgaatgtcctcaggcttaatttactagcmggraagamcagtcagaggaaaaaaaaaaaaaaaaaagmccgagamcaytgagctctcttctggaatgscagaaggmccactttctcctgcataaatgaagscagggctaatmcaaaacgttttctgggtattatttaacctctcctacccaggctattttagctcagtaggaaattcacccactaggtggaccttggagttcatccaccaccccaataaagattgcctttcttatttgaagtgatgatcacttcttccaagcaaaccaacaaaccctaggtattcaacctctgataacctgcctactaaggaacttcagtggaatcaggggatcaacgatgctgtccccaaactggcctaaggtgaaccaaggggagaagttaacagcagcacttaaattgatctactcatactcaaggattactgagtcttctgggcaagaaaagaaagcaattacaaactaccaataaggaaaggtgttttgaaaatagcgaaaaaaaaatgtcccctacacttcctttcaaaggtagcctcagagctagtctggctgcgcagatgaccagtgaaaataaatgaaaactgcagtacggttatagatgatccttacacctcagcttgttctcaattgcaaaaaaaaaaaaaaaaaaatgcatataatctaacactctcctgtctaaattgcttcaaactttctcagaacgaccttcatcgtggcggattctttttctgcaaacctttacaggttgcacctgcttcacacagaaccagcggaaacaaactaggaggagataaaagagaagaagtaggaaggtttaaaccaacacaagtcgattttgtacccaaaaaaaaaaaaaagtttagtctaaaaagggaggtccagtgaggaacaagacagagggtgaaacagaagtctggcttactcccaaggcagaaatcatgactcatcaaagctttcagaggggacagaaccagactttgcatttgtcttgaggtcatcttcgagccaagaaatgctctcttaaccgggacctgagaactttaagggtctgcgacaactggctgtgaggccttgggcaaaacctctaacgtctctggggctcggtttcctcatcaggtgaagccagggtccactctagctttactagtctctcctcgag

SEQ ID NO: 2176 - DNA, 1743 bp, Homo sapiens
  misc_feature (1561)..(1561): n equals a,t,g, or c
ggcacgagtgcattggttgccatgtaaacagccagcttctggcaggaaagcagctggaccaggtgacctggctgtgacagagaacacagatattgaatccatgaaaccaagagtaatcagtacaacgattttttttcttttactttttaaaagtgtttgtcaatcctttaagttctttttgtctgactgctgtcattaagtaagaaaaatatgaaataaataagtctttgggtatgcaaaattgggaagatggacaggaattagtccctctatgcaatttcctctgaatctttcataatttctgtatcctcatcccttcaccctcaaccctccaacaccctctgttaccctgcaggcaactaggacagcatagagagcgtctcttgaacttgactttctcttccagtgcttgcctgccaatcccgtgacccatcctggagaacttttatagtcttcgacaatgcaatgcatagcaaccagttaataagataagacagtgactgtatagtgctccccaaagtgccatcacctaaaatagccctttgraaagtgcycatatagaactgagaattttagtgtagtgscaggctggatttgggtagggtgccyttcggtggscctccaaatcctatgggragcttaattacttcatctttctgtaaggccaacagttctcaaaatttgtggtctcaggmcaattttacactcttaaaaactgaggragatttctggtctggacatgtagtacagacctgtttttcattgttcctccctgctaagcacaagtataaaccctggaaataatgcaagagacaaccagggtagaactctggaaggttgtaaggagaaggcaaactggtttgagacccagggaaaaacaaagagcaagggtatcctatgtttcccacccagcagaagaaagaaacctagtcctggccattcctgatacccaactgaacaacagagggcagcccaggtaagcttactcctccctcagagtccctctgacaacatcaggtaggcccaacaccacaggtaaggggggatcttcagaaaccccaccaacaacagtggacaaaagaagcatttgccttctccccaggcctgagatgtcccactttcacctagagatatcgaggtgggagggtagaacagacacgaggcataaagtgatggcaagcggcccagtctgggaaggctctgtctcagtgggtgtatgactgtcctctcctacccatagagacaccaacagtgcagggcgccagtagaagtgtcccaccatacctaccccaactgagaggcacctggaagcctgacctagggaaacctttctgctccttcaggcgatatgatctgggacaaatgtcagcctcagtgatatccgataaaccaaacagagcaaaacaatactgaaaattaaactgctgttagaacaacagaccacaaaagtaagccaacacctgcttgcatgtgaagcataaataatgtgactgactgcaaaaataaaaaatgtaaatatgagtttcctaacatagtagacaaaatgttcaatcaaaaatcntctgtcataccaagaatcaagtaaatcacaacttgactgagaaaaggcaactactgccaacattaagatgagttcgatgttggaattatctgacaaggatttcaaagtagccatcataaaaatgcctcaacaatcaattaacattatcttaaaacaaataaaaaaaaaaaaaaaaactcgag

SEQ ID NO: 2177 - DNA, 1201 bp, Homo sapiens
gatatggagagtcaattgcatttcattatgcccaaaggtaaatgcataactttttccgcacagctaatcttctagcaaccccgttgctgtccatggcaagcaggttagttactctcgccctttcccgtttcaggttcattaaaaaactcttgtcaaaatctctttcatcccatcttattcttcattctcacttccatcagcatatcagtccaggccctagtaacattaatgttactaatggcactgttagtaacattacttaccagcattcaagtgggtcttcctgatgccattctctcccatcctgaaatcactgctgtttatatagatcttgtatgatgtcattcattggctcaaaaacttttaaagccttcctttttctaccaccccaatctaaatttcaatgcctggcttttattaaaacccataatttggccccaccctagctatttaactttattttccactattcgccagtctcctccctcatcaacgagaagacataccataatcaacctcacctctaacccttggaatatctaaacttaaaaatggtccttccttycccctttactkgtatttaaagamcctgatgaattattcctcctctgctaaacttttcacaattcttcaacctcatttatgtttcacattttcagaacatatcttgccgtttattaggaatctcacaattaggcactctcatgtagatagatttacgatcatgtatgttgtcatcttctattaaattccatactccttgaaggcaggagccatgccttattctgtcccccagagtactcagaatgatgcagagcacacagaaagtactcaaatcttgttgactgatccagtgagaaatgaccaacttcagttccagcctctctttaacatgtacatagcaatttgggcaagtcaagctccatcctgaaggacataataggggactctttaagcacattattatgaaggcccttcagggataacaccagagtgatgaggtgccctataccagggataatggagacagagtacttgggattcatcactggggtcctcaaagcatcttccaagggcataataaggaaggactcaaacacctttgaatctctgtgagaccagtcatgaggtcttttgaaagagttctttaactggagtgaatgtcaaagagaagtataataaaaaaaaaaaccggcacgag

SEQ ID NO: 2178 - DNA, 1815 bp, Homo sapiens
  misc_feature (1360)..(1360): n equals a,t,g, or c
ggcacgagcgacaagccatccccctgcccttcctgcaggctgccttacccattcagagggaggccgaggctgtgccggagcggcccacagctgcgggaccgcgttccagggtgtgctctgctgcaagcatgagggaaggacagttaaaagcaaaacggaagccttgcatgggccgcttatgcttctggagctactttttttttttttttttttttactatacatggtatttagataaaggtctagagtaaaaggctctacaaccatcttatgttcagaggtcagtgtgtgacttaatttaacatttcctttacttttgtttttctccatcttgtattttatagccagagcctgaacctcctcgtcgattttttgtcgaccagtgggagctttctcttagtctccgctcctctgcccgccccgcctctccctccyccgactccytccgacaggtagcatggcctaggactcactaaaactctgccctccgcagcctccactcacgtcactttcgcaagtgtcatgtaccccaggaggctgcagtgttcctcacttgggcccgtctcctgtagggagccagctgcatgtgttgctgtttgcctgtgtcggtctcgtgtgtraggtctgtggcacactcctcagctaaagtggctgctggctttcatccaamtgawctgacacatccaggtctgttgatgtgaacccgctttgatcctatttcaactatatcaaataatgataaatgttttgcagccattggcttttttaacttcacatgtcttccaaaataatatgtgttaaaaagtaggaaccacaatgtaattaaatcacctcaatggaggggtgatgatgcggtattctggctgcctgttgtcatcatttgaggaatgtacgcgrctgtcacctgaagtagcgctggtccagttgtagggagtttctagagagattggaaggtctctttgccactcctactggtatttcccatgcctgagttgacgccagacctcacgtcctatgtgcatggtagcatatgcacgcgtatggtgtgcggcgggatctgaagtagcactggttcagttgtagggagtttctagagagattggaaggtctctttgccgcttctactggtatttcccatgcctgggttgaggcctatgtgcatggtagcatatgcacacgtatggtgtgcggtgggatcgatcccgcaattgccacatttctgctattttttatgagtgatgagaaggaaaccatcgcttttcatgccagaaacaaatagaacttgagtcttcacctctctkgcagggatgcttgtcagtgttgccaacttgctgagaactgaatgtggcagatgcctttgnacgggcagccccaggtttagttcaactaaacccagatggtttagttcaggagaaaagggtcctggctgagcagtgagggcccagggctggcttggtgtcctggcctcatacttggcatctggcccacactgccccgtgtctgctgcagaatgagagaaatgccattttctgctccctcagtgtcagctgttaagttacctgctcagctctgcctggtgtctgtctgtcccaagcctcagtttctttagtgtccctaaagaaggtttagatctgagagccacgtgtttgtcttgaccactaataggtataatctgtgaagttaatgggcaaatggcaccaatccttgggaatcttatttttgaattaaaagctataattgcttcttcagttcagctgagccttgagctgagccacaagaacggcttcgtcgtgtgtgcatctgtgagcccctcgag

SEQ ID NO: 2179 - DNA, 925 bp, Homo sapiens
ggcacgagcagaaatgtagttgtaaggaaaaatgaaatgaaaaagtttgaaatctaaaggaaaaaaggaaatctaagtagcaggccaaatttatctgcaatgtaaagcctccttgatgttatttcctttatttttcatactaagtatttttagtgtacatattgtaaattcaactttagaaatggaaaaacagtcccaaagggtgtaagtatcttgaccaccatatcaagagcactgtgtgagaggcaagatggaaacccatggctacttcatgacatagcctctaaagagacggtgtaggtaggacccgtcatcttgcttcagcaagttgccctggttccttgccgcttactcctacctaggccctaattctttcatccagctctatagcctagggacttctcacatgttttgtggcaaatgggatacccttagaaaggaagcagatgaggagagacatagcgcaaggtatggggaaaggggtagggagcttctgtgcccactaggggcatgctgccctccatatgttcagctagccagaagccgtctgaatcctgtccttttggttttgatggaggttttcatctgtaggcgtgactgattaaactgttgtcctgccactggggatcaaattaaccttctgcctcttcccgaatgctgggrgggggggggcagctgaaagccccaaccctcctattccccaaactagagctacctaggtgctgccagccatgagtcaactcactagcatataaaaagacaccactttgtggagattttaaaaattgtagtagttgtatgccaggaagcagggtctaggaccaaatatgtattacacaatatcacacctgtgcataccagctcaatcagaacacaaaatttcaaaaatgatactgaatttaaaaaaaaaaaaaaaaaactcgag

SEQ ID NO: 2180 - DNA, 921 bp, Homo sapiens
ggcacgagggcatgcctcccttgctgcagtacattccctgatcctctcaacaagctcacctctgtaagctgctggcctccataacctgctccaactcattcttcttgcccattggggaacacctctcctctgtcctgctctcccatatgctgcaaactcaccctctgctctcccagctcccagctcctgggcccaggttggtcgtttctcttgctttcctcctctactgcatagcacggtactgtcccacctgcaccatgctgcgttctctcagcaccacctgtgattctgccactggcctaattcgtgttctcaggtgtgtcctcccttcttgacctggccccgcacccactgctccaccagatgcagtcctctctgtgtcaaacgtactgcactgaatccacacgctctgctgtccaagctcacgtcccagtggcccaggctatgagtcctttccagggccccacaaccctgactcccctaaaccttcctgattcttttctcatcctttctttcacactgtgtaaaaacactctggggagcctctgcctctgaatctcctamcttcttcctgtcaccagagtagtttgtctttgtcactcattcgtgtcccactttctgcccatcctcgtccccccggtacgaatgcamccagtctcaacctgamtctcctgccctgsctgagamccagctcctctgctcctcctgggtgctcctgtcagtcccaccctcctcccacctcctccctccttaaggcccatgtcttcaagacgctctccttccacactgtctccatttccctttgcaccttccctccccgtgacaacagatcccctgctctctgctctcacccgcacagcccacttcctctgtgtcactgggcccctatcttggcctcactcctccacctgagtcctcgag

SEQ ID NO: 2181 - DNA, 979 bp, Homo sapiens
  misc_feature (48)..(48): n equals a,t,g, or c
  misc_feature (773)..(773): n equals a,t,g, or c
ggcacgagaatagggctacctggagcaaaccctggctccgtaggatgnatcctggggtttcctggctgctggggcggcagtctcgccctcccagtcggcctgcggttggtgggtgggggagggggcggttctcgctgccacggatccagaaggccaaattgaaccctcgttctgggatttctggctcctactcccgcaggccgcttgggtgactgtccttttttggagaggatatagagacacagctgtggcctctgcacactgctcttcttccaggctcaggaaaggccctcgcccaggatgtcgccactcagaaggccgagacccagcggtcttcaatagaagtccgggaggccgggacgcagcgttcggtggargtccgggargccgggacccagcgttcggtggaagtccaggaggtcgggacacagggttctccggtggaggtgcaggagsccgggacccagcagtctctccaggctgccaacaagtcggggacccagcgatcccccgaagctgccagcaaggsatgacccagcggtttcgcgaggatgcccgggacccagttactagattatgaaggcatctcagsccctggasccagagccagtcagggkttaaagtgaaagcccgtatttccgcccagaagctggggttggggagaggatgtggattttttgttttaccctttctgttgcatggttgcaaacacaaacttgagttctaataaagaattgcaaagtggaagcccgccccccgcctccccccycmtnacttaagtccaggaagctggggtggcgaggaaggatgatgtggattgtttttgttttacaccttctgttgaatggttgccaacacaaacttgagttctaataaataattgcatttccctaacgtctgtattttggaaggtagaggggagggaaaggcgcattcctccaacagcccagttctgccctgcgcagccctctacctcgag

SEQ ID NO: 2182 - DNA, 548 bp, Homo sapiens
  misc_feature (4)..(4): n equals a,t,g, or c
  misc_feature (37)..(37): n equals a,t,g, or c
  misc_feature (56)..(56): n equals a,t,g, or c
  misc_feature (548)..(548): n equals a,t,g, or c
tgtntgaaattgtgaccggattaacaatttcacacanaaacagctatgaccatgantacgccaagctccgaaattaaccctcactaaagggaacaaaagctggagctccacgcggtggcggccgctctagaactagtggatcccccgggctgcaggaattcggcacgagtgtgcatatatgtgcacgtgtgtgcgagtgtgcgtgtgcatgtgtatatgtgcgcatgagtgtgcatgagtgcaagtgtgcatgtgtgtatgtgtgcaagcgtgtgtgcacatgtgcttgtgtgtgcatgtgtgtgcaagtgtgcatgtgtgcgagtgtgcatatgtgcattgtgtgcgtgagtgtgcgtgtggtccgtgtacacatctgtccatacatgtgagcttgcatgcacatgtgagcatgtgagtgtgcatgcatgtgttgtgtgtgtacgtgtctgcacgttggtgtgtgtatgtgtgtgcctgtgagtgtgcagagaggccctggcgctcgagggggggcccggtacccaattcgccctatagtgagtcgn

SEQ ID NO: 2183 - DNA, 975 bp, Homo sapiens
  misc_feature (401)..(401): n equals a,t,g, or c
ggctgcaggaattcggcacgagcttcaatgaaatttatagaaaagactctcacaagtaccattgaatatagttttctgatgattttgagatcgtagtatttgactgggtaagaattccgaacttcagtgaaaaaactgaactcaaaaaactactaacccaacatcaagcagaataagaattattacatgggactaaagcaatgaaagattatgattttatgacttttttgtttggcacatggcttattctttcatgtttcattttccacattaattttttttttctttcagctatctacagtttacgggaatatgggaaggtgtacttttgtgtgcagaattgaaatttttttttctccctacctgatccctccagagtttggagactatttgtgagtatncttatttcaataacaatatagttatttgcttacatttaagaagaatctattctctttctaataggacacaattggaaacattggccatattaccaaggctttgcctgacatgtcctattctgagatatgaccagattgctctaaggaattaaagttgactttataaagccaattaaaaccccttggaaaatctatcttgatatcttggataaataattaacatggttgatttacaggtgagaaaaaatgtcacttcctgagaggccctggaacctgaatatatttttgggaaccttgagaagagaagtattcactcaagtttaaaggtattacaggcacaatttgagggtgactcctccttggattggcttcccagcctcaagaggctttcaaaagtttaatctgagattccttgtgaaaagttccagcaaagcaaaattgaaaatgagcttatatgattaatcatcattttgctgtacttctgtaaattattaggcaaagtataacaagcctaaaacttattttgcaaacaaattagttttattgtgattaactttggtaaaaaggggggaac

SEQ ID NO: 2184 - DNA, 481 bp, Homo sapiens
ggcacgaggaagaccccactcttccctcatgaaccatagcagataagttatcaccccttaccattaagtatccaaacccttattaatggaaatcatccattacgctgcccttgcaggaatcaccctacttactctactctttgccataggaatatatactgtcttgcctcctgggtggaatttcagacaaaaaaaactcaatattcgtaacctcttgcctcataatcctcctcatagctggtataatagccaccaccaacagatagtggcccctcctaaatgtcctgtctttgcccatcctggcatttcacactcttccttcactgcatcacagaaaacctttcatggtcctacccagaacatcccaccctcacagcattccttgattggatcaccaatcttatatttcaaggggatttacaggaattcactccagatgaagccgaattctttacctttacacttgctctctgtctattta

SEQ ID NO: 2185 - DNA, 825 bp, Homo sapiens
gcttacttggttcagctcatggactggcttcttaattctctgtatgctggccttttgtttttttccataaaagcacttttctttagtttccataaaatccattttcagaaaccagttgtgcaaagcatagaatttttttaaaaagatacctgcggatggtagaggggatggggaaagttctcactatgtggcaatattaataaatacagattaagtattgggtatctttgctatttaatatcctcaggctactcttcactgccctttcccaggttccctcccactgcacatcatctctctgactcctctttggtgccttccttctgccatagcttgttctcacatcctgagttttggatttcccccagaaattccaaactttccaactaggtcatacaaagcaattcagttctcttcagcctctattcgcaaactctccttttgatattcacactcatcctgttgcttgaaggaccctttatttgccataatcaatcttccttagaaagtagttattcaggctgggtgcggtggctcatgcttctaatcccagcattttgggaagccgaggcaggcggatcatgaggtcaggagttcgagacccgccctgccaacacggagaaagctcgtctctactaaaaatacaaaaattagctgggcgtggtggcgggcacctgtaaccccagctactcgtgargctgaggttggataatcgcttgaacccaggaggtggaggttgcagtgagccgatatcccaccactgcactccagcctgggcaacagagcgagactctgactcaaaaaaaaaaaaaaaaaaaaactcga

SEQ ID NO: 2186 - DNA, 455 bp, Homo sapiens
cccccgggctgcaggaattcggcacgaggttttattagtttccttggattgggtttcaaccttctcctgtatctcactgggcttctccgccatccagattctgattctgtgtctgtcatttcggacatttcatttctgggggagttattgaggtagtttgtggaggtaagaagacactctggcttttagagttgccagaattcttgtgctggttctttctcatctgtgttcactgattttcctttactttttgacattgctgtcctttggatgaagctatttgcttttatattctttgatgttcttgagggtttgaaggcagtataaattgtgtttagttgattgacttcatttctggatgctttcaggaggccaaggctcagcttagcactcctgagcttcatgctaatgccttggggactgggactgggcatatggctttgttctttgacctc

SEQ ID NO: 2187 - DNA, 811 bp, Homo sapiens
  misc_feature (5)..(6): n equals a,t,g, or c
  misc_feature (107)..(107): n equals a,t,g, or c
aggcnnccccaggctttacactttatgcttccggctcgtatgttgttgtggaatttgtgaagcggataacaattttcccacaggaaacagctatgaccatgattacnccaaagctcgaaattaaccctcactaaagggaacaaaagctggagctccacgcggtgscggccgctctagaactagtggatcccccgggctgcaggaattcggcacgaggctggaagtataatggaggccagttgggggaggagggggaaaagattcactctaagtctagatgctctagcacccacccaggatgtgtgcaaggaagtgcaggatgctcctggtcttgcaaactgtggtttgtgggactccaaagcccctatccttccacgatgctttctgtcytgttatcacatttccttggaggagarcccagccttggtggagagccctgcyctggctttgtccctcsgcatgagatggcaaaggatggtgctgctgggagaccctcacrtctgyrcactgggggctgcttgccttctccattcctccttcaagtatctgagcagctcctgtgtgccagctgctggtctacaagatggatsggtccttggagatcaygctgtagcagaggaggcaggctgtagcccacacgccacaaccagccccctgcctgttcacacaaataaagttttattggaatacagccacacccatttcagtgcatattgtctgtggctgctttcctgctacaatagagagttgaatagttgggacagagacctatggcctgcaaagctgaactatttaccatctggcyctcgag

SEQ ID NO: 2188 - DNA, 636 bp, Homo sapiens
ggcacgagccactactgtccaacatcaatttggaggttctaacagatgcaataataggaaaatattaaatgattgttataaacaaaattaaaactatatatctttttctggttatgttacagttcacgcggaaaatccaaaagattttaaagaaaaaaatctgctggaattagtaagataatttagaagatggcttgacagataatatatctgtcaaaatcgttttcccttatttccacaaaaagcatctagatatagaagcagaaaatgtttttcattacaagggtggcaaatgttacatggtgcctagaataaatttagcataaaaaaaacccagtcggccaggagcagtggctcacaccggtaatcccagcactttgggaggctgaggcagccagaccacctgaggtcgggagttcgagaccagcctgaccaacatagagaaaccccatttctactaaaagtgcaaaatcagccgggcatggtggcacatgcttgtaatcccagctacttgggaggctgaggcaggagaattgcttgaacctgggaggcggaggttgctgtgagacgagatcgcgccattgcactccagcctgggcaacaagagcgaaactccatctcaaaaaaaaaaaaaaa

SEQ ID NO: 2189 - DNA, 1132 bp, Homo sapiens
ggcacgagcttggagcacattgccaagcatttgtgccagttttttctacactggaaaataaaccctggcccatgctaatgaatcaggtcctaacagcaccaattggtctggttcttcttttgctttttgcattgctgacatttcctccttccagctctatcagggaaaggaattgatcatttggataagaaacaaaaaaaagtctctctctgcttcactgtgtctcttatgtgtggtgctactgtactgccttaggaacaagcatagtgtgtctatttttagggcaaatgtgcctactctatcttcgccaactaaatctttctacatgactaatttgcaagttgaattatcttggtaaataggctgactcactagcaaataatctgcagaatttatgcattaggcttctgtagtgaattaggtccttttgtcttgctcagcatgctgtaataaactgcagtagtgctctggttaataataaaaaaaaagaaaggcaaggaagagaagttattccaaacacatgaagagtctttctttagaatagttagttatgatagagatatatatagcaggttatattgagagatatggcaatgacttaagtcaaataaggaaatgaaccatgatataaatagatatatgcatagctgatgtgtgtatatgtaagatatgttttgtgcctctgtttgtgtgtgtatgtgtgtgtatgtttatctcctaaatgagttaatggaataatttatacttacataatcatttatcacaaaatgtgcatagcaatcagtatccaacagctagtagtcattcaagaaacatttgtaaaatgaatgaattgcaatgttaggttaacattctccattgtcagtggtcctccccttctgctgtccctactccctctatgcttgtggtgattcagttgcagaaagacacatctatacttcatagctgtagaaaaattctttttttgtggttgatttcatgtggtttaaaaagaatgccaaattatttgtacctacagggataatgaccgactaaatttttttttcatatatgtgcgtatgtgtgtgtctatgtctgtatgtatagtctaaatattattgtccaatcatggcagggattatggttgtatgta

SEQ ID NO: 2190 - DNA, 1062 bp, Homo sapiens
agcacgaggcctttggtagcctgccagcgcctccctcatttcccacatgtcacatgacttcttactgtccagccggctctgttcctcggttgtccctcccaagcacagtgcgtcctctcctgggatggctctattaataaccctcatgtggatgttctgggacggccattcatgcttcctgtcctcacgtctggcccccactctacgccattcatgagagtgacccccaggcgtggctggctccctccctttctccactgccagcgtgtctgcaggatccaaggtgccatgtgtttgctgttcacagtgacccatgagtgagaggcagcggcgttcacaccatagtttaagttaacaatgcccggctgggacgtgcgctgtgtggccctcctcggggactgcagtgtggcagaaaaaaacaccctgagcttcctctcttctctttctcctgctgatattttgctgcccctaacaatcattggatccaatataagctataaaaggcagcctcacaagtgctgagcaggggaggaagatggagaggggtctgcaggggcgactaaagattcccagcattaaaggcaactgctatctatcaaggatattcatccatctaacgggggtaataatttatcctagactgttgctaaggctgagttaatatagctgaagtgtactatcaaggttaatggcacccacctgagttcaaatctttgcacacatcctcacttaaatgtaaaaactcaacaaagaatgcaaatgaagccatgactcactccttcaacattactaggagacagaacccaacaaacttcaaataatctgcaggtagaaaaaaaccaccaaataccagcagaccttcactgcctctataggtcatgagcagggtcaacaggtcaagggaggcttaaaggactcagtacaggccaggcaccggggctcacgccggtaatcccaaccctttgggaggcaaaggtgggaggattacttgagctcaggagtttgagaccagcctgggcaacatggtgaaatcccatctctacaaaaaaaaaaaaaaaaaaa

SEQ ID NO: 2191 - DNA, 675 bp, Homo sapiens
ggcacgaggtttggaatttattttttgtctgtgatgtgaggtagggatcacccctcccccatattgtaaaactacctgttatatgcttttacatttgtaactgtttcatctagcatagcttaagtggtgatgggagtctgcttttgagcttcatctatgcattggcaaatacagttaattaactggtctagttttttatctctattttccttcttgcagatcagtgctcagagtcctaagtactgcctttcaggccccataatgtgcccttgtatcctctaacatgtctggaatttgcgtaggctgtgctggggcagggaaaggagagtttctttgtcacaacaaacaaggggaaagctttcttcctgtctcttcgatttaccaatgcctcatcagaaactttcagcacttatgtaagaaatgtatttattttcttgaactttagtatatttcgtttgttttacaatattgtagagtagaaagttgtttttgcttaaatatagtagttttttctttagtcctatacatttcttaagttcttaaatatgtttcttgatatttttagctttatattgtggtgttgtgtattctttggaaagggattagtgggctctgtgcaattatgaaacaacaaaataaggcacatgtgcatgttgcaaatatactcgtgccgct

SEQ ID NO: 2192 - DNA, 835 bp, Homo sapiens
ggcacgagctcgtgccgaattcggcacgagagaaggttcagtctcagtttagctgtagtctgctcagggtctcacacagctggactcaagatgtcaacttggagtgctatctcatttgaggctcagagttctctttccaggtcaattagattgttggcaaaattcaattgtttgaggctgtcagattgaagaacctattactttgctggctgcggctgaggacaatactcagcatctagaagccatctgcggtttcttgccatatgacctgttccagaggccatctcacactaccaatctctgacttctgtctccaacctccagacccagacttaaaagactcatgtgattagggcaggccactcaaatactcttccttttaactcaaagataactgattagtaaccttaattatagctgtacagttccttcttccacgttatataacataatcatgagaatgatttcccatcatacatcatattcagatcttcatcccgtacccttccttcctaaatatttcagcttcaagtggagggattgatataagacgtggatactaggggacaggaatattgggggccgtcttaaaattctacttaccacatagattttcataattattgtatcatcatagtggattatgaactttttcataatgtgatgcatttaaaaaatcacctttactgcctcaaagcttattttaaagcctgaaattcaagtttgtctgaattatgatcccaacactacttagtggttgtttacacttttttggtattccttttttccgtctttttatttgcaacctttttgagatactttgttttataagtac

SEQ ID NO: 2193 - DNA, 598 bp, Homo sapiens
ggcacgagcccattggcacttattggttccactggccagtccaccctacccaaggacagtgtcccctcctccattgtctgctgccatatttgattcctctctactctattatgggtcagcaggggcgggggcccactgtgagctttcctcatgcccttggcctcagccttctgagcagacacctgttcctacttgtcttggtgcccagggtagcaggaggcaaagtgcactcaggaccccttaactctaagattgtcaaacaacgacaatccccttggggccagtcattgggtgggttcatggttccttctgagaaaccccatatgcacttcattcttttcatttcccatgctctctcttttggcctgaagagagtatttttccttagaagaagcaagtagttaaaaaatattttcttcttttctttgacctagagcttaacaaaagacaaaactcagatgatgaagtacttaacatcttccttctttctttcctgctgacttgatgactctgctttggagcagtgggggcctcagggtcgcagtggagaaagccatgggccagtgggaggtgaaacggagccaaaggtgggagaggg

SEQ ID NO: 2194 - DNA, 1445 bp, Homo sapiens
ggcacgagtcagtacacatatgcattgcctaacgatcaagtcagggtatttagcaaacccgtgacctcaaatatttattatttctttgtggtaaacacttttagaatcctctcttttaggaattctttgtatagtttcaaggcttctgccacctccacagaatgctttttggttctctctgtgatctgcacagtgcattttttctcatttcatctactgcttgtcctacactttcatttcttcatagcactcctgatgtatttcaaaatctttaaaagcattactggtaatcatcataataataataatgaggctataacattttccataccacagtcttagaaatcatctagtttattacgttcaaaaaatttcccaaaagaaggcctaccaaacatgtaataagcctaaaaatgtatcaggcactagttcagaggctgcatacaccaatctgatgctcataaactcattctagctatttgtacaatacaggctttcttctccaaggtttccatagagtcctagaggaattattagaatcctgagccggaattaaatgaaatgagtgttaaactgtgatctggtaaattgaggtagatggtgcaaacagctgattgttaaaggaaagtatcctcaagcctcacagttgcagggtctgttttataatctcatatcctagttttgcctatttggccattgaaaaccaatccaaacagcctctttaagtgacagctagattcaattccctgttgaggtgttgttgtttaaccctctctccagagagcttcagtgggattgaaaaatacttgtccctggagctacagtaggaatgctctatgatttgtgcataatacatatgataatctgagctttaaattaatccctaacccttctggataatacgctgcaggtaatttctccttcctatattacattgcggaagctagaattcagaagtatagtcttgctcaccttttaaggataatagagcttcaaaacagtattgcaggaagcaaagtggaataaacagaaaactgtcaaactagatgccactactgtgagttgttgaaaaggttaaatgtcagaagcaaatataattggatgactggaatgaatgactaagtgctttttacactaagttgcttgtttcacaagcaaccctagacccttagaaacagggttgatgaagtcaaagggacggccattctgtcttgtctttccccttctcagatcagcagaaaagcagcagaaaaacatggtgttggattgtagtccctacagatttggtacttccaagactctcccactccagcaaaaagaaaggacactcataacctttcctttttttctactccatggtaaaaatctagagatgggtatagtgcaaaatattcagattttggagaattattatccattttgtacttaaaaaaaaaaaaaaaaaa

SEQ ID NO: 2195 - DNA, 888 bp, Homo sapiens
  misc_feature (380)..(380): n equals a,t,g, or c
ttttttttttttttttttaggtcaaggtgagtttattgtccaaatagcataacctaattgcattcaaaaccattttcaaatccatctttaaactagtcagaaaacaggttattatttttttaaatcacttaacactgaacagataagacctcttaaaaggcagctgactatatcatgtcaccatcatagccaatacaacatttttgccatacttcctaaaaaccttttcgcatacactgatcatgctacttatcagcactttctaacatcctgaccaaacagacacccacacctcttatagagtacactgtgagagataacatggacttgatatggcatcacacttgttttaaagcaaaaaaaaaagaaaaagaaaaganaaaaaaaagtccaagacaagaaactatataactgagmgagaggagagagagagagatctgaggtacatgatataagggtgatgaacataatggaaaaaatccaatggcccgatgatttgctggggatgtaagagttggccagcmgttaagractaaacccaattaaaawwaaaatwgraactttgkttttcarggacaggcacctgtcaaaagacattggatactgtaatggctacagtcagtaaggcactttatttccccaaagtaggctgcaggcgaagggatgcaggctgcagctacagcatgcacgtacacatttgctgatggcttctcaaaacctgagccgagaatagggtctgatagcccagccaagtttaaaagcagacacacacgaatgtagtatcgttgtgcctgaaatgaccattctgggttgtttagaatccagaatcatcaaaagccatgtggtatgaggaagtaataaatatcctcttgaatcttctctcgtgcc

SEQ ID NO: 2196 - DNA, 642 bp, Homo sapiens
gattcttgtagtgccccccagtcccggaaggtgtgtgtctggcaacctggacttaccctgttaaacactggcagcatcatatacagtttctcttcttgttccttctgagtcatgtgccggggaggatggcacaactccgtgaagagccggcggaggtgcatcagtcctaaggcgttgtcttgtgggctgcactcctcctgcctcggccgccccatgatcctcttcaccatgttcatcttggctggttggtgagacgcacttctaattctgtaggaaaatgtcaatacatgaacagtcaaaacatcatcatcttgactaggtcaagcatgcatgtaagagcttataagaaatttgcaaaatagaaaattctgtctaaaatatatctttctacttctttaaacagaaaagacagagaagcaaaatttgataaatccccctgaagggcaaattatgaatctcagcattggaagttcttactcactttgccacaatttgtataaaatgtaaaacattaatcagacaagtaataaatgtttccaattagtttagtcatatcaagttcaaaaataaaggcgccgggaatagtggtgcacacctgcaatcccagcacttttggaggccgaggccggtgaatggctcgag

SEQ ID NO: 2197 - DNA, 826 bp, Homo sapiens
aaataacacatgcttttttyctcttagtgtttaggaggtcaaagtctaaaagcaaggtgttggtaaggctgcattccttctagaggtttcaggggagawttgtttccttgcctttttcagcatctaaaggrtgtctgcattctatggstcatggactcctcttaatatcactccaacttcttggtcccattatcacatatactaccatttctgatcccactaccttcctcttataaagactcttgtgattacattgggctcacccagataatctgagataatctccccatctcaaagtcgttaacttgatcacatttgcaaagtcccatttgccatgtaagataacatatgaaatgttctgaggattaaaacactattctgccaactacaatgatgaaggaaatatgaggaggaatactagatcttaggttgcaatgattttgaagactttttgaatataggcacgggaagcactgacctgctgtggcctggacttccatggttccttttttgaaatactagaagataagaatcattgatagccatcttagaatcgttctgccactatgtacatgtgtatgaatgtgttctcttgtgtgtgtgtgtgtgtttgtatgtatgtgtgagatatggttagtgcaaaagttgttgtggtctttgccattaaaagtaatgcaaaaactgcaaatactttttcatcaacttagtagttgttttcagtaggtctcataaatgtcttagaataaatttcttacaatggctgggcacggtggctcaagcctgtaatcctagcactttgggaggctgaggcaggtggatcactcga

SEQ ID NO: 2198 - DNA, 2099 bp, Homo sapiens
  misc_feature (644)..(644): n equals a,t,g, or c
gaattcggcacgagtgaagttgcaagttattttacttagatgtttaagaaaggtgatttctagaaagctagaaacttggggcactaggtttccaatgatgatacaactgctatttctattaaatgtctattctagtcccattgcaacatgcttgatatacataatctcctttattgctccaaacacatctaaaaggcagcattatctttattaccagatgaggaaaatgcttagaaatactttgataattagatgtttgtcttattttatgttcttgtaatagaagtatatttatttaactcttttttaccagttaattctggccttccttgacagtggaatttgaattggcatttggtaggcagatataatacaactggtataagttattgatkgataraakcattccaagaagamaatagaaatatttatgcaattccaaaatgtttttaaaatattaattatgcttaaaatatgtaagggaagagttcttatggcttatagttaaactaaactttttttataattgtatttcttgttttaaatcatgatgcaaaataacaaagagaatattgtgtttaattttttagtattaaatgactaaaagttactgggatttactaataagatttatgattcgcctnctcttaccatgttatagaatgagtagaatgagtgtttatttccaatatggtatactatatgcagcaaaaagaggctacgttagtaatgaataataaagtcagagaaagtcttcatgatgagcaatatttcagttgccaagtctgttgcttttcttaaatccatttatttttactattttgctactgtttccctgtggagggtttaatacttctattttcttccttaaccaactcgatagttaaagattatatggagaaatgtacttaagtgtaaatggaaatgcctggctgtgaaagtctattggcttttcttaaaattaggagaatatttatagtcataaaaaaaacagagatggttgattacaaaggagagtagactatgagcttaagtgagctacttgagaaaactttttgtcactttatcacatgcacatggcacaaagttgagttgtgatgtgctataatttgagaaaggagtgattatagcatctttctcattctcccgcccccagtacctgataactccccccactgaatcacttaggaagctcttggaattgtgtgcctgatgtacggcaaaactgtacctcccaggtcattgtggattcaagtaraagggaraggtgktcaagctgcctaaagacaaaacaggtcatagcaaaggcagagcttaagctagagatctaggcagatagagaagtggtgggggcacttgtggataggttgacagaactggaaccaaaatcttattcttaggtgggaggcaaagtaatttaaaatgatttggcagattgcagcaggatccccaagaaaagtctagatagaaacagtgcacaaaagtctgtttcgctgagcataaggtaagaatggagcaggccttcagatggagtttgagattggggtcttggtccaacaggactaatttccaatgggtcttgtggcttttccaagggcttacagcaaagcttacctcccaggatataaagggacaaaacctctttggactgacaatttctaatctccaaggaaggaggctggatctctgccctccagagaatggtctgggcatggttttggggagtgtttgtgaactrgcwgggyacaaattcctcctcggggtcattgcctccatactctatttttacaaaattctcatttgcgggtccaaacttctctctctctcttaggtcctgacagctagaatcttgacggtatattttttaaagatgctacatttcttaagcctagcaacatcttagttgtataaaaaaatgtacaggctgggcacggtggctcacacttctaatccccgcactttgggaggcagaggcaggcagatcacctgaggtcaggagttcgagaccagcctgaccaatatgatgaaaccccgtctctactaaaaatacaaaaattagctggatgtggtggcaggcacctgtaatcccagctactcga

SEQ ID NO: 2199 - DNA, 953 bp, Homo sapiens
ggcacgagagtgatttaaccccccatgaagatgaggatctggaaatataagtaggatctgaaactggtctgcagctgcatgcacagaaacaccctgtaatgctgcctttgtaataaggaggaatccatactctcaacagtcactccctgactctcctcttcctcttcctcatctttctgtgcatgtagtggatttactacggtttattttcattctcatcagttaggaggaaatagaagaaagagtaagtaactgaggttgaatatgttaacttactgggctgttttcattaagcaaataaacaacaataaaaaaaatctcaggctaaaatgaaccataggttccatttgtgaaatttgatgatacagataaccttaggttttcactactatctctatgtatatttcctaaatagcaatatcagcaaaacttcacaggcattggggtgggtaataatatttctttaaaatactcaggagaagtgaaagtcattcaaaggactttaattgtcatggagtcatccacttcccacttaactttttctgcctcaagtcccctctacgcagactgtctaaggcgtgatttaggtttttggaagcagctggtggcagcataaatctggccagacaaggagggtgctgtggaactggcagtacaccctgagtgcccgaatgtcacatgaaacactctgcaatgaagcaagcagggtctactaggtgccctgatcaatgtgaatatatgtaaggaaaggagaaaatgttggttcgtatatttaatttacagacatacaattcaagtgtggtttcaggcccagcatgggtgatgttagaaaggccttgtgcagtgctcctccaagtggggtctgaggcatctggcctgtggtctcactgctgacctactgcatcaaaacaagggaatgctgtttttcagtgtccctggtgattcttggtata

SEQ ID NO: 2200 - DNA, 1559 bp, Homo sapiens
gaattcggcacgaggaatatcggaagctccctatggcactgtcagtgtcctcatccccatcacccacaccatcatcctcatcttccttgaccttcttcttcttgaagagggagctgcgtttgttgtctgaggccagcttttccattttgtactcagacatcttctccctaagctccatctgcatctccttctccttccggccaagttcctttaggtccacattgtcagcaaagaggctgaagatgggcttgctggtccccctcactttgcttctgcaactttccgcgggtgagctcagtgtggtgttgcaggacagcacagactgcatgtcagagctgggtcttgcctggctctgaggcaacaggcagccacccaaggaggagctgctgtgtccactaagcatggagacttggtcatcccccaggcagctagccgctggtactgccttcatgcttgcaacagacggtgagcgggacaacagcagcatttcattttgcttctgagcaagggtctcactgactacattggcaatccagttctggatactggcaatggaaatggtgtctccaggccccactggcaggttaggcaggggtgtggtggggttggaggttgaacaccccgctatgttgcttgcagcytgagacaggtgggagcggtggctctgggtgctcagtactgacgtcgtgtccccatcagcgctgaytgaggggtctgcagaccagaacgcagacaggggaatgctcccgctggccgtggagctgtccgcctcccagcttgccatagactggctctcctccagcgtctgccggcttctctccagcagctccagcctccgttgtctcttcttagccaaggccgagtcctcccccttgctgagctccaccacctcctccttgttctcactgcccaccttcttctggtgtttcagcttccaggcctggtaggctgtcaggctgacgtcggaggggttcttctcccctactgcctcctctgcaccgggctcaccgctgctgtctcccgctcccaagtctttcttgtgaaatccaaattggattctcttgatcttccatctttccagggcagtgagcttgtccttgttcctgctgcagaagttgtagaaggaactggcctcagagcccacgctgtcctcatcatcctcccgcaccctgctccctgcttctgagctcctgtctgccgcctcctctctcttgctcttggcgtggtacctccgggaagcctccttctcaatctccagcagcctctygttccawgcgtcccaggtgctctccgaggacatcgagtctgcgcggcgcctcctgccgtggtccgggcggttcactccagctgctgcttcaggacccagatgtcgtggctgctcacgctctcccaggcgctgctctcgctcagggtgcgccgccgcctccccaccgaggagccagcgtcgctctcctcctccttctcctcctcccttccccacctccggtacccttctgcttggtacctctcgtttcggctctgccactcctggatgatcctctccacgtcctcgtcctcga

SEQ ID NO: 2201 - DNA, 608 bp, Homo sapiens
atgttgtgtggaattgtgagcggataacaatttcacacaggaaacagctatgaccatgattacgccaagctcgaaattaccctcactaaagggaacaaaagctggagctccaccgcggtggcggccgctctagaactagtggatcccccgggctgcaggaattcggcacgagcagctgcagggaaggaaagcttcccggggagaggagggaagtgtttttcttcccttcctagtgacccccatccacaaggtaggaactgcctctcctggttccatcattggagtcccccccacaagctgccccagcattcaggctcctcccaaggggcctgacaggagctatggagagctgcggccctgatctctttcttcacttctgaatgagtccatttctacccttttgggacccttagagatgtttggaagagtttggaggaggggcactaaggtatgcacaaccagatgcttgcagagtgactgggtcagccccagcttcaaagaggctatatcagtctatccccaaaactgaagtcccttgtagattttttctttctttaaccagtattcacatatttgtccctctagactaccaacccttaggcctcgag

SEQ ID NO: 2202 - DNA, 1157 bp, Homo sapiens
ggcacgaggttcatcctccccctgtgcctgaacacatttctgttctgctcactgaatgacaggcagagaaagggagagaaatccccatagaaagaagagcatacagccaagtttgcgttggctgtgctttctgctctcaatattcttagcctgtcttaacaatcattcttctgggtgggcatacatgcttttctttctcatgaaaaactgggcatctcagagcacggactaaaacccactaccaaggctgtgcctgcatctgactcatcaccctcaaagccctcctcatcctcctttctcattccctcattttcctcactagccttggtagagcactttgcccagcatggtgcttggctcatcattaagcttcctgaaaggacccacatcatcatcacttcctccatgaaggcttcaacaacatcccaggctaagttgctctgtgtttccacccagtgctcccacatcctgttttgcttatggctggcaccttttaaggaaaatctgtttacctatccatcttccacaactctccattcccagcacacaaacactgtcagtcaccagcagccttctctatctttgtgtctccatgcagtagaatcaaagaaagaattggttggattaattcatctatcaccaagggcacacaagggagccacggagaattagaaacaagcagcttcgagtcagacagctctgaatgtaacccctttttttacattttcaggtagaaaatcacttaaacctttagattttcaatcacctcatgtgtgagtgatgtcaatcaaggaaagtgactgagacaagtctcagtcattttaggggtttatttgcctaagttaaggatacccaggctgggcgcggtgggtcatgcctgtaatcccagcactttgggaggctgaggcgggcggatcacctgagatcaggagttccaagccaaccaggtcaacatggtgaaaccccgtttctactaaaactacaaaaattagccaggcatggtggtggacgcctgtaatcccaactacttgggaggctgaggcaggagaatcactggaaccagggaggtggagattgcagtgagccaagatcatgccactgcactccagcctgggcgacagaggaaggctccgtctccaaaaaaaaaaaaaaaaaaa

SEQ ID NO: 2203 - DNA, 742 bp, Homo sapiens
ggcacgagtgtgtaggtcacatttaacaccagtatgaaagttagaagatgaaaatactaacagtaagtatagttacaataattttaatgtgtgcacttaataaaaatacataaataaggacaatatcctttccatttacattttatatatttatgttttttcatgttctatttagtgtcttttttgtttcaacttgaagacctgtatttagcaaattttttttgtggtaggacaggcgtataatctttacctctccatttctgaatgtcacttttgtggagtgaagtactcttggttgacagacttattttatttcagtactgtgaatacatcatccattatttctttcctgcaagatttctgctgacagaatactgatatttttctgcagcttcccgtatatgtgatatttcacttttcttctgctcctttcaaaaatatcagtttgactttcatgttggataattagattataatgtgtctcagcacagatctcaaagtgttcagcttctttggggttatttgagcagcatggatatggatgtttattttcctttctagatttggggaattttatgttattagttatttaaataagattttcttcccgttttccctctctgctccttctagaacttccataatatagatattgtttcacttgatggtgtgccgtaaagcaagtaacctttcttcattcttttttctttttcctctgattagataattcaaataatgtgcc

SEQ ID NO: 2204 - DNA, 303 bp, Homo sapiens
ggcacgagaaaatttccatataaagaagggtctggtgtagaaatatggtgaagggttgcaagaggttgctaaaggttgttaacttgatgtttcatttacaaaataaacactctgtttatacttagtgtattacactttcgtattgcttgccctgggaaatatgccagggttggctgtgactagcccaacttgggttgttaggttcactaacaatccagtcactgcggccagcaggatggaccatgctgcttggttagtactgatctcaggctcatccctggaactgagactgaggtcagcccc

SEQ ID NO: 2205 - DNA, 1162 bp, Homo sapiens
ggcacgagctcccctgtgtttccgaaatggggaaagaaaggccaggcgcagtggctcacgcctggaatcccagcactttttgggaggcggaggtgggcagatcccttgaggtcaggagttcgagaccagcctggccaacatggcgaaaccccgtctctactaaaaatacagaaattagccagccgtggtgtcaggtacctgttgtcctggctactcgggaggctgaggcaggagaatcacttgaacccggaaggcggagattgcagtgagccaagatcatgctgcagtactccagcctgggtgacagagtgagactctgtctcaaaaaaataaggaaaaagaaaaggaaggaaagagcccacctcgctggtttatgagcctcaggccagtaactcaaactacgtttggagactgtggctctgtttctagccacaggggaaaaaaacctatgaacaaacaggcacagcccctgcctccacgaagtgatgacttcatgccgcagacagcgaaccctcacctcccaacagatgcctcagtgactgcgggggaaaagccacgaaacagagggccagatgttgagactgaaccattcagggcctgagctgtctggaaggccggggcaggtccctgaggtggtgagttgggaaagagtggaacattccagaaagcaagagcctcaggtatgagtgctctgagctccaggggttcatcttgtcctctataaaggggggaatgacacagcgcagttgctggggaaaacagtggggttcctcaaagagtcacacacagagttactgtcattaccaaccagcgactccagtcctagggatctaccaaaagaactgaaaacaggcactcggcaaacacttgcacacacgtgcatagcagcatgagtcacggcagccgaaaggcgcaaacaactcgatagccatcaatagatgaatggataaacaaattgtggccgggcacagtggctcacgcctggaatcccagcactttgggaggctgaggtaggaagatagcttgaagccaggagtttgagaccatcttaggcagcaaagtgggatgcccatctgtaaaaaaaaatttttttttaattagctgggcatggtggcacacttgtagtctcggtggctcaggagactgagggaggaggatctct

SEQ ID NO: 2206 - DNA, 759 bp, Homo sapiens
ctcgagttttttttttttttttttttttttttttttttttttgagacggagtcttgctctgttgcccaggctggagtgcagtggtgcaatcttggctcactgcaacctctgcctcccgggttcaagtgtttctcctgcctcaacctccccagtagctgggactacatgcacgtgccatcacgcccagctagtttttgtatttttagtagagacagggttttaccatgttggccaggctggtcttgaactcctgacctcaggtgatccaccctcctcggcctcccaaagtgctgggattacttttttctttatttattttggcttctgcttttcacatgaggggcttttctccaatatctgatgatccttcattgtccattcatcttcacaagtaaggcaccaaaatgctaactggaaatcacaaaatctctgtatgcctaggcaagcttgtgaactaatgaagcatcactgcaggatggggaagctaggtgttccactggagcaggggtccccagagttcagtatctgagatggtttctcttgggctgatcagtttctctgaagatgaagggtgcaacacatatgaaaatgaatcaatttcatcttcagagctacctgatattttcgattcctgatcctttctgaagcctacctgagtcttctgaggttctgtggaataaattagtttgctccttggccctaccctaactccacacacaccgtgcccacatttcagctttctcttgtcctcgtgccgaa

SEQ ID NO: 2207 - DNA, 933 bp, Homo sapiens
cggcacgagctcgtgccgactgtaatggtcccgtcacacttgtctgatgaggatctgttggttgactttgacagtgataaacgaacacagcctatctgggtgttttttgcacttatagtttgggggtttgaagtactggctagaagctggcggggtgtgtgtgtgcaggtgtgcgagtgcatgtgcaacgtgtgcgtgcaagtgtgagtctgcacttgtgtgcaagagaatgtgtgtgtgtgtgtgtttggagatttggacttgaaaattctagctcaggtctttggggtagtgtttgacctgaactctgaaaggcaagggtcccagactttcctgggatgatgggaactgggcaccccaatgagctcggttgtgagtagacggggtgggccaccgaagagaagacagagtgggcctgtagggccagcccgaggtacccacagtggagggtctacaggctgatttgggaggtggtggtttatacctgtagtcaccttctatcttagttaggaattcaccttcacacttccagaaactgccaagaagaatgccgccgctcaggtttatctggtagaataagctgtttgaacaaagatctggaggttgcacaatcctgtgtcattctggatttatcttggggtcgggagtcaacgatacttcttgtgctgtcgtttctccggccgtgtgaagttaccacctcgtgagtggtcataagttagcgtgtctaaatgcactttgaaatcctaggatgaaaaagccaggccctgtcttttttccttgtctaagcaccatccttgcttaggagagacacggctgtggctctcaggctgtggggcaatgttctgcttataatgtttcaagaggttcaaagcgtgcaggccccatgctccgtgagagccttgacctgggtcagcaggggcggctgggcttgac

SEQ ID NO: 2208 - DNA, 655 bp, Homo sapiens
cccccgggctgcaggaattcggcacgagaagatacgacgagattaaaaattttgcctaaggtcacacagctaatggatggtggaagtaggatactaactcagacagtcctgctacacacagatatgcaaataatcctgatttatagttatttggtcagagggatggattgtatattttatgaatgatttcagaccctcttctactccctcttactttctttctgtttatatcactgtcaattaactttccagtagtagaggctcagagatggtaaaactaccactaaatttatagaaagttgtatgaatttctttaagaagtgggaatacttctcctttcctcagttttttcctatttatggtcattgcagtaatttctatcatcctttgcagctttgaaatcacttcttcacatgtaaacagctcaccctggtgttgccatggagatttatatcaatgccatgagccagggcctaatttgcgcattctgctgattaacaggagtatttgctaatccctgccaagctctctcatccactgccatgactaatctcaccggttggcgatgcgtggaattcatgaatgctagaaacccatcatcttaggttatttaacacttcaattctgttcagtaacaacttaattaagtctcgag

SEQ ID NO: 2209 - DNA, 366 bp, Homo sapiens
ggcacgaggtttaacacctcgcagtaagggattcttcacatcccagaagtagctaccctgcatcttaaacagtatgctaggttagattcttgcccgtttgctgttcctgataatgccctttaactcacacaactgagctgttgttagttaggatctacggccacagaaatagtatgtctgaaataaacataaatatgagtaaaatccaggcataccccctaaatcatgcccttcactttcttcctgtttgtaaatcttttgtaagccttcaactttttttctttttaagcttgtagccatttctttttgaatgactcttagcttactgtgtttccaggggttgaggagccatgtatctgtgggata

SEQ ID NO: 2210 - DNA, 621 bp, Homo sapiens
  misc_feature (616)..(616): n equals a,t,g, or c
attcggcacgagggaggaaagagggtggaatctggacagtatgaaggatttgtattgtacctgtaatgtttgatgtctgaagctgggtggtgggcatggctgtttgttattctccatccttttggtatgcctgatacatttcataataattttaaaaaggacaagactactgcagagaaatgcatagagtgagctctgtttgggtttttaaaatgattcctacatctatgcttgcagatgtaagcaccagccctggaaaacattgcaagggattcttagtaggcccaagctttgggaaagggccaagggggctggggagttgattaggaggggatacatgctttttcctgctgccttttgaattttgtaccacacgtagtattacttattaattaaaaaataatctgaactagccaggcgtggtggcacatacctagtctcagttacttggaaggctgaggcaggaggatcacttgagcccaggtggttgcggccagcctgggcaacatagtgagaccctgtctctttagaaaaaacaggccaggcatggtggctcacacctgtaatcccagcactttgggaggctgaggtgggtggatcacctgaggtcgggagntcgag

SEQ ID NO: 2211 - DNA, 1611 bp, Homo sapiens
agtacaattccttttcttgcacagacattttcccaagtcagtacatctgggataatagttctcagagtggctgtatattatattcacatgaagagattttaaaagttataccccatgttcatcgctttatgttcaaaagtgtgtgtgtgtgtgaatgcatatgtctgtgtacacacatatgtagtatttatgcctggcatgtatacaatatgggtccatatatgcaactgagcaggtattttagaacatctgatgaccttgtcatttcaagaactgtggccacagattgagaaataaagcaccctttcagtagtctgagtatttctcaacaaaagtagagacttgcccatccttagtcatttctatggraggagtggcctctcattttatgcttttatagggacgtctattcccagcccatagtttatgagcaacattctstcagcaggcwkgaatagtggctcsctataattaattcccttcttgctcccccacctctgagagtgagaaataaaagggcattaaagggaatgtagttacaacccacaaagggaccacataaaatgtcaccttttggctcaacacattgttcccttcgtgactcctagtcctgaatttccatctcacagggcaggcagagtgtattgtcagctgagacccaagagagacacattggcagtcaatctgcatgatatggtaggggtattagttaaaactttactgaaagttaagatctgtgtcaaaggtttttccttgtcctatgtgcattacatggaagacagaagaaaacaaggaaaagagatgaattgctgttgcaatttaaagtatgggggcagagagttgagtgtgagctgcagaatttctatgtgacaacatagaatagtggtgaagttacttaacttttgtgggcttcagtcctcctgcctccctttgtagcattagcatcataatacgtgtctcccaatgtttcagggaagagtaagtgggtttagatatatgtagtgaataccacagtacctgacatatagtcagttctcagtgctgataatcatataaattgaaagcaattaaaacacccccatttatcttcccatgcataatttataaagcacattcacatcatgcaaattcatcctcacaacactcaacattcaattaagataagcatgcactcttgtttccctttgcacaacttttgcaagttgaatggctggtttggttagattcaatccagtgttctttccattagagcagctgccacctagagaagaggacaatgtttctcccagccattgaacatgctgcatgtctctgttgaggggccaccatcaaaactcaggccctgctgttctactctaggaggacagatggtcttaaggaatatagggaccttctagaccggaatcctcacaccaaacctttagtctatggtaatcactgtttacaaaagtttaatcttgttcccttctttaaaagtttcagagcattggtgtttattgacttttttgtttctttaaaaaagaggacaagccaggcacggtggctcacgcttgtaatcccagcactttgggaggctgaggcgggcagatcaccggaggtcaggagctcgag

SEQ ID NO: 2212 - DNA, 1267 bp, Homo sapiens
tgcaggaattcggcacgagctcactttgaccatgcgatcccttggcctgagatgcgctttctatcttctctgtctgctcaatccctctgccctcccagacccagctggaaggtcacctcccctgtgaagtcttccctgactcccccagcagaattaactgccccctctcttgggcttctggctccactcagtttgtcacaggcctgatgagcaaggatatcttgatgaaggtgataactggccgaaaagcagttggggcgcccaatggcgcagcttcagaagcaccttctgtgtttttggaactgttggcagcatcccaaggtgaaatggtagaagcatatggcatgggagaatggaatggggaaggatagggagtggaggttcacagtccattccaaggctgtatgtcaagatgacaggaaacacatatgcagcttgtctcaaagttgtatcttgagactggggagaaagaaggaaagaaaacaaggttttaaaatgcagtttgaagccaagctgcctgcttacagtcagactgcctggattcaaatggctaatttctaccacttcaactgactagctctgtggaacattccagaatttctctattcttctgtttcctcttttttcccccttaatttacattttttgtgggggggcaggtaagagacaggatatcgctatgttgcccaggcacaccttgaactcctgggcttaaacaatcctcccaccccaggcttccaagtagctgagactacaggcacctgccaccacccccggctggtttcctcatctttgaaacaggaagaaaaacaatagcaaccactgttggagttttaggagaccaataaacactctttctgccccttctgagttcagaactaaggaagaaaagcaggtagagatcaaaatgtcatcatcattgctgacaagagctagactggaggatgtggttgaagtgaaaatactttacccccagtcactaacacagcaactgcagacagcccattaccagggtacagggcggtccaacccagcaccccaccttctcagaaagttatcagtcagagaaatcctcctcctgctctggggaaaaggagaatgaaagctagatagacatgttcctccacacttggccccgctggggaatggaataggaatctcctcctgtccttgaaaatatgagaagcaaaaataagtgattctctcaataccattttatgggctcttgaggttgttatgagattaaggaaaaacacagctaaagtat

SEQ ID NO: 2213 - DNA, 1341 bp, Homo sapiens
  misc_feature (872)..(872): n equals a,t,g, or c
gtttccatttccttgagagatttttgttcatccctttattttgagtctatgtgtgtctttgcttgtragataggtctcttaaagacagcataaaaatagatcttggttctttatccatcttgccactctgttttttgaccagggcatttagctcatttacatttaaggttagcattgttatatgtgaatttratcctgtcatcataatgctagctggttattttgcagacttgtttatgtggttgcctcatagtgtaacttgtctgtgtacttcagtgtgtttttgttgtggctggtaatagttttttctttccatatttagcacttccttcaaaggctcttgcaaagtaggcctggttgtgatgaatttcctcatcatttgcttgtctgaaaagggtcttatttctcattcgcttttgaagtttagtttgsccagatatgaaattaagggttggaaattcatttctttaataatgtcaaatattggcccccagtttcttctggcctgtagggtttctgctgagaggtccactgttagtctgatggaattccctttgtagatgacctgacctttctctctggttgcccttaacattttttctttcattttgaccttggataatctgattattacgtgttttggggttgatcttcttgtttagtatattactggtgttctctgcagtttctgaatttgaatgttggcccacttttctaggttgaggaagttttcctggatgatagcctgaagtatgttttctaacttggttccattctccccatctctttcaggtaccccaatcagtcataggttcaatctctttacataatcccatatttctcagaggttttgctcattcctttttatttgnttttctctatttttgtatgcctgtctcatttcaaatagttttcaagctctgagagtcttttccctgcttgttctattctgctactgatacttgtgattgcattgtgaagttctcgtgttatgtttttcagcttcttctggttagttatgttcctctccaaactggaaaatgctatggttctggcaggcttgtaaaggtgctgtgctgatggtcttagacaagatctggaataattatttggattatcagacagagattctcattctttttctgttactttctctcaaacaaatggagtctctctctctctgtgttcttagctgcctggagttggcagtggagtgacacaagcacccctatggctactgccactagggcggcactacatcagatctgaagacagcacagtgctgggtctcacccatggcctgctgcaaccactcctggctactgcctatatttgctcgag

SEQ ID NO: 2214 - DNA, 372 bp, Homo sapiens
ggcacaggaaaggaagaagatgactgtcccctaaatcaaagcccaccacagaggacctgagcaggtcccactgttgcagactgcctgctctcaccagctactgggcatcgtctgactcagcttgggagggcccaagtgaatggtcatcagattgagcaactgggcaccaacatgtgtttcctgagggcctgctggtggccagctctgtgcttgaccatacagcaggagggactggaaaaggggacaatacagtgcctgtgcttggggagctctgggaacaaaagcccacccattaaatagtataatacccccaggtgtttctggcaggggagatgggaaaagtagccattttgaaaaacagccagctggggg

SEQ ID NO: 2215 - DNA, 745 bp, Homo sapiens
ggcacgaggacacaaaaagcattaaagtattaagtaatggcaactggaactttaacaacccttctgtccttctgtagtctgttgatatagattggatgtgtgtcctctgcagatctcatgttggaatgtgatccccattgttggagctggggcctaatgggaagtattggttcattggggcacatcccacataaatcgcttagtgacatccccttggtgataagtgagttccttctttgagttcatgcggggtctggttgtctaaaagagtatggcacctctccccagctctctcttgctccttctcaccatatatcatggtagttcccatttgccttccaccatgattgtaagtttcctaaggcctcaccaggaacaggtgccagcaccatgcttcctgcatagttgttcactcttattcttcagaatggctactgcaaatattgtccagatgtcaaagctccctactccactctgtgcccctcctacactcaacttgttaactctttgctcccgatgcaaactcacttgtcctttctgtcaccgtggatgtctctctcctcccagtgcagttaccctcctgtgatttggtttccatttcctttcctttcattaggaactttagatcattcatttaaactctcctctgtgtccttaagtttttccactagtcattggtatcgacattttaacatgctcaagtctcctctatttctccctccctccaaaaaaaaaaaaaaaaaaa

SEQ ID NO: 2216 - DNA, 1203 bp, Homo sapiens
ctcgagctgcagtgggctccacccagttcgagcttcccagctgctttgtttacttactcaagcctcggcaatggctggcgcccctcccccagcctcactgctgccttgcagtttgatctcagactgctgtgctagtaatgagcaaggctccgtgggtgtaggaccctccaagccatgtgcaggatataatctcctggtgtgccgtttgctaagaccgttggaaaagctcagtattagggtgggagtgacccgattttccaggtgctgtcacccctttctttgactaggaaaaggaattccctgaccccttgcacttcccaggtgagacaatgcctcgccctgcttcggctcatgctcggtgcgctgcacccactgtcctgcacgcactgtccaacactccccagtgaaatgaacccggtacctcggttggaaatgtagaaatcaccggtcttctgtgtcgctcacgctgggagctgtagactggagctgttcctgtttggccatcttggctccacccccatttgtgtgctatttatggtaacttgtgctgatgactctgcgatgtgtattccaaacatatgtatggaatagttccatttttaaaagtactattcaaacagcattgtcctcactctcaagtttgtcatctgaattaaactttacttaatctagtatgaaaactycttgagctataaaaaagtatgaccttttttgttataaaagctatagtcacatcacaatagggctatataaattaacaaccatatttcagaagcacttaaagcataaacatgagcccttaaatatctaaataactggggtcttttaataattcactgtatcaaaccctaaaaaaatttgattaatcccaagaaatcttcttctgattgagtaaatcaaataaatattttcaccatgaaaaagatcatcctacaatatctatttgtgagaagtttagtgctttagatattagggccactctacttagggaaagatatatttctttttctttttttttcctttttttttatttttttgagacagagtttcactcttttcacccaggctggagtgcagtggcgcaatctcagctcaccacaatctctgacttccagattcaagtgattctcatgcgccagcctcccgagtagctgaggctacaggcatgtgccaccaggcccaactaattttttcttggggccg

SEQ ID NO: 2217 - DNA, 722 bp, Homo sapiens
  misc_feature (598)..(598): n equals a,t,g, or c
gaatttctggagtttcaggagctttatcctaaggtggctgtgataacctggattgttgtgtaaattgcacatttggggcttggcaagtggcagatgggagttctggctgttttattaccagtaactgggacatgggcttgggttcgaggaggccacgtggctcctgacacagccttaaggatctgaggtggcccctgccctgggcacctggggtgggaagggaggtgcagggaacagggagacttatttttcactgtgatcttttcgaaccatttgaatgtattataccttgtgtgttttattcaaaaatgggtagatttgttaaacaaaacctaaaaaaaatatgagcaggagtgacagaaaacagagaccactgagtctgagtccaggttggcccctcccggtgtaaccttgatgcaacattgagcaggcctgagctggggtgacctcactgacagctaggagaggaatgagactctcctctgggtcactcggtggtaggggtgagctggggtggcctcactgaccgctaggagaggaatgagactctcctccgggtcgcttggtgtaggggttcagtgggaatgggtttggggcntctgacatatctggctcaggaagccagggtaaatttcagccttaaaggagaaaggctcgtgtcagcccccacagtctgcaggggctgtccctcctgggctcctctccacccctggtgatgtgac

SEQ ID NO: 2218 - DNA, 252 bp, Homo sapiens
ggcacgagtttgagccacatgaaagtaaagctgccttttgtgtctgtgtcactctgtgtgtgtgactgtgtaaggggtagcacacttacatggaacaggttactgcgtgtgggagaaggctcaggaaggtattcatatttatacagacggaaagctgggtggggttgcggacacactcccatagagaaggtggtgtgagcttgtctggcaggccgtgaataactttcatatggctcaaaaaaaaaaaaaaaa

SEQ ID NO: 2219 - DNA, 1195 bp, Homo sapiens
ggcacgagcgaccactcacaggtgccagggctctgacatctcgccaggcatagctaaaggttatactcatctatccccttctgcttctgttacttttggtgtgtggaacaagacccatgggagctggtgcctttggctacttggccttgccttgtctggtttgcttgacatatctgttacctaccttatctagaaaccattctcagatgggatgataaattaagagaacttacactcacagaaactccaaaacaattccaactgggcttttcttcatgttgaatcataatatactgtaatgatttactaatgaaataccattttgtttatcaaattaaatgagcaaatttaaaatactgatagccaagtgtggtggctcatgcctgtaatccccagcactttgtgaaggtgaggcaggaggatcacttgagcccaggagttcgagaccagcctgggtgacatagtgagacaccatctctacaaaaaacataaaattagccaggtgtggtagcatgcaactacagtcccagctactcaggagactgaggtaggaggaccacttaagcctgggagatggaggctgcagtgaggtgtgatcatgccactgcactccagcccagtgaaagagcaagaccctgtctcacaaaaataaaataaaataattgatattaccctttatacatggttgttgaaatagggtggtgcccttttggaaaatcacttgacagtatatccagaaatgctgatatgttttcacacaaaaactttgttttactttcagaaatttatcctaaatcttggccagacgcagtggctcatgtctgtaatcccagaactttgggaggctgaggcaggcgaatctcttgaagccaggagttccagacaaatttagcccatgtggcaaaaacctgtctctactacaaatacaaaaattagccgggcatggtggtacatgcctgtaatctcagccactcgggaggctgaggcatgagaatcgcttgaacctgggaggcagaggtttcagtgagccaagatcacaccactgtacttcagactgggtgacagagtgagactctgtctcaaaaaaaaaaaatcttaaatctagaaaactgtagatgtgccaggcatggtggatcacgcctgtaatcccagcactttgggaagctgaggtgagtggatcatttgaggtcaggag

SEQ ID NO: 2220 - DNA, 1347 bp, Homo sapiens
ggcacgagaaattttcaggatgccagcttcttagaaagcaggctctttcccagtgggtttcttacaatgaaaacaaccaaaatataacatagagctcattaaccttgccagccactgtgctaaattatttgtatttattttattaataataattatttctttcatcttaaaaataacctttaacttattaagaatgcatgcttattggatattctttagaaaatatagttcaacaaattcagccataatttcacccccagagagtgtcattcccaacgctctggtttaggatggctttggaagctggagccctatacattgggtggatattaggccaggcttttttttttttttttttttcagaagtttcccttccaaaatgtgggaaggtctagtagtttgcttggagagaatcttttctgttttcttctctctcaagcgcttgagtataagacctagttattgcctgatttgaaaaactgtatttgattaaaaagccctcaaaacgtggtcagttcagatgcaactgtgggaaagaaaaatgatatttttctatttctgagaagcatgagttgagggctcaacacacggtgaatgcccaggagccgatgttaaacaactgaaaagatcaattgaaaagaaggatccccaaacacaatttcccctgacttaatatttcaactaatgaagtcaaccctgactgagcacaggttacatgccaggcacagggagggcgctggaggctgctgcatggcatctacctgtgtgtgtgtgtgttgggaacacatatgagttcatgtgcagcggtgtgtgatgtgtgtgtctgagtatgtgtgccagtgtgacttgtgtgtgcgaatgtgtgttcatgtggttgaatgtatgtgtgtgtgcaagtgtgtgaggtgattgtatgagtgtgttttcacgcatgtgggtgtgtgactgtgagtgggtatgtgtgtgtgtgtgtgtaggaggagaggaggagatgcaaagggaaatagacactgctatgggagcccagggggcttgccagggagagtgcacgagacctgcacatagcaccctcttcctttgatttgcaaagccctctggacctcccttcctgcctcttttcctcctctattgctctaaattctgaaaccagaattgcttggggttcctcatacaacctcttgacaatcccacccttccaaaggaggataaactgactttcaaagccagtatccccaatctcaagtcctggtctctcaactggacttggggcaaaatggttacagagcatggtaggcagccttcaagatggctgtctctgaaattcaggctcttgtgggattccttccc

SEQ ID NO: 2221 - DNA, 794 bp, Homo sapiens
ggcacgagaaaagtttcagttctggggatgattttgttcctattcttgataccaagcgataaaatcaggctgctaagagaaaatgaaaaggaaatagccagctagtgtcattgaatcatatcccgaggcagtgagtttcttccagcacattttggcctcagtcctgaggctggaccttaactagtgaactgcaaactcactcaattatgcagtctgcttggtgcgatggaagtgaaaatgtcctagagagttgggtgctagtatgcattttgatagtctcctagcctgtgacccaggacagattccttgcatgcataggagtttgtcaccatgcaaaatctggctgttgttcttctgagaacatgggggagctggactgtcaacaatgagccatatcaggctgaaactgggaaactgttctgctccttcagagtcaagacaagccagaatgagtgtcaaatttccttcctctgtgcttcctcagatgtggtcagattcatagccttcagtctattctaattggtagctagcctggtgtggacttttgaccacccaccaatcaaccaactcccaccctcaccatttactgcacgagtaaagccacgcttcctaggaactaccattggtagagatgttactgagtcataggccctgagataggaatgatctataaaggccatccacgccagttcttgaacccttctacaacagtccagactcatctttgcccaatctctcctctgacaatgaaagccttaggaccaaaaaaaaaaaaaaaaaaaaaaaaaaaaaaa

SEQ ID NO: 2222 - DNA, 1184 bp, Homo sapiens
  misc_feature (467)..(467): n equals a,t,g, or c
ggcacgagcagaggctgattctctgtaatcctaccctccccttctccccatcagggcccttcttagcactctgggtggttgctccaaccatgcacctggaagcttgggcttgggttacaatgctctgtttatgtgtttgtctcccctgattgcctgccagtgattcttccttctcatatctcagcacttaacatagttcttgawatatattaggtgataaaaattgtctcttcttttagcactggagccatgagatacccctgagaagtggtgagcttgtggcgtgaagagctgggtgacctcctcttccttttggtggcctgagccagagatgtcacttcctcacctgctcttttctgctttcatgtctcaagctgcctgggggcttctttttttaggtctcttacactcgactaatctgcgatgggcctagaacccacaatggggaaaggacagactcttcaatncgcaggttgggaaacaaaatattcacctgcagaagaattaaattggagccttgtctcacatcttatataaaaatcaactgaaaatggattaaggactttaacataagatgtgaaactagaagaaaacataggggaaaagcttcttgacattggtctgggcaatgattttttttttttttaatatatgatcccaaagctcaagaaaaaaaaataggtgaatggggccaggcacggtggctcatgcctgtaatcccagcactttgggagaccaaggcgggcagatcacttgaggtcaggagttcaagaccagcctggccaacatggtgaaacctcgtctctactaaaaatacaaaaactagccaggcatggtggtgggcacctgcaatcccagctccttgggagcctgaggcagaagaatcacttgaacctgggaggcagaggtggcagtgagccaagatcgtaccactgcactcctgcctgggcaacagagtgagcttcgtctcaaataaataaataaataaataaataaaacaaaaatacaaaaattagccaggcatggtagtgcatgactgtaatcccagctattcggtaggctgaggtgggaggatcaactgagcccaggaggcagaggttgcagtgagccaagatcaagctattgtattccagcctgggtgacagagtgagacactgtctcaaaaaaaaaaaaaaaaactcgag

SEQ ID NO: 2223 - DNA, 450 bp, Homo sapiens
ggcacgagacacaactgggatccaagtgtatgcccttggacacgttgcttaacctctctgtgcatcagttgggtgataatatctactcctggcacattttcagcgttggctgagttacatgtacagtgcttaggccacctgggggagagtaagagtgggatacgtgaggatgtggagtctgttgcatttctgtctgctgctggcatccttcttgtcttgttttgagttgctcgcctctgtctgctccctagggcgtagatttgaggaatattcctggttcttcccaggcagcaggggctcaggctgtgctggagtcagctaggctaaggggctggtctggcatccgcgttgtcctgtcacctccttggtgttttctccaggcctggatctgtgctgtgtgggcacctgtattcctccctcctgccctcactgattctccatacctttctt

SEQ ID NO: 2224 - DNA, 1375 bp, Homo sapiens
  misc_feature (825)..(825): n equals a,t,g, or c
  misc_feature (1346)..(1346): n equals a,t,g, or c
gaattcggcacgagcaaccattagacattgaagtgatgaatcgttatccgtgctgcacttagaccgaggctatccagtagtttatttatggtggcagtgtatctcaccaaaacactatgctttccagcttccctttcagcgacccatgttctttcattgcttctggtcagtgaaatctaagcaagtattttttgggtgagtcttccaggaaagtgtttaggggtgtggttaatttttgttctgccaggaaaatgagtgggatagctggaatcatgatagtcatggcatctctgttaatgtttttggtgcctttgaacagaataggaagaatcccccatctttgcagatgagttagaaaatttcctcctctgggtagaaggaatccctcagaatacacagcccccactcacttcttggtcaggtgtcttcacagtaaataaactacacaactgtatggggtggcctggacagccatattggactatgaagcaggaaaggaagccatgctctaaagatagcaaacccaaggagaaaagcagcctggtccttgctgaccatggatgtgccatatcagccctgcattgactacttccagacttcctttatgtgagagaaaaataacatttattttgttactgttatttctgatttattttactagcagctaattgcttgtwaagttaagactacatgatatgatttgagaattgctatcattaattaattaagcaattgttccttgtgaattctgtatcagaaattctatgatgtactagagataaagacagaatttgcaatctaggatgtgaaagacagatgtgtacncatacaggtaattatagcataatgtcatatgcttgttcagtttgcatgctggatagagacatctaggcaaaaggttagtggggactgtgctttgatagactgcatgcmcccagarggaaacatatcctaattcatctccacaaacggggtacctctttttaaaaatgcttcaaccaataataatgctttattatcatttagttcagtgattaccaaacttattttagcagccattagccttctttgaaagaataataatacagaaacacaacttattagttcagatgttttggagagatctaactcagattagatctaaaagagaatttgctggttaatttaaccacacttactgtaagagagttgggcacagcctgttaagggagtacatagcagggtttttagaaaaagcttcacagaggaagtgatgcttgaggtgaatcttgaaggatgattttaagaaaaggacaaaatgggaaacagcatactatgctgaggaaagcggcacgagcggmacgacngggggcccgtacccaatagccctttggtg

SEQ ID NO: 2225 - DNA, 328 bp, Homo sapiens
ggcacgagtaattttctcacttttgatagaggcatgggtacagagaagtatttttttttagtttaagtaaacaacagaacaagcattcatatgagacaactgacacaaacctgagggagacactagggagtggaggggactgtggtgcactagagaccgtgtatcccttcttaaggggaaccgtcccttctcagctcagctgactgttgccttggaggaaggcggagctggtatttctggatcttcctatttttcaaaggaagttaaacatctggtgttttatgtgaaatctttccattttctaatattacctgtttggtcgctgtgc

SEQ ID NO: 2226 - DNA, 649 bp, Homo sapiens
  misc_feature (567)..(567): n equals a,t,g, or c
  misc_feature (588)..(588): n equals a,t,g, or c
ggcacgagctgcccccaacaccagtctgatgggattgtcctgaggttggactccgttattggaattctaagccccttgggtggttttwatgtgtagccagggtcaagaaccctgcctgatagagtcatttggggcacacctcagcacagggcccagtacataggaagcccggggatgttagctggtgtgatggtggctgctggtgtcggctgatgtacagctttgtgtgagaggacagcttggggccggaatcctcccccatggctcctctttgccagggaccctgtgcgagccccatgctgacgtccctacccgaattctcctggaagttcctcctgtagcctcctgggtccccaggtggctccctctgacctcactgatgatgcaggtgcccaggtgtgccgtttctgacgcagggcagggccagggcttatgcagtcgggtaatgggctggaggcgggccttagggtggaagtcagtgtttctgtcccctgytgcagcaagagcaggataggacatcaggcccccccccccccaattccccagggaaagaaaacccaaccaatnccaaacccagctcccactttntcaaccacagttgcagagggccctgctgccttctgtgaaatgatggggctggacggctcag

SEQ ID NO: 2227 - DNA, 1521 bp, Homo sapiens
ggcacgagctccacttgaatttgcttagggacctcttcctccatttgactaaactcccagtgccgtgcaatggggtcacttcttgtctttccacggtcatcctatgcactccttcacctcatcggagtctgattccttatctcatgctcagccttgtggcgggcacgtgacaagcatcacctcctgaatttctcatggcaccggcgcaaggtacaggctcttgacaaccctgtgttatgtgtcaggaaactgaaattgaaatgaattatccatggctaaatgcattatccatggctaccagcagggaaatggaaaatatttgaaccccagaactgttgatcgagaattctttcaagttttatatttggcctcttctccttaatttagatattcagtcctatttccctgatgcctacaatgtgccaaagtcgcttatacttctttgcctttcgagttgctgttttcttgtctcaaaacatcctactcttgagttctttgtgcggttaatattttgtcatcctttagttctcagctgaagtgtcatattctcaggtaggaattttctacccacttttccataagcagaatatccttagtttctgtctgctttcacagagtgcttactgcctatttttaaatttactacactctataattatgttactgatctggttactgtcacctgatataattatttaatgtgcctggcttagtgtatgtagttgtgcagtaaatattcattgaatgaataaacgttaaaggttatgaaactgtgacgtaaaaatcttatgaataaaaaatggaagatgggaaaagtcagaaacagcttcattacatgtgtaaaacacaaaccaattatgtccaaagaaaagcaaatattatttccacagaattaataatttaatattatgtgaagtctgggtcattgaatacttgtaaattggcaattgattctcgatatattcctttaaagttataatcttcttgaagtttaagggaagaaaggtgctatgagagggcacaatggatgttgaataataaatttttaaaaacactttattcttagaagtttcactttggtttatcttccttagttaaatttcctttgtagcaaatgtgtgtacccttgatcacactgaagaaaatttggatgttgacagcacatggaagcattgttttcagatatcttcaacttagcaacttttggatgtcaggctccaaaaacatcacaggagggaaaataccctgactttattgtttgatgaaaatttgtggattgtgcaattattttgggtttgtatgatttgcttttatttactttatatattacatacagtataaaatgtacactttatctactttttataagtcacaattttatgggttttgctttacttatagcgttttcctcaagcaattcttcagatactgagcatcagaaaccaagtatttggaaactgagaaatgtgagctgaacagctgagtgaatcagacagggccctaatgaaaaaaaaaaaaaaa

SEQ ID NO: 2228 - DNA, 653 bp, Homo sapiens
gacaaaatgattatgcctttatgtgttgtgtgtatcgtactaaacccagtgctgtgcatagaggaaattttacagtctatagtgttacataagtactggggccttgcataaagtagatatctggtaattatttgttgactactccatgtctagtcaaatggcactttaattttatgttttggaacagttcagtattaaggattagtaataggaaaaagacttaacattttaattctgtgaatttaagtcattgtcttctgaagatggagtactttaaaagctccaaggagttatctggaaaaaaaatgtaagcagctttccatcaaaagacattatggttaaggtttgtactgtaggcctggtgtggtggctcacgcctgtaatcccagcacattgggagactgagtcgggtggatcacgaggtcaggagatcgagaccatcctggacaacatggtgaaaccccgtctctactaaaaataacagaaatttgttgaatgtggtggtgtgtgcctgtggtctcagctactcaggaggctgaggcaggagaattgcttgaatccaggaggtggaggctgcagtgagccaagatggcgctactgcactctagcctgggcgacagagtgagactctgtcccaaaaaaaaaaaaaaaaa

SEQ ID NO: 2229 - DNA, 687 bp, Homo sapiens
  misc_feature (664)..(664): n equals a,t,g, or c
ggcacgagagccgaggcctgaattgtgcaaagagtcaaacaggaatgcaatcattcaaaataaaacagtgtagaagtacatttgaatgaaacattatgggaataacaccgaaaaaatacaaatattttcttgagtctcatgtctttggctcgtgacctgcggcatcagctggccaaagaggtcaatcactggcatgtcaatcacgcaggcctctggccatggtaacagcagtctgtcagccagtcctcactgctcctgtctttgctctcctgctgccagctgtggcccgaagcccgtctgtcggagcagccttggagccagggaaaaggaaccgtagggtgaagagaggctgtggggtgccatttatgtagaaactgggcgcctgacttggctcttttcccaagctgtccacctaaaaaatgctatgtcgaatatcaccaatgatcagaaataacagggcagacttcgactctaaactaaagcttgcagaaagtttgatgtatgtgtgtgactatgctatggatataaagcctgttatcattttgaaaagggggaactttgtaaggtaagtaactttccaaataagtgattaaaatgttgataagcttttgacacatgtggaataattttttgatagatagttggcctgaatttcccttatttntcttgggaaaaacaaagcggatt

SEQ ID NO: 2230 - DNA, 548 bp, Homo sapiens
ggcacgagcggcacgagggcgtggtcctaagcagcacaggatccccctcggggacattcgcgggccatcctcctgctccggttctccctggggacgctccacgcctcaccgcagttgtagggcacagagacaggcctcaccaaagacgaggccagctggctggtcagcatgggaggagggcgcccaggcctgggcccggaggagcagccctcctcccacgctgtgggccctcgctgtggacccgggatcctgtccctggtgagctcatggactccacaagtgacactccatttcccagatggagcctgaggctaagaagcttggttcttgttctcatccagggcttgagcccagtgctgagccgagtctgaccctctgtccgtgggtgcaccggctgagtgcagctgtggccccaggctctgccgcagctccctggagagcaagccgcacccctggttgctgccccggctcccagcaaccctggagatctcttgttgtcacagccacttgggccttggacgacccacaaatgagagctaagcagttgc

SEQ ID NO: 2231 - DNA, 872 bp, Homo sapiens
  misc_feature (694)..(694): n equals a,t,g, or c
ggcacgaggggaaaaggtgagaggagaagcaaagaagtggaacaaagacttccaaattaaagagaccacttaagaaaaattacatcaatgtttatactacttataatgtacctcatttgggaaggaaaggctgttagctgctacttgttaccacctatcaaagcctctgtggcaacagtattgacatttaatccttggaagttctgaagtttttacaaacttggtggtgaggttgagttgatttgttttgcctcaataagaaatgttgatatatggtggctggtaagatggccgaatacgaacagctccggtctgcagctccgagcgggatcaacgcagaaggcgggtgatttctgcattgggtacccggctcatctcactggaactggttggacagtgagtgcagcccatgaagggtgagctgaagcaaggtggggtgttgcctcacccgggaagtgcaggggattggagaactccctctcctagccaagggaagccacgagagactgtgctgtgaggaatggtgctctccagcccagatactacgcttttcccaccatctttgcaacccacagaccaggagattgccttgggtgcctacaccaccagggccctgggattcaagcacaaaactgggtggccatttgggcagacaccaaactagctgcaggagtgtttcttcatactccagtgncacctggaactccaacaacacagaaccattcactcccctggaaagggggcagaagccagggagccaagtggtctagcccagcagatcccacccccacggagcccagcaagccaagatccactggcttgaaattgtcgctgccagcacagcagtctgaggtcaacctgggacactcgag

SEQ ID NO: 2232 - DNA, 1782 bp, Homo sapiens
ggcacgagcggcacgagcacatattgatcataggccatctgtaagcctcttcattatttgatcatcatgaatcgtcgagtctgtgttctcatgctgttggtggcctggattggaggctttcttcactcattggttcaatttctctttatttatcagctccctttctgtggacccaatgtcattgacaacttcctgtgtgatttgtatcccttattgaaacttgcttgcaccaatacctatgtcactgggctttctatgatagctaatggtggagcgatttgtactgtcaccttcttccctctcctgctttcctatggggtcatattaccctctcttaagactcagagtttggaagggaaatgcaaagctttctacacctgtgcatcccacatcactgtgatcactttattctttgtcccctgcatcttcctgtttgcaaggcccaactccacctttcccattgataaatccatgactgtggttttaacttgtataactccaatgctgaaaccactaatctatgccctgaggaatgcagaaatgaaaagtgccatgaggaaactttggagtgaaaaagtaagcttagctggaaaagggctgtatccctcatgagaatatgactttcattctttcacagaagcaaggaataatttcactatcctatcagattacatttctgttatcattcgcctttagttatttagcttacttattctgaagcaattatatacattaatatttatgtaagtacaatatgttaagcccattacagaccaagataattgcataggtttaacagtgtatagtgtttttttaatcatactgtgttaagattctttagtagtaacgatatttagttttatttcaagctgtttttaattttaaaaatcatttatttttcttttgtatttagtttaaattgacaataatttagtatatttatggagtacaatgtgatgttcctcgtgccgaattcggcacgagctcagagccattgggtagcttgcaaaggcttgcaggtgccattaaaaggcagagccaggacgtaaactcagagtggagaggcttatctctctccactccctgatcgtctcatccccgaaccctagactagagggagctttataggctgatgcagaagttcccaaacttgtcggcacactgggagcaccaagggagctcccaagagcactcatgcctgtatccaaccctagagatggtgaattaatgggtacagggtatgaccttagctttggaaattttcagattcccaggtgatcctaatttgagacaagcttgggaaatactggtaaagtcataaagaacaagttctccgaagcccacagacctaagttcaaatcccagattctacacttcctagctgtgtgaccttgggcaaaatgcttgatcactctctgccttggtttctccatagcatctactccacagggatgttgtgaagattaaagaataaattataaagcacttagaagtgtttgccattattggtttcttaaaacagcaataaaccaactaacaaaacagggacccctggcttctgtgcctgggtgtccaggaggaagaacatgctgaaaaataccaccaatatagagagaccaccaatcagaacttgggctgggaggagttaacggaatcttcagccatcagagctggaaaggggccttagacagcatctctttcctcaccaggtgcaggttgtatgggtaataactccaaagaagctaaatgacttgtccaaagccacacagcaataatacactg

SEQ ID NO: 2233 - DNA, 702 bp, Homo sapiens
ggcacagtcacaccgctaaattatgaaagaaataattatcaacactttctaattacctaacaaagtaatttgggattcaccgtggggctggcgggatggggaaccaacatccacttacagccagggtggtgtacgccacaccgcgagggactggctgtattggtagtagtggcgatggggtgggggctcttgtgcacttttttgtacctagcaccccagaagacagaaggagcagcggcagatcttgcctccactagccctgccccctaggcctggtggcgcgcgctttggccactggaggtgaggaagatcctgggtggcaacgagagacgtctacacatagataagggagcctaccacaggcctgggtttgctgcgggtttcggtgtcccccagggactcctaaactctggaagtcgcgctagacctcaggaggccggaaaatgaccacctggcgtcggtggctccagcagatctgagcccctaggccccctgggctccacgctgagccgcgctctcggggcgagtgagcccggggctctccgcgcatggggagtggagaagggagggggaggaggaggaaggctgggagggaaagaggatgtgtgtgttgggggagggaaggtgcagccgtctttcctgggaggagaagcgcgggttcctggctctccacgcgcactgctttaatcagacccgtgcagc

SEQ ID NO: 2234 - DNA, 917 bp, Homo sapiens
  misc_feature (610)..(610): n equals a,t,g, or c
gtctatacagagattatattttgtagaaggataatccatgtctcactgccctctcaaatcaactcctcaagctcttatgcaacacatacacacacacacatttaccaggtgtgactaaagtagataggttgatcatttacatgtaaaaataaacatttagtcacctcccacactaacaggcccatgctgaacctttgtatcactttgctctttttatcagtgaccttgaccaatatccactcaaaccactcctcctactccaactacttgctgtgatgggagcaacacacacacacacacacacacacacacatacacacgcacataccacatacccacccatacacccacagtcccttggcagtaaagtaactaggatgacccagaagacccatccccccactgagaagtgtagaagccatgagtttcaccttttttgaaacatctgctgatttacatttgctaagatagttatgtattagctagccacctaacagtgaaaataatgacatagaaggaaaggggagaataaggcaactttattccttttccatccagtccttccttcttcgcctgttggtagaatgtgtttgtgtcaataagtgaaatnaaaacagttgagtacaagccaggtgcggtgctcacgcctgttaatcccagcactttggaaggccgaggcaggtggatcacttgaggtcaggtgttcgaggccagcctggccaacatggtgaaaccctcatctctactaaaaataccaaaattagctgagtgtggtgcatgcacctgtagtcccagatattaagaggtgaggcaggagaaccgcttgaacccaggaggcagaggttaccgtgagccgagattgtgccactgcatcttgcctgggcaatggagcaagactccatctcaaaaaaaaaaaa

SEQ ID NO: 2235 - DNA, 1260 bp, Homo sapiens
ggcacgagggagggcattctcagcacctctgtgaaatgcccctgaaaatgcatccagaagatgcatcccctactgttttatttggtgaagttattccttgaggccagagataccacctgcattattatgtcctgcccgacgcctggcatccaggaggctctcaaaatcacttgcagttgacataggtgaatatcagcatgtgcgccttgtgttaaatgcgctggacacaagaaccagacagagcagttctatcttaagggatattcaagaggtgcctcttacctgtggggtcagaggacaggtcttaggattgtgaggtcaacccttgtctaaggtttcactgggaaattagggtcgggtggacttctcctgggccctcagtcctcagggtcaatctcatgagcatcagctcttctgcctcctccctcttgaaagtgagagatgagatggtaggggaggcatccatgagcacttggaggagaaacaggtactggggctcctgctcacagcatcataggaattcctctgtatggcccaggtgcttgggatgtcaattctgacctaagagagtgttccaaacctttgtgtctcaaatgtggtccaaggacccatagcatctgcatcacgtgggagctcactagaaattcagaatctcaggtctcatgccaaacccagtgaatcagagtctgtatcttaagatccccaggggatttgagtgcaccctaaagttgagaagcactgctcgaaattgggtcctagtagatatttctcctccatcctaccctccatatgtggtcttgccttatgccctcaagggccctggcacctgttgccctccgacaagcctggggggccgccttgaaggtacatatctcattgagacaggagtgtgcctcacagaggctccctagtagtcctcaaccccttccatgcctctcctgttagggatccgctgtgggctgggcactgtgcaggcccttgcagtgagatgactcagctccaggtcctgcctgcagggcccaaccccggcttggggtctactggaagagacaggccacctacctccctgaccactgggtgatataaaatgtgattagacaagaaccaagaggccagaagttctgggaggcacaatgccttttagctggagcagtcaggagagcgtcacaggaggtagcatctgtgccaggccctgaagcccaggtaagactggttacatgtatgtggggaaggacaaggcaaagcggcaggaaattacat

SEQ ID NO: 2236 - DNA, 859 bp, Homo sapiens
gattgattagtttaactggccaatacttgttgagtggcttacaagactatagtagttaaaagcatgagttttgttttatcacttaaatcctggcaaggacttattaaccattcgactctgggcagggttacttaatatctctgcctcacaacattttccgtatctctaaaatggggttgttcaacaagaaatatactcaagtttaacatggcaacaatgttcaccaaaatcactaccagtatcgtctttggtctgtctctggcattgcctatttcaacacgggcatgatcaatgtgcatgatcaatgacaatgtgatagcaagggtctccatcatatcaagacattgttacaatgtcagtaatacaaagcagtttggaatttattgttaataacataatattcacttccaaaaacaggtaagcaatttagatctaatctagggtgaaaaaacctacttatgggctttatacattgaagatgcatcccttagttgaatattatgacagaaaaatgttatcaatgctgacattaaaaactgttattatgtgccaattattaggaaattttaaataatttaacaggataagattaatagttaaaccgaacactaagaaagagagtattagctacttgacgaagaacattgtatattttttgagactatgaatttttataaaatgtcaaataatacaaagcaaaatactactaaaatgagatattataattctcatctttatggaactgcttagtttcatactcataacatatataaaataataattaagaattacagaggccaagcatggtggctcatgcctttaatcccaagcactctgagaggctgaggagggcagattg

SEQ ID NO: 2237 - DNA, 1516 bp, Homo sapiens
  misc_feature (1025)..(1025): n equals a,t,g, or c
  misc_feature (1144)..(1144): n equals a,t,g, or c
gaattcggcacgagaaagaatgaactgtttatgaaagaaaccttttgaaagacagaatatttttgcctgtgggccaaagctgaggcaggaaaacaaagggctctttcaaaggcttagaatatgatggaggatggattctgactttccaactacaaaaataatgatgcttttagcatcaatacctgcattactccagggagttgtaaatatactttacagacacaggctgggcctttccaactttttacctcagtgctctttgaactccttaaaggggagtaatgttggccccaatttgcacactgagaaactgaggcagaagaaatctaagcaatttgtcccatgccaccagataacttataagtgaagtcaagaatagaacaaactgaaactgaatgcttccatgacacaggagcatctgccatctggaatagttccttctttttctctagttgatctctttcttttctgcttttatctttcattttctgattcattaactcttagctcttgtcaatgaattgaggccagtgtgagtgttgacatgtccatcagaaagtctgtgttggtccaggtgacaaagaatctacagcttgtatcagccagcctgtgcaggttgttgcagttcctttgaacaatattactagcaaaactcatcttgaaaacaatattctttcatcctaacctattttgtwcttgcagaaacactactgtaaagtacagatgctccttgacttacaatacagttatatcctgacgaaccatcataagttgaaaatatcctagttagaaatatattttatgaacctaacctattgaacatcataacttagcctcacctaccttgaatgtgctgagaacatctatattagcctataattgaraaaattaactaacacaaagcctawtttattatatggtgttgaatatttcatgtaatttattgaatactgtatagaaagtgaaaaacaaaatagttgcatgggtactcaaagtatggttgctactgaatgcgtattgctttngcatcgtcatgaagttgagaaagtctacgttggaatctacagcttgtgtaaaccagcttgtgcagcttgttgctgttcctttgaacaatargatattrgcaraacttatcttgaaaacnagataaaccatcacaaattgggtattgtgtgtatgaaattttacatttgtacatttaaaaaatatccggtgtttggctttttaaaaaaataaatggtacctaaatagttcttaatttccccttatgggtagtctcctagctgttaaatgtacatttatttactcattcatttttttatttgacagctatttgttttgaatttacttttggcacagcactgggctttgtaatgaatactgtacaacagatcaaaatcttatagaagattttaataaagattttataaagattttaataaagattaagtctttaagatttaaaaaaattttaatttctttttttttttttttttttttttttagctagtctcga

SEQ ID NO: 2238 - DNA, 508 bp, Homo sapiens
  misc_feature (255)..(255): n equals a,t,g, or c
  misc_feature (473)..(473): n equals a,t,g, or c
  misc_feature (502)..(502): n equals a,t,g, or c
agctggcatgaaatatgttttctccagtttgctacatagtcctctcttctgatgtttatcttttttttttgactaatatttgtattggtaagaggtgctttggaatttgcacacatgargaaataaagagcttttttcctctacatttctaatattcagctgctctcttacctttcttgtccaggtattttgacttttaaattctctaggtggtttctctttctctttctctttctttcttcctttctttctttnctttctttctctttctttcttctttcttttctttctttcctttctttccctctctctctctttctttctttccttccttccttctctctttctttctttcttgaccaagtctcactcttttgcccaggctgaagtgcagtagtgtgatctcagctcactgcaacctccatctcctgggttcaagcgattctcctgcctcaggctctcgaggggggggnccggtacccaattcgcccttaataatgantcggaa

SEQ ID NO: 2239 - DNA, 311 bp, Homo sapiens
ggcacgagggctcccacagccctcctgatgaagtcattgctgctcgccatagccttccagaaacttcttggctccccccaccccattctccaacctcacctctttgcatccctccatccctcgcccctcatagtccagggatcctgaacacctgtgcttccccaaacctctcccgcttccaggcctctgcacacgcagctccctctgcttctccagcccttcagaaatgggccagtgacagagctctgtgcttcccacaccgtcgcctcttccggggttcagaggattcaaggccccacttcccagtctcc

SEQ ID NO: 2240 - DNA, 1338 bp, Homo sapiens
gattcggcacgagctgggttccaggttcccagggctggctgtgagctactcaagggcagggctgtatctcgtttcctgccatgcctttgtgcctagcacagtgccaagcacacggcaggtatctgaacagtgtgggaagagaaaaggtggaggggagatggttgggggtagactgtgagagtggaggtggctcaacgctcccacccccaacctcacacacagcacccttagcccaggcactgatcccaggagtctaagaagctgattagaactgcccatggctgcagctaacctcggaactatgccccaccacctgctgtcrtctccctgcccccactcctacttccctctctcctccctccccaggggtccggggcagcctccccctcccccaccccatggtgagaaatcccaaagactcctgggcctttctctgctgcccggctttcccgcctcccctttttctttctcttccttctgctttgcctcacattcaatctctccctcccccagcctggtgaatccaaactgaaaaaaaaaaaaaaaaaaaaaggcccacacaacagcttcaacagtgaaaaataaccaatttaaggagtaatcgctgctgtaatgattgtctaagccctgagtcactgcagaaaatcggactgaagctctgggactcccaggctccctgagagtgtcatatgggtttttgtttttgtttttttaaatatccaggacctcagtgtctccatctgtaaaatggaaggaatattatcagcccaaaggaactgattgttaatctcctgattttccctggggctgggaatcagaggttaaggtggtccacacagttggcttgggaatcaccacgggacacattcttctaccacaggacccatgggagaaatgtggtgcctggcaggtgctgagagactcacagcttcgagggtctctgggaaaggtttctagagattgtggtgtttaactgagctgggaaggatgaatgggtgaatgagagctatgggaagtgatggagtgatggaaagtcagctctggaagagactagacacctcatcttgccctatgctctcattttacagatgaagaaactgaggcctgaagggcttcaggaactgctcaaagtcattagtggcagagcccaaattagtggcagagcccacattagaaaacaggtgccttgactcctgctccagtgctctttctttctttctttctttttttagacggaatcttgctctgctgcccaggctggagtgcagtggcatgatctcagctcactgcagtctctgcctcmtgggttcaagtgattctcctgcctcagcctctcga

SEQ ID NO: 2241 - DNA, 1736 bp, Homo sapiens
  misc_feature (369)..(369): n equals a,t,g, or c
  misc_feature (605)..(605): n equals a,t,g, or c
gaattcggcacgaggaggccccacaatgtcccccaactgccacttgctggagaccagaccctcagcctccctgcttctgctgggcatccctctgctcaggggagcatcttgaggctatacaggtctcaggtgcagctggcagcaaagagacataggaggaggtggttgaacccaccctgcaatgtccaaggtccaggttaaaccctgagagtgggtgagtgtgtctggtcctgtgactcagtttccctacctgtaaaacagagcttcaacgagatgaacgatagtcctgagcataacagtccacaggggcccacgagccgcttctgcgtcccaagccctcgtttctgcatccwgtctycatctgctcanctctgaatgaacccatggtcccctggaggactakgtgaagaaataccctaaacacctccccaggcatcgagctcatgcctccagcacaaggcctggggctgtaacgcagggagctgggctccagcttgaatgctgctcttyctttctttctttttttttaaaaggggtgaaatccacataacacaaagtgaaccactttaaagtgaacactttcatggcgtgtggtacattcacanattcatggatgctcgtctcctatacctgagctatatcctgcctgtcacaattccataggaagtaaaaccagccactttctgtaaatgggatcttaagcagaactctaacactgtgcacaraaagtgtgactgtgctgggttcgaggaaracagggtctggtctgtgtccccagccgaatctcatgacaaattgtaattcccarcgtgaagggarggamctggtgggaartgatgggatcatggggaargattttcccctcgctgttctcatgatagggagtgcgttctcgtgagatctggtggtttaaaattgtgtagtgcttcccctcctttctctgtctctctcccgctcgaccgtgtgagggccttgcccactcccccttcacctgcgtcatgattgtaagtttcctgaggcctccccagccacgcytcctgcaaagcctgtgaactttgagccaattaaacctcttttctttataaactacgcagtctcaactaaagaaaggcagttctttatagcaatgtgagaarggactaatacggagaagggccacctgtcctttcaaaggccccgcccaggaccctttgaaaccagagcgtccaggtgccctctcggatgttttctcatctcgggagtcctgtggttttaacgttcttttacgatcacacctctagagagtgctgattccctggataccacaggacctccctgaggtgtccaggacagagcaagcttagatattaggcagaggttctaggagctgtgcacccctgcacccctggaccagagagtctgggtgaggaagtgggggcgggatgtggggcctgatctctgggctgctgaccacagaaagggctcacaccgggaagtggacttgggcctgtccagggcagttccggggcagaaatgggagctggagatgtttgtggctgttcccgtgaggatgctccagccccaggaggccgtcggggagaggccggtgctgtgtggaaccacacatgtgtgagccagtcaggagactgctgtgtcagtcaggaaaggccaacacagtgcactgtcctcacactgggaggaccggcttcccaccccactccagggctttgtggtaagcctgacgcaccccactcgta

SEQ ID NO: 2242 - DNA, 522 bp, Homo sapiens
  misc_feature (436)..(436): n equals a,t,g, or c
tgtaattggaaatatcaactcatgttgaatgtgtttgctgtacctgtttatgttttattgattattttctgggagaggagggctaaaaaatacactgcagagaatagacaatttatgctataaatataattgcaaatgccatgaattaaaactgctgctggatagttcaaaacaatggtgttttgagaacctgaccaaaggcagtctttccaagaatcagtcccgtattcatcaagtgcactcatagagaggcagggctccgttcttaattcctccctaaatatctgattcagacagagaaaatgtgtctcatcttccttccccattctcagttcctatcccttgtcaacgcaaacacaatttatgcaaatattctttctttgtttctttcttctttctttctttccttctttttttttttttgatggagtctcantctgtcgcccaggctggagtgcagtggcgcagtctcggctcactgcaacctccacctcctgggttcaacctctcctgcctcagcct

SEQ ID NO: 2243 - DNA, 591 bp, Homo sapiens
ggcacgagaaagaactattattactcccgttttacagatgaagagacagaggcacagagaggtcaagcaagcggcccaaggtcacagggctaagacagaacagagccaaggtctgaggccaggcaaccggactccagcattctaaacctccatgcagtcctgcctctctctcttcagctcatacccaggtaagcaggccaagctcaaaaatagcagccaacgccattttcaaactcatgctttatgaatcttaaaatacttacttgtttcctagtttcttacacctttccatcatctcggtcagcagagcctattatgttaaaaataataataattaaaaaatcaggttggaggagctaaagtaacatttctaagagatttccaaagtcgaactctaaaatgaatgtagccacatgtccattaagataattctcagtgtctggtagggatggggaggcttggggagaaaaaaattcactttcattgcatttagtgtaataaatagaaggagggggctgggtacagtggctcgcacctataattctagcattttggtagaccgaggcaggtggatcacttgaggtcaagagc

SEQ ID NO: 2244 - DNA, 610 bp, Homo sapiens
ggcacgagggaggaaagagggtggaatctggacagtatgaaggatttgtattgtacctgtaatgtttgatgtctgaagctgggtggtgggcatggctgtttgttattctccatccttttggtatgcctgatacatttcataataattttaaaaaggacaagactactgcagagaaatgcatagagtgagctctgtttgggtttttaaaatgattcctacatctatgcttgcagatgtaagcaccagccctggaaaacattgcaagggattcttagtaggcccaagctttgggaaagggccaagggggctggggagttgattaggaggggatacatgctttttcctgctgccttttgaattttgtaccacacgtagtattacttattaattaaaaaataatctgaactagccaggcgtggtggcacatacctagtctcagttacttggaaggctgaggcaggaggatcacttgagcccaggtggttgcggccagcctgggcaacatagtgagaccctgtctctttagaaaaaacaggccaggcatggtggctcacacctgtaatcccagcactttgggaggctgaggtgggtggatcacctgaggtcggga

SEQ ID NO: 2245 - DNA, 695 bp, Homo sapiens
  misc_feature (2)..(2): n equals a,t,g, or c
  misc_feature (25)..(25): n equals a,t,g, or c
tngccgcccgctctagaactagtgnacccccgggctgcaggaattcggcacgagcccacctcagcctccctagtagttgggattacaggtgctcaccaccacactcatctaatttttgtatttttagttggccatgttggccaggcttctcttgaactcctgaccctcaaatgttctgcccaccttggcctctcaaagtgctgggattacaggtgtgagccaccgcaccaggcctaaaattaaatggattccggttgcaggtctttggctcaggctgttttccctgatgtttctgcaggtcagttacttatggactgatgtttctgcaggtcagttacttatgtggttgtgcagatggccaaccacagtggccggttacttttctcagggcacctgccttctagaaatgtatcctctctcctctcccttttcctctttctgtcagagaatagcaggggttgtggaggaaagctgaattctaaattagtcatttcgataattaataaggctagctagaggtttgatgagaaaaaaattgctgcttttttttgtaagtgtaatgtggttagatataaagtatccaaaatttagacagatctcaaaatccaaaattttatttttccctcaaagccatgcttaagtttactcagaataaccacagcatttttctgaggctctgcaaataccttctcgag

SEQ ID NO: 2246 - DNA, 568 bp, Homo sapiens
gcacatagtgattttctcctgtgctttgtctccagggacattggctgctgtcttctgacccaccctgtgtggctttggcgtctcctgtgacctaccagtatgggtcttggcctcatcctgcctctttgtctttctggcccaccacccacagcttgaatctcaggctccaacagttgcctgacccccagattctgatgacagcctacctacttgttcttcaggccctcaccagactcactgcccagacacaccacacaggagaacatgaaagggtgaatgaatctttcatcatttgatgaccaagttggcattcttttacattccagccaccagaggaaggtgtattttaacacaattgccctcacatcctccttaacaggatttacataagtttattaacacatatgtttctacaaaatcaagttttgagaaccatttttatacactgatctgggacattttggggatatgaaattaactttagcacacacagcaagaagaaaaccgaacaacaaattctacaaacaccaaatttgctgtgaaatttacatttcagattctcaagaaa

SEQ ID NO: 2247 - DNA, 468 bp, Homo sapiens
ggcacgagaggccctggggtggcggggagaggaacagggagagcatgagacagacccacagggctgaggccaaccctgcttttatttcacaagagcttctcgatggctgacaggagctcgggtttcaggatggagtccggctcggcccccgcggccttgatgtcctccagcacagccatgtcccacgagaaggtcaggagggcagagggcacctgcggtaggggtaggccgtcactctgagaccgagagtcggcccttgccgcggcagggaactcagcgggcaacctgggcgcggggatgccccggcctggaagccatctcagctggtggaggctgtggctcgcacccaggcctcctgccctgctcctccgggactccaggacctaagcctaaacctactgcactagtaacgcacgtcaccgctcccatttgatggggaaactgaggcgtggagtagttatgaacttg

SEQ ID NO: 2248 - DNA, 1138 bp, Homo sapiens
ggcacgagcgagtattgagttcattaatggttattatcatcgtgtttaatcagtaagtgattttaactttcttcattatcccctcctcttgtgtaactgtggataagtagttcccatggattgcttcctctgtcttcttagcgagaaatatcggtggctatgagatcatagctcaacagcttcaattctgtgctcttcctctgagcaatttttcttcttttcagactttttccttttcttttcccttccctttttttcatgttcttcctctgcaataagaaagaatttagaaaaaggaatgtaaatacaccatttggaaaaagtagaaattaacttcggttataagaagacttgggtgctcactaatgtaacttttcctgttggctaggaaagggattacacctagcgaaaggagacagagcaaggatgagaggacatttgcccactgagaagagactagtgaacactcgtttcttcctaggtaatgttttggttcagtatcgcaaaggctaatgacatcttttgtaaggtgtgaactgcctctgaactaagaggcattaagatgatgagcagaaagagcactaagattgatgttaaaattaatggcacgtgagaaacatgtcacatataaagacagagaaagctgtagagggctgggtgctcaagacaacttgtgatagattttgggaggccactgtccacagactgggatccataagccttaggggcattgtcacttggtctggtaacccatctcagtctgttctggggtccctggacctactgtgtgagatatcaacataccatttcttaggcactagttaatatttcctgaaataaatatgttaaacagtccaggtgcaatggatcatgcctgtaattccagcactttgggaggctgaggtgggcagattacttgaacccaggagttcaaaaccagcccggccaacagggcgaaatcccatctctactaaaaattaaaaaattagtcaggcatggtggcgcgtctgtaataccagctactcagggggctgaggcaggataattgcttgaaactgggaggtggagattgcagagagctgagatagcaccactgtactccagcctcgacaaagagagactttgtcaaaaaaaaaaa

SEQ ID NO: 2249 - DNA, 898 bp, Homo sapiens
ggcacgagttgccctttagacttcctggcctgatggactgttccaagatgcagtcattctcctatggtctttctggagatgtcttctctagactgagcagccaatgtgttgctatgaagctctggctagctgggtaatgcacttccttgtatttgctcttcctcgttccttgtctcatgtctccttttccctgggattctaccctacactgaagtaatagcacacaaatttttgtctcaagttctgttgtctagggaagccaggctaagacatggttcaatgggtgtccttagaaagcagacctccaaaagagaactttgggtctccaccgatggtggcaaactgggtggcccggattcctggcatgcagtgatagtacaattgccaatatgttatgtggtataggcagaaggcaaggtattggcatatcaagtggctgtgtacttgatcagtacagagggaacgataatcataaggattgtgttacatggtggctgcctttgatggcttggaagatttgcaaaaaggcataacagactcaggaaagctaattgcccacttaaaatatgctgtgaaagtcagagggcctctatggtagccttccaaatcctcttatctactgcagctgcagggcaaatgatggaggaagaaaatcatgttcagggtttcatggtatagggttgcaaacctacaaaggagaaaaaattcacagccttaaaatgtctcctgtgtcaatgtgaaggctttgatagggaaagagtaggaacctgaaacctgcaaggtggacatttgagtggacaaatctaataatctgaatgtccaaatttccctgcctctctggagattatgcagtctcctcagttggagactatgcagtatatcactcgatgtactataa

SEQ ID NO: 2250 - DNA, 764 bp, Homo sapiens
ggcacgaggtcctaaggtgagaaggagggccactagcataaaaacaacttgaacagaacttgcttcacaagccaataaattctaataacaaaaggcaaaggaaaaagttccctatagaagctaaggattttccaaagcctaatgctcattttttatatccttctttgtatggtcaaaggttgattcttcctttaccagacacaaaaaagggcttaattaaaaatttgaaatcaaattttagagatataaactataaataaatacatttgcctttcaaatttttagaacattatcctagttaattcaaatttttttatttgagatgaaaggcgatttaagctaattttcattggatcatttattattattattattttgcagtgtattagttaactactgttatataacaaattaccccaaaacttaatggctcacagcatcaaaaatatattagctcatagtttttgtgggttaggaatctgggtgctgtatgtctagtgctcagggtccttcacaagattgccatcaagttgtcgactggggatgtagtcatctgaaggctcacgtgagtgagtatcaaattccaagctcactcactttgttcaagtttttgacatctgctggctggagaccacttgtttgccttgtgggcctctccacagagtagtttacaacatggcaacagcctctctagttagtatgagcaagccccagaagcatatttgccatattctaattattagatacaaatcaataggctcgag

SEQ ID NO: 2251 - DNA, 417 bp, Homo sapiens
  misc_feature (386)..(386): n equals a,t,g, or c
ggcacgagggaaacttacccaggtttctataaactagactgcaatctgcaccagtatctaccagcgctaggacctgctgtacattagtggggaaccagtggattgccaactccgcatgtggcctccctccactcccacctccttcaccccctgctgccccaagttgggcacctcggccatttccctaatcaaacaagaaaggctccatatctccacccaactgcaaatagtccttgagctccagcgcctgggcaggattagattgaacaacactgttttgccccctcttggtcattttccagaatttttgctctggggacaattgactccacagagccaagggcattccattgggttgcctgtyaatttctctcgagggggggccngtaaccaattggcctatagtgaatcgtatta

SEQ ID NO: 2252 - DNA, 817 bp, Homo sapiens
  misc_feature (4)..(4): n equals a,t,g, or c
  misc_feature (7)..(7): n equals a,t,g, or c
  misc_feature (600)..(600): n equals a,t,g, or c
  misc_feature (683)..(683): n equals a,t,g, or c
  misc_feature (685)..(685): n equals a,t,g, or c
  misc_feature (728)..(728): n equals a,t,g, or c
  misc_feature (811)..(811): n equals a,t,g, or c
  misc_feature (814)..(814): n equals a,t,g, or c
atantgnatcactcattggaacattagctggagctccaccgcggtggcggccgctctagaactagtggatcccccgggctgcaggaattcggcacgagctcgtgccgaattcggcacgagaaattcatgggagtgggattattaaatagaataatatgaacaattgtatggcttatgtttgccttattgtattcccaaagagctgtaacattttatagcatcaccacttgggcaggggtattacctgttgttgctaatttagtaagtagaagagagagatcaaagtttctctaatttgtgtttgtgtaatttatctgtatactttcttcatttatataaataaatgtcttcactttgggaggctgaggcgggcagatcacctgaggtcaggagttcgagacaagcctggccaacatggtaaaaccccgtccctactaaaaatacaaaaattagttggatgtggtggctcacatctgtagtcccagctactagggaggctgaggcactagaatcacttgaacccgggaggcggaggttgcggtgagctgagttcacagcctgggcgacaagagttaaactccatctcaaaaaaaaaaaaanaaaaaaactcgagggggggcccggtacccaattcgccctatagtgagtcgtattacaattcactggccgcgttttacaacgtngngactgggaaaaccctggcgtacccaacttaatcgccttgcagnacatcccctttcgccagctggcgtaatagcgaaaaggcccggaccgatcggcctttccaacagtgccaacctgaatggcgaanggnaaa

SEQ ID NO: 2253 - DNA, 1653 bp, Homo sapiens
  misc_feature (1111)..(1111): n equals a,t,g, or c
  misc_feature (1613)..(1613): n equals a,t,g, or c
  misc_feature (1625)..(1625): n equals a,t,g, or c
  misc_feature (1631)..(1631): n equals a,t,g, or c
  misc_feature (1637)..(1637): n equals a,t,g, or c
  misc_feature (1651)..(1651): n equals a,t,g, or c
gcaaccttgcagagtcagaatcctgatcagcagttttgaccagcacatcaagagtggctttacctcccaggcattgatccagcattagtcaagctacaagacactgatgtagaaaaccataatgtcagtttactaatgtagaataagaaataaaatctcagaagacctgagctctcctgtcagcatgacttgcacttgtacttttcctttttgtagagaagctaaattataatcagaaagttgttttggtgagcttggaatcagaaaataggagtttaagtcatctgttcaacatgcagctttcctcagctgtgatagctttttcctgctgtccagtcttcatgtggagcctggtcaatagcaccagaattctaagtctgctggccaaggtgctgcctyctgcagagagagaaagcccatcaaagttgacttcagtgactcccccttcactcacccctcatcttycacgggcaaccaactycctttttgattgacacatcatttctttacatacattaatgccttccatattaccacagagagtttggtagactggaaatcattttatttctttgatctacttcatctttctctgcattgagcctttgcgtactaatttatagctattttctcacaggatagtctatttccattatatctatattttctagtggtcctttgcgtttgcctcttttccagactgtatagggcatggtgccaggcacagtttatttgttttattctatatgctgatagtatcatcttttccatctttagatgttttatctcattcagagtgagaggggcacttggtcagtcctttttgcatctcaatagttgatcctcttttgattaaaaaatatttaatttctaataatgtgtgttagagtgaaaataacaggaattattaggcccagtcaagactaacagttcttgactcatagttccaaatcacagttccaagatttccttaacctttctgatcctcacttccctcccaaaaaagtaagaatggctataattacctacctcatggaaattataaggcttcagcaagattaaatgtactcatttatttaacatgcatagtaagaactataaatgttaattnattcttacttacattargatactgacttatgaaacagagattaaacacattctgcaaaaggactggtattgacaggctttgattctaatagctcaaaagataggccatggcttgctagagaaaatgaaaggatactcaaggctcattagattaaaaggctgctaatgttctctaagctgtaagtagatttttgcccacatttatgaaggttgatttctaatcagattagaaatggcataggctggtggcgtcatctcagagctgccacagcattctcaggagactcagccatatcatgttgggttgctctaagaacacacagagacctttatgctttttcacaaaagcatactctttccctggagtgtgtaactctatgtgttgacctttagtgggataagttcttacaatggagctattctgggtacaaaacatcactactctgtgagattttggaagataacactgtttgctgattttacaagcccgctcgggggggggnccggaacccggngcggtncccgtncctttccccccccncg

SEQ ID NO: 2254 - DNA, 713 bp, Homo sapiens
tgcaggaattcggcacgaggagactcttaacccccgcaaaattatccaggttaaaaacatacgtgagcttcagaaagggtgaacatagccatggctgagaatcgttgtggattatcatgataggaaattgacatgcttatgggtgttctgtcctttggggttgatgtcagggagccaagtggttgcactatttctgctgtgtgtccgaatttctaaagtaatatccgtgtattgtttggagagcggacttttttgctttactcctacttttacagaaaagaattttttttctcaagcaacaaaacatttggtctctggtgtcaaagaggactttattatattagaattataaagctttagttaggaataagtgttggacattattaaatcaatttactgcaggctgggcatggtggctcacgcctgtaatcccagccctttgggaggccaagactagtagtctccaattccattccatcacttgaggccatgagttcaagaccagtctggccattgtggtgaaactccgtctctactaaagacataaaaattagcatggtggcctgcacctataatcccagctactccggaggctgaggcaggagaatcacttgaatccatgaggcagaggctgcaatgagccaagatcctgccactgcactctagcctaggcgacagcgccagactttgtctcaaaaaaaaaaaaaaaaaac

SEQ ID NO: 2255 - DNA, 318 bp, Homo sapiens
ggcacgaggtgccccacccttcactctctccccgcataactctcttccgcatgtatatgtgtatccatgtctgtctgtctgcttcttaccatctctcctgaatctgcctatgactttctttctacccattcctacaaatgcttgcagtcttctgttttctaagtcccaacagcttattgtttttcattttctggagcagggtctacaggtttccaccaaacagaagatctcgccctgggatctttttgaggggttgaagccgtcagcaccactctcttggggctggtttggaacagtccgagtggaccggcgagtggc

SEQ ID NO: 2256 - DNA, 1860 bp, Homo sapiens
gtaaatactgaaatgtcaaagtgaaatctcctaactacatctcactatagccacagatttccaacattacttcatttttgttatactttggatgactttttacccagactcctttgtcccattttttaaaaggacagacacggtacattgagcttaattttaatgttctctctaaaatgctaataattatggctcaattattacagtggttttcttgttggagttttctccctttagctgctctaaattgtgagtggtatagagtcacagagcttacttgattattcacccagtccactgctgatgctacgtgtttcttcaggacctgtcctttagaatacttcccagaggcaagcacatggttgcctatattaaagccacctgtatatcacttgctaagtcctctttgtcaacacttgccctcattgtgactacagaatcactttttctagtttttaaaattgttatcgtaagactgtgcttggaaatattcccagggattagtatgatgattttgttggggtgtttggagatacatttgccaatgctgtacatgtaaaatttccatgacaacttataaaataaatactttgatctctttatcagccatcaatgttaacatataaaatcagctgaattaaagttaagactatgtaaacagatgactagaaccycttcttaagtaaaaatatgtggtggtycccttaattacktgycattggaaatttgtaatycctttcaattttctgaacatatgcacaattttactattctaaaaaaataactattcataactactcacttattttctcctttcacgcacttctaatttttggaagaagtgatgggcatttgttccctataactcttgccatctatatccacctggatccgtagcaatttgggtcttatctgaactactacgatgaactgcactcaaaattacatttgatgtgatacacacagtaactcaattctttctttgctttcatcttttgcaatcatctacctccctatgcagtctggacaaatactgtcaaattcctaacagcatcatcattagcactgttgaaatccttccatcatttagtagatgctaagcctgtgttgtccttcattgscctgagatgctatgcagtttatctgcttgcacacttcagatgcaaaacatagatgggaaaagtaaggaagcatactgatttgcattcctacatatttgtatgctttactgtttctcctgatgcttctgcttccaattgccatcttcaccttcgtcatctctagcttcctactttactctcctcagtcactgttcattcttagcctctgatttctatcacttcttttgctgtccaatttgtgcttmatmwatttctttcctcaaatacctctccagcatcattatgtcrcaaaattatttgccctgagaatctcttgctcttcccctgctttgtgctgcagggagactgattcttatctcactgtgtcagctgcattccagccagagtccacctatgagtggctctggtaagagattggaaggccgaagattctggtagttttcttgtcagtggctgtctcttctcctacctactgctcctacaagaaaggcctgcaaaggtttacactcctgctatgtgacatctgagcttctggtaaatctcattctccccttgtccctctgtctgggagtggaatgtttcctgacatcgctagtctgtgtgtggcttcactgttgatttgactgctttcacttttctgtcatcagtataaccaaaaccctgcagaaaactgcctctgttgtaaatacttaaggtggtttttgttcctggttggatcctaaagaacacaaaatcattc

SEQ ID NO: 2257 - DNA, 1120 bp, Homo sapiens
gggctgcaggaattcggcacgaggcagcagagagagcctgggttggagccatgaggctgcccctgcgtcactctgcctccttggaagcttctgtgtctcgggttcttcatacgcccagtggcagggatggaccaggcaccccttgcaatccttctggacaaatgtgccactgtcctatgaaaataaaaggacaccactcaagctccaggaggcagaaccttaactcaaatctgagccaataaacaatgtcactctagcaccaaagtctatttcaaaatgcaaactatttgaaatatcttatttttggtaaatgctttattttggaaatgggtttttgttgttgtttccctgaagagagttcagatcagcaaagcaagtagctttggagaagacacctttagacgaggactcctgtgaatcagcaggacagcgtagagggacattaggtgagccacagggtggagcaggatgggagggcagaggcttctgcttcagaattgaagccgaaggaaagtaatgctgtgggtgttactggagacaaaaggaaccaaacaagaaaaatctggagaggcaaatgttgatgtcttaatagatttgggagtcacactctttaaaaatgggtcccaaagcaaagctctcaaaacttcattaaaagaaaagtcttacatttgacaagtgacctggacagaggagctaccaggacattggcccccttgctgtgcacctgcactgtgcatcacagctcacgtcgtgtttgttacactttgtcacctcacattttattataaaggtcattcccgtgttaaaaagagagcgcggtatgacagcgcctagtgaattgtagtgtctttagggaggaacaaaaatggacataaatgaatacaaagaaaagattacctgaaactgggagcaaatcaaagtaaaaatgtagggatagggtgttgctttcttttaaaaagataatgctgtcaggattaaagtgagaagaatttaattttcatttcagcctgaacactagttttactttcagaaaggttcttggtgccaagctgtgacacttttgcctttgtgggtatacacacttggtacccttgcttagcactgtggaagaggaagtctc

SEQ ID NO: 2258 - DNA, 1068 bp, Homo sapiens
  misc_feature (1060)..(1060): n equals a,t,g, or c
gctttgaccggacagacagatacttagatagctggcaaaacattatttctaggtatgtttgtgaatatttttccagaaaagtttaatatttaaatcagtaaactcagtagacaaaacctaccctggacaacgcgagtgagcctcgtccaatcccttgaggccccagaagaataaaaaaagaggaagggtgcatttactctctcttcagttggaacatctatgctctcctgcctcagacattggacatggaatctcctggttctcaggcctttggcctccatggttacaccagcaccccacctggttcgcaggccatcagtctcagactaaattacagcactgggtttcctatttctccactgctgacggcatgccttggggctttgggcttctataattatatgagccagttcccataaacaatcacttctcatatatctatatatacctattggttctgtttttctgaagaccctaatacagccccatagcactatatttttattttttctaaaacatttaaacagcctatttttttagagtcatttatgtaggtatccaattctctcatgaacgcctcaaggccagaaattcaatccattttawttttgccattgccgcagaggaggcacactgtagctagtcaataagtggttgtggaaggaattgagactgatagatctataaacccactttctgtggtacatgcagtctatattcaatattccgtgcagcttactccacaagtgagaggagggtctaagcttttgagcatagggatggttttagaaaataattacatttaaaaagcaaaatggagacctgttgagaataaataaagtcttgtttcttatagttgtgaatcttttatatcaagacttcacctgaaaaactgctagattgtgcttcaaagcactgtaagttctagccctggttctataatgttatctaagatatttatcatcattgagttctctggactcaatgttcttatccgaaaattgaaggagtcagatataatcatttttaaaatgttttccaaaccaacatcctaaagtcnactctcga

SEQ ID NO: 2259 - DNA, 1272 bp, Homo sapiens
  misc_feature (1209)..(1209): n equals a,t,g, or c
ggaactttaaaaactcctcagagaatgagagaaaactttaccgcgaaggtgtggctggccattcctttcctcgcgttggggtttctctgtgtcagcgagcctcggtacactgatttccgatcaaaagaatcatcatctttacctttggggaaaacaggaagagggatggtgctttatcaatcacatacttagcccaaacaagtgccttggcctcctcagaaatttaaaaggtagaaaaaaatggacatatccccttttaagaagcttccacatcacatatttttyaaaaagtatttacatttcagctgtcatgcaaatcaacagttttgccaacttctttctcctttgctctggcactggcattaacattcttcctcactgtggccctggaaatcctcacactaatgaagcagcagaaaggcccatcacactgcactggtgtgtggtcttcgcatttccttgactttcttttcttttttgttctttcttttttttttttttgagacaaagtcttgctctgtcacccaggctggagtgctgtggcgcaatcttggcttaactgcaacctctgcctcgggttcaagtgattcttctgcctcagcctcccaagtagctgggactacaggttcacaccaccatgcctggctaawttwtgtattttttagtagagatggggtttcaccatgttggccaggctggtctcgaactcctgacttcaagtgatccgcccgccttggcctcctgaaatgctggaattataggtgtgagccaccatgcctggcttccttgcctttcctttgtgagacacggcaacagcccaaggggtctcagatgctgaccctcagcagagggcacctcctggggccatggctgtgtagctgggggcatctggcctcacatcctagttgagtgttggtgtccaggtggctggtgcaggcacccgcccttcttcacttttgcatgtcttctgtggcctgcctgactggagccagttgtcagggctcctgagagctgactgtgggcacctcttcctgaccccacgctcggtgacatcagctgggagcttgcgatcagccagggtgggagcatttacgccacagaacctggcacatgctacaggccaggactttgtccttttccttttctgggagttggctcagcagcgtgctcctgttgtgctgttcccctctctgcagggtcatgtggccntgcctgccggccctccgtccccgctccaggactaacctctgtggagggaatcacctaactcga

SEQ ID NO: 2260 - DNA, 536 bp, Homo sapiens
tgcaggaattcggcacgaggtaactctgagccagtggcccccaaggtggcagaacaggtgtcagccacatctagaaggaggcctagggacctgcagggtgccacccttggtgaggcggctgtgggccacccttggtgaggcggctgtgggctgtgggtgaggcagccccttggtgaggggctgggaggagtgggcttctctcggcctggctgggagtccaggtgccagggtcactaagacaggcctggcatgcgggtgtggaggctggcatggtttgcttgggcatgggtggggcatgggacaagctgcacaggtgtgcagagcactctccacatagtcactccctcttaggaaaagactccttcctccacttgagagggcatcaggccagcagggaccagacgttcgcctaatccagaggctgtcccccaccagataagggcgtagccaggcatgctgtttaccatccgtcctcaccaaggactctgtggccataaaaagagcagggcttcaccagctcgagggggggcccggta

SEQ ID NO: 2261 - DNA, 393 bp, Homo sapiens
aattcggcacgagctcacctgtccactagcagctggacgggaaaatggcaaggggtcatttcctgtactgtaccgtgaggcagtgattagctacgtgtggctcgtccaactagagatgtgctgtgagtgtaagatgcacactggatttctaaaactttgtgcaaagaaaagggaaatatctaattagtaatttcatatggattctgtgttgaaatgacaatattttaggtttttgagctaagtaaaaatacattatgaaaattagtttcaccttttttattctacttcttaaaaatgtgcttgctgctagaaaatttaaaatgatagatgtggcccatattatgtttctgtgtgatagactgctctggatcaagagtcggcaaactatggccc

SEQ ID NO: 2262 - DNA, 688 bp, Homo sapiens
ggcacgagcagggagaatgagactgagagacaggagggcaggagaaggtcagagacaacttttgcttctgaggctgctgctgaggacttcattttggggcgttgttttctgagccccaacagaaggaaggaagcctctccctccaggggtcagtcctgggcctcaagggcaccctcgaagcaggcagctcagctcacagagctcccctcggccatgtcctccacctgcccttcctttgtccagcacctcacctgcacacacctgtctggagagtccccaaggttggagagctgctgagtcagctgggccgagcacacagcgcaacacttccttgtgcctcctaaccaggatgggcgacaccagcccattttatggatgggacaagaagaagctgggctgacaagcccaacatagtggagccagcaacaggcttttactctcctctctgtctctttgtctctctcctccaccgcacctccatccgctccattctcctctctgcacatcagcttcccagacaatattcttggtttctgtggctcccaaactgaagcttccccacagtggctgcaactatccagacctggggccacacttgggcctccaggcaggggatctagtgatcactttctggtcatgtcatcaggccaacttggctgagctctgccctccttatctctcctctccc

SEQ ID NO: 2263 - DNA, 1430 bp, Homo sapiens
gcagcctccagagtaaagtgaaggcgcaaagcctcatgcaaacatcgaggaatgccttcattgtttcgaggtctctcttcctggcctcccaagcccactccctgccccaagtgccacccttccctggcacctgatccctgaggacgttgggtcctggggtgggggcctctgggctcttcctctgggtcccaggagccccctccccactctgtggccccagctccagacttggcaaggcaagccggagtgaggtttctccactccctcccaagtgctgtgctggcggctcccgaaataaaaatcaaatgtgggcttggcaaagggagcggggtgggagaagcagcggcagcagggctggggcttcattctttccattgtaacttcacctcctaacctctggcattttaattatgtctcctacccccctcactctgcctgggccagggggtgagctcaccctttcctctagcctgggagggggcagctgctgcctggacccccagtccccggcctgctcgggggaatctgggtggcggccatgctgggggtgtcggcctcaggctccctccagcttctccagtctcagaggggcctggagaggggcccagcccccagacagccagccgacacctcaagttccatgtgtgaatcattagtcttcacacccactgctccatttagtggtggccactgtcctaaggcaaggcacggcaggctcaccagcccattctatggatgacttagccatcatcgtctgcagggccaagcctgggcccaggcctatcgctcttggttctgcactctttccaaacccaggaagacgggcaagaacagctcaggcctgataatttgccttatctcttcgagtgtccgtttttttccaatggtaagtgatggaaagcattattttgatactaaaacatacaaggacatagcatggggtaggaagtaaaatgcctgtgaaagttcaaggtagaaaacaaatcctcaaggaagatctcgtggggctctctgcaggcgggccccagggagtagcatcctcctccttggcatggctgtggactggagtgagatgcagtcatatgtgtttgtagccagtttgtgcagacccaaggctgctgtggaagatgccagtgggtgctgggtgctgggtgctggcaggcagccttggcccaccccaggatgcagaggccttcttccctccaaggcccacagtgggagtcctgccgactctctccgtctcctggggagggaaacctccacaggacaagcagcctgtgtgggggtgggggctgcctccacggacagtgcaggcacagggcaaccttgactgtgagcccagggccagcacccaaccaccccaactgaggcttcctctccatcctctgggaggtcccccgccacactgccttagaggcccagcccctcga

SEQ ID NO: 2264 - DNA, 1803 bp, Homo sapiens
  misc_feature (18)..(18): n equals a,t,g, or c
  misc_feature (24)..(24): n equals a,t,g, or c
  misc_feature (46)..(46): n equals a,t,g, or c
  misc_feature (106)..(106): n equals a,t,g, or c
  misc_feature (1788)..(1788): n equals a,t,g, or c
caccctgggcgcccaatncgcaanccgcttttccccggcgcgttgnccgattcattaatgcagttggcacgacaggtttcccgactgaaagcggcagtgagcgcancgcaattaatgtgagttagctcactcattaggcaccccaggctttacactttatgcttccgggctcgtatgttgtgtgaattgtgagcggataccaatttcacacaggaaccagctatgaccatgattacgccaagctctaatacgactcactatagggaaagctggtacgcctgcaggtaccggtccggaattcccgggtcgacccacgcgtccgcttccatacatggaaagtgtctttgaagaagtatttaaactgctggagtgccctcacctgaatgtgcggaaggcagcccatgaggctctgggtcagttttgctgtgcactgcacaaggcctgtcaaagctgcccctcggaacccaacactgctgctttgcaggctgccctggcccgagtcgtgccatcctacatgcaggcagtgaacagggagcgggaacgccaggtggtgatggccgtgctggaggccctgacaggggtgctccgcagctgtgggaccctcacactgaagccccctgggcgcctcgctgagctctgtggcgtgctcaaggctgtgctgcagaggaagacagcctgtcaggatactgacgaggaggaggaagaggaagatgatgatcaggctgaatacgacgccatgttgctggagcacgctggagaggccatccctgccctggcagccgcggctgggggagactcctttgccccattctttgccggtttcctgccattattggtgtgcaagacaaaacagggctgcacagtggcagagaagtcctttgcagtggggaccttggcagagactattcagggcctgggtgctgcctcagcccagtttgtgtctcggctgctccctgtgctgttgagcaccgcccaagaggcagaccccgaggtgcgaagcaatgccatcttcgggatgggcgtgctggcagagcatgggggccaccctgcccaggaacacttccccaagctgctggggctcctttttcccctcctggcgcgggagcgacatgatcgtgtccgtgacaacatctgtggggcacttgcccgcctgttgatggccagtcccaccaggaaaccagagccccaggtgctggctgccctactgcatgccctgccactgaaggaggacttggaggagtgggtcaccattgggcgcctcttcagcttcctgtaccagagcagccctgaccaggttatagatgtggctcccgagcttctgcgtatctgcagcctcattctggctgacaacaagatcccaccagacaccaaggccgcactgttgctgctcctgacgttcctggccaaacagcacaccgacagctttcaagcagctctgggctcactgcctgttgacaaggctcaggagctccaggctgtactgggcctctcctagactgcaggctgcagccagtccagagagaatagagcctgcccaggccttaagaccacctctcagcccagttcagttctgccttaccaaagattctgagactcatacccatttggagccagccccacttgctgccttacagggctgtccctgaggctggatctgttacaaatgagtcatgacatcatactgtaataaaagcagcttgttttctgcttgaacaataaaaaaaaaaaaaaagcggccggtctagaggatccaagcttacgtacgcgtgcatgcacgcatagctcttntataggggacctaaa

SEQ ID NO: 2265 - DNA, 1149 bp, Homo sapiens
tcgacccacgcgtccgcccacgcgtccggatggctgaagagtaaatcctttctacctctggctgaaggagtggtgcagtcaatgacttggccctttttctacagcacatttagagtttgggctctggctccctcagtaagtgctttattaactcagtgtgtcaaaatgaaaacagagccctccttccccagtagctcagtgccacagaccttcagccccacacagctgtagctatccttaccctgagtccatctaccttaaatctgtacctctgacacccagccagtctgtcataatcattatcccagttataaccttgaccaaaggggaagagagacacttgggggatatctaggggataggagtgctagaaactatttatttatttttgagacagagtctcactctgtcacccaggctggagtgcagtggcatgatcttggctcactgcaaactctgccttttgggttcaagcgactctcgtgcctcagcctcctgagtagctaggattacaggtgtgtgccaccatgcccgtctcatttttatatttttagtagagatggggttttgccatattggccaggctggtctcgaactcctggcctcatgtgatcagcccaccttggcctcccaaagtgctgggatttcaggcgtgagccaccacacccggccaaaactgtttattcttgagaagttccatcttcatttctgccacagttggaacttcccgaggaaggaaggaggcctgaggttttgcacaatctgtttcagagcctgtttagactcaaacctatgcttcccttggcagcagaatacacttaacctaaagcagtatttggagttgagaaaaacctggtggggtaagtgaatatgtactgtttggtagggtaggtagagaagctgtgctttgaccctgtgattccatctttttctaccttctatgatggtgatgaagctagatacccctagggaagaaagaaggactgggtttagcaaatgatttggtaattaaagtttatttgaacacaaaaaaaaaaaaaaaaaaaaaaaaaaaaaaaaaaaaaaaaaaaaaaaaaaaaaaaaaaaaaaaaaaaaaaaaaaaaaaaaaaaaaaaaaaaaaaaaaaaaaagggcggccgctctagaggat

SEQ ID NO: 2266 - DNA, 2753 bp, Homo sapiens
ccacgcgtccggtacacactcttgtttggagagagtgtgttgaatgatgcagtggccatagtccttacatattctatatccatttacagtcccaaggagaatccaaatgcatttgatgccgcagcattcttccagtctgtggggaatttcctgggaatcttcgctggctcatttgcaatggggtctgcgtatgccatcatcacagcactgttgaccaaatttaccaagctgtgtgagttcccgatgctggaaaccggcctgtttttcctgctttcttggagtgccttcctgtctgccgaggctgccggcctaacagggatagttgctgttctcttctgtggagtcacacaagcacattatacctacaacaatctgtcttcggattccaaaataagaactaaacagttgtttgaatttatgaactttttggcggagaacgtcatcttctgttacatgggcctggcactgttcacgttccagaatcatatctttaatgctctttttatacttggagcctttctagcaatttttgttgccagagcctgcaacatatatcccctctccttcctcctgaatctaggccgaaaacagaagatcccctggaactttcagcacatgatgatgttttcaggtttgcgaggagcgatcgcatttgccttagctattcggaacacagaatctcagcccaaacaaatgatgtttaccactacgctgctcctcgtgttcttcactgtctgggtatttggaggaggaacaacccccatgttgacttggcttcagatcagagttggcgtggacctggatgaaaatctgaaggaggacccctcctcacaacaccaggaagcaaataacttggataaaaacatgacgaaagcagagagtgctcggctcttcagaatgtggtatagctttgaccacaagtatctgaaaccaattttaacccactctggtcctccgctgactacaacattacctgaatggtgtggtccgatttccaggctgcttaccagtcctcaagcctatggggaacagctaaaagaggatgatgtggaatgcattgtaaaccaggatgaactagccataaattaccaggagcaagcctcctcaccctgcagtcctcctgcaaggctaggtctggaccagaaagcttcaccccagacgccaggcaaggaaaacatttatgagggagacctcggcctgggaggctatgaactcaagcttgagcaaactttgggtcaatcccagttgaattaattggcatgaagagtacagatgtaatcacaagtaatgcaagactcactgaggaatacaagccaagctgatgaggcagtacaggggagaggctggaaaacatattaagagcataaattggagagaatcaaagccttgtcacatggatcctctggtgcctgaagaaatgagattttattatccctctctattatgcaaatgaatttagttttttgacagcagccattctgattactggattggctggggtggggatgggggtatcaggagtctagctgctggaggatgggacagctgtgctgggtcttcagggcatttctgctgcgaatgcggctctccaggcccttcacttctattctggattttattccctccattaaggagagtttaaaaataaaagaaagcttctgagagtaaacattttgctcctaagctgaagggaatgcacagctatttagtaagtgataagtttcttattttgaggacttgactcccatttgctctcagtgaccccagggcagagcccagagaagtgttccgtacccactgctgatggtttcccagagcccacactgagttgaagaacctattgttcttcttggcatccttcttatgctacttctcccatcgctcaaaggggttgcctatggctgggtgtgccctgccctaaatgcagcaccactttcaagcttagtaggaccattccaagaaaaccaggtttcttctccccataccacgttgtgcctgaagaacaagccttcccgtccttgcctgcatgtgagtcacttcttggctgtgcagcaggtccccccctccccgcgatatgctggagggtaggattctgcagcctgtgttgctctctacctggcagcagactgtgcaggagccccaacctgtcctcaattccagcattcacagctgatgagcagtgcaggagcagggcgagaggaacagagccaatgatgtgtgggttacactgaggagccaaggacagggcctcaggtctcccccttacaaggcgtggctcatggcctgcattccagagaccaacatgatagcttttaattcagctgcatgacctgtgccttttaagccataaagatacctcaagcctagcacctcttgaaatccagatgttcatattagactaaaaaaaataggctccaggcctaggtgcccaggctatgatgagtctgcttttgaaggaggtagggaatgacatcttccttggacccaaagcttaaaagtaatgtatgctttgctgaccactgtttgttaggccttaaacaacattcactgtggtggtatcaggcacactgctatgtgcatcaattatttttttgctttccaaacagaatctctggggcacaagttttacactcaagctaagtataactttgtcatttcaggtaaatatgacaagtggtggagcatgaagttttctaatttgacttaatcctaataaatttttgttacaaagtaaaaaaaaaaaaaaaaaaaaa

SEQ ID NO: 2267 - DNA, 1247 bp, Homo sapiens
ccacgcgtccgcctgtgctgagtcagagctggaacgggagacgcaggagccccgcagccgcgggaggtgcagatttggggctgccaggtggcgccaggtccccttggccagcccccagcgcccctttcttctgtccccagggcctcggcttcacaggatggggctgccagtgtcctgggcccctcctgccctctgggttctagggtgctgcgccctgctcctctcgctgtgggcgctgtgcacagcctgccgcaggccgaggacgctgtagcccccaggaagagggcgcggaggcagcgggcgaggctgcagggcagtgcgacggcggcggaagcgcaagtcggacaccagactgcacgagctgcaccggggcccgcgcagcagcagggccctgcggcctgccagcatggatctcctgcgcccacactggctggaggtgtccagggacatcaccggaccgcaggcagccccctctgccttcccacaccaggagctgccccgggctctgccggcagctgcagccaccgcagggtgcgctggcctcgaggccacctattccaacgtggggctggcggcccttcccggggtcagcctggcggccagccctgtggtggccgagtatgcccgcgtccagaagcgcaaagggacccatcgcagtccccaagagccacagcaggggaagactgaggtgaccccggccgctcaggtggacgtcctgtactccagggtctgcaagcctaaaaggagggacccaggacccaccacagacccgctggaccccaagggccagggagcgattctggccctggcgggtgacctggcctaccagaccctcccgctcagggccctggatgtggacagcggccccctggaaaacgtgtatgagagcatccgggagctgggggaccctgctggcaggagcagcacgtgcggggctgggacgccccctgcttccagctgccccagcctagggaggggctggagacccctccctgcctccctgccctgaacactcaaggacctgtgctccttcctccagagtgaggcccgtcccccgccccgccccgcctcacagctgacagcgccagtcccaggtccccgggccgccagcccgtgaggtccgtgaggtcctggccgctctgacagccgcggcctccccgggctccagagaaggcccgcgtctaaataaagcgccagcgcaggatgaaagcggcaaaaaaaaaaaaaaaaaaaaaaaaaaaaaaaaa

SEQ ID NO: 2268 - DNA, 1154 bp, Homo sapiens
cccacgcgtccgggggatcgcagccaaagggcggacgccaaaaacaatccattgatacacttggtgacattaattgagaaaaaaacaatatggtctggccatggaggcatggtatccgtaacatcccccaaaggagctaaagaagaaatccacaatttaccatgagcatttctcgtctgaagattgccaagcgattcctccaggacattcctcaagatcaatttctgtacatccaccttgtcctgggagggacatcaatgggtttccatgtcctttggcttctggttgagttcactcagtggagaaccctggcaagaggcaggaaaaggggaggaagcagcctgaccggtttgaatttcaccttctgttcaccttggatgagagcagtaatcatcacgatcccagggaacagccaaaggaagagaaaaggcaaaagatttggacaagactcatgaagactaacagctcttggataattgagagaagcagctgcgtgaacagttttgatgcaatcatgaagcagggcccagtgcctgtggcatctgcctttttctggaccaatccatatttccttgtggttttctaaggtgcagagagggcacattgggaactttgcttggggtctttttcacatcttagagggaaggtccctcaacatctgcattggcggagtgtgatcctcatgtccctctgaatgatctggacttgaggtaaccagccccttccaggaagctgtcccatgagtgaagcctcagcagcagcctctgtcagtccctcccccacagaacctttggcttccatttgaccagccttgacatccagtgtccaaacaccgataaaattgattccactaagcgtgggaaagtcctggagcatcgattgtttcctcctctgcacccccgataccctggcattagcactctcccagaatgtaccttgcttgtttgattggaggaggtcaaagccctgatgaagaatgagtggaattccacaggattggagcagtcttgataaatgacagcaggggatggtgtggggaggggaaaggatcagaggaagtgtggataaatgaatggcttaaaaaataatccacctttgcctcccccttttctaccagtctgtctagtgcttcagggtgaaaaaaaaaaaaaaaa

SEQ ID NO: 2269 - DNA, 4024 bp, Homo sapiens
ccacgcgtccgaaagcctcttgcccatcaatggtttgctctctggagacaaagtcaagccagtcctcatgaactcaaagctgcctcttgatgtcctgggcagggtctgggacctcagtgacattgacaaggatgggcacttggatcgagatgagttcgctgtggccatgcacttggtgtaccgagccctggagaaggagcccgtgccctccgccctgcccccgtccctcatcccaccctccaagagaaagaagactgtgttccctggcgccgtccccgtcctgcctgccagccccccaccaaaagacagcctccgctccacgccgtcccacggcagcgtcagcagcctcaacagcacagggagcctgtcccccaagcacagcctcaagcaaacacagccaacagtgaactgggtggtgcccgtgcagacaagatgcgatttgatgagatattcctgaagaccgacctggacctggatggctacgtgagtgccaggaggtgaaggagatcttcatgcactcgggcctcacccagaaccttctagcacacatatgggccctggccgatacgaggcaaacggggaagttaagcaaagaccaattcgcgttagctatgtatttcattcagcagaaggtcagtaaaggcatcgaccctcctcaagtcctctcgccggacatggtcccgccttcggagagaggcacgcccggcccggacagttcaggctctctcggctccggggagtttactggcgtgaaggagcttgatgacatcagtcaagagattgcccagttacaaagagagaaatattcactggaacaagacattcgagaaaaggaagaggcaatcagacagaaaaccagcgaggtgcaggaattacaaaatgacctagaccgggaaacaagcagtttgcaggagctcgaggctcagaaacaggatgctcaagaccgcctggacgagatggaccagcagaaggccaagctccgagacatgctgagcgacgtccggcagaagtgccaggatgagactcagatgatctcatcactgaaaacgcaaatccaatctcaggaatctgacttaaagtcccaggaagacgatctgaaccgagccaagtcggagctgaaccgattgcagcaggaggaaacccagctggagcagagcattcaggctgggcgagtccagctggaaaccatcatcaagtccctgaagtcaacgcaagacgaaatcaaccaggcaaggagcaaactttcccagctgcatgaaagccgccaggaggcccacaggagcctggagcagtatgaccaggtgctcgatggagcccatggtgccagcctgaccgacctggccaacctgagcgaaggcgtctccctggcagagaggggcagttttggagccatggatgatcctttcaaaaataaagccttgttatttagcaacaacacgcaagagttgcatccggatcctttccagacagaagaccccttcaaatctgacccatttaaaggagctgaccccttcaaaggcgacccgttccagaatgacccctttgcagaacagagacaacttaacagatccatttggaggggaccctttcaaagaaagtgacccattccgtggctctgccactgacgacttcttcaagaaacagacaaagaatgacccatttacctcggatccattcacgaaaaacccttccttaccttcgaagctcgacccctttgaatccagtgatcccttttcatcctccagtgtctcctcaaaaggatcagatccctttggaaccttagatcccttcggaagtgggtccttcaatagtgctgaaggctttgccgacttcagccagatgtccaaggtaaagcccctccacggagcccccgcgcctctgctagtgtctttgtgcctcttgtcatggtgtgggctgccaggcgtaattgttcatgtcacgtatgtatctccccggcacctttccaacacaaggtcaggtctggaaagcatccatggctgtgatccaatgcactgcagtcccgtggggtgagccctgacccttcccagtggcataggtgccctgggctcccctggctcccactggtgtctgacgaccatcaggtctcagacggtgaagtcattgccatggccgagtagaaacttgagaaggcgttgggcacaggcgtctcgagagggccatgggcagcaggcctgcaggtcgaggcgtccagggaaagtgggccagcgagtgttcagagtcgcccatgtgacagaactctcaaggggtgttgaaaagtgagggccggcctccttgaataaatgcagacagatccacaggtgaggagtgaactgttgaaggaggacagcagcgaggctggttaccagactggacccgttggtgtccggccctcaccacacggtgacctgaactcactgtggctctggtcccagacagctgtagggcttctccagacgctggcagtgtggttggagctcatctttaaggtagcatagagaattcaacagggaacatccagaatggacaagtcaaaaaacaacaatagaagccccttacgactgaggtgccttccggaagaaactgctggaaagttggaaatgggggctgtggtgagtgggaaggacagggctgcggcaccattgtgcttccttgtgagttgtatgtttccctgtttgagtgaggagcatttttctttggcaggaatgaaggaaagcagatgaggtgtgtcccgtccctgacacctgcgtccactctgtcccttctcggcagcccccaggcaggggcagatgggctctgtcttcgggggctgcaggggcctgctttcctcacgagttccacctgcagaggcccaggcattatccacgctgcgggaagaggcagtagccacaagcagaacacagcccccctcctggagcccatggcccaggtggtaaggggtggccggtgtggggggtcccctggagcagctgggcccagtccctgtgagcgctgctgtcagcctgaaggtggtaagggagggagccccgggagtacctggaagacgcgtgccccaggcatgaggccccctcggggccccaccggccccatgcccaggtgccccaggtgccagtgtgactgggcagtctcccttggctgccccgtgttcactcagctggtggagcagatgagtctctgagcatcttggggttggcagcggtcgcaacttgtgatcacagaacacagattccgagaagcacttgagattctgttcaggttttcaaagacgcgtgtgtgcgtgccctggcggcgcagcagatcccacttctgaccgaggcagggtgtgtgtttacacagatgagcctgggcagagggagcccagaggccctggcatggcgcccccctccttccagcacacggagaaggcctccatccctcatatgccacgctgtgacacggtttgggactggcagaagatttagggcccagtgcacaggctcctgggcaggcgggaaaccatctcccgaaagcagaaaacgttggcacacggtggcagcagtccctcaggcgtcctggtcgtttctggttgtcgcaagtggactcctcttcctttgggaggctggatctgtcttcctcctctcactgtgagcagagggagggagagctagcagagcctgagctagggccgggatctaatgaccgccctctgcctgtccttgggccctgaaaccaggggctcttcacacacatgcagctgtgatttcagagccggtctcacttcctattggcggtgccgggccaggacagagttggacagagctgtggaaaatgggtctccaatactatcttgttttgattccagcgttccatcagctgccttcatgacacttgtacagccgcattctgagctcaaccctgaccttgcagctctgtttttcctttttggttacctatctgtttttcaagaacaacattgtggatataaataaaatgctaagggaaaaaaaaaaaaaaaaaaaaaaaaaaaaaaaaaaaaaaaaaaaaaaaa

SEQ ID NO: 2270 - DNA, 2287 bp, Homo sapiens
tggacgaggtggaattgctggatctggagagcgtagcgcctggcgggacgaggacgactacacctggttatacattggctcttcaaagacgttcacctcatcagagaaatccctgactcctttgcagtggtgtagacatgtcctagataacccaactcctgagatggaagcagcgagacgttccctgtgctttagactggagcaaggttacacttccaggggctccccactcagtccccagtcatctatcgacagtgagctgagtacttcagaattggaggatgattctatctccatgggatataaattacaggacctcactgatgttcagatcatggctcgtctgcaagaagaaagtctcaggcaagattatgcttctacttcagcatctgtatcaagacatagttccagtgtgtcattgagttcaggaaaaaaagggacatgtagtgatcaagaatatgaccaatacagtctggaggatgaagaggaatttgatcatttgccaccacctcagcctcgtcttccaagatgttcccctttccaaagaggaattccccattcacagactttctccagcattcgggagtgtaggaggagccccagttcccagtattttccttcaaataattaccagcagcaacagtattattcacctcaagcccaaactccagatcagcaaccaaataggaccaatggagataagctccgaagaagtatgcctaacctagcccggatgccaagtacaactgccattagtagcaacattagttctccggtcaccgtgcgaaatagtcagagttttgactcaagcttgcatggagctggaaatggaatttcaagaatacaatcttgtattccatcaccgggacagcttcaacacagggtccacagcgtggggcatttcccagtgtctatccgacagcctcttaaagccacagcctatgtgagtccaaccgttcaaggcagcagtaacatgcctttatcaaacggcttacagctgtattccaacacaggaatccccacaccgaacaaagctgcagcttctgggataatgggtcgcagtgcactcccaagaccttcgttggcaataaatgggagtaacctgcctcgaagcaaaattgcacaacctgttagaagttttcttcagcctccaaagcctctgtcttcactcagcactctgagggatggaaattggagagatggttgctactaatgcagttttatgtacccttgaaaaatgggaaagaagtaaaaatgagggttgtgttacctagctggctgggtagcagtggatgttgggatattctttcccttttgtgttttaatatatttactgcattgtttctcaatggaccagtcaccagagactaattattgcacttaaatatttgcctgagatactgcaacattctcaaacccatggttgcagtattgtgacacttagatctaggaagtttttgtagaactgctctgtacctgaatactttttgagagaattaagatgtatcaataatgctttgccatatgagttttttaaagtaacttgttcaatttactcacgtgttctaaacatctttccattacatgttctgtattttaatacattgcatattgacaactaggttctataatgtatgctttgaaatttacttttttatagtttacaggaattttattttttgtgcctatttctttttacacctatgtgaaccactatggaacaacttaaattttgtgccataaaaatatttttgtggtaaggtactatttttttagctctagggatatatcagcaaaaacacatcatgcaatttgagacacataattttgtgttgaatgagcacaacataatttgaagcattgcaaggagatarccagacagcagaattaaatggtcctgtctttttcatttttaatttattgtcatacatgggtttcatatttataacggcatcatgagctcattgcacttaatacctgcaatgtttgctactgtaccacaattgattttcaatactttattacgaaggatgaaactgtaatgttttattaacaatgcttctggaaatgaatgcattttaaagcaaataaatctttttgatagaccttttacaaaatccatttgcactaatgaatgctttcttatggcatataacttaatatttgttactgtgtacactgctgttttggaatgttcagaaataaagactctatttcagcaaaaaaaaaaaaaaaaaaaaaaaaaaaaaaaaaaaaaaaaaaaaaaaaaaaaaaaaagggcggccgc

SEQ ID NO: 2271 - DNA, 755 bp, Homo sapiens
ggcacgaggcgtcacattgcttaggaagcctgctgtgtttatcactgggtggctgtcagggctgagatggagagggccagggcctggcgaggtggagcagtcggcccaggtgtcccagcaattgttgctggaacagggtctggaacccacaggagaggcctgaaggacccagggccctctggctggatgcgtttgcctatcaggacccagaattacttacagacctgtttagggctaggcttggcctctttcttgagctcatctggaggggtgtggcaacactcattcttcatccttattctccctggctgtgggcaacactggtcctcagtgtcaccagatggtcctcctctgtgcccatgacccctcagcagccaaggctggccctgccagataatgtgtgtgcccatgatcacacccaggggcacaggccacatacgtttccctgaaaccttgggctccagcctccatcccgtccatgtgggagggaacttgggtcccagcagtgtgtctttcagcaccaagtcatgtttaaaagaccagagagacaagcattttgccaagatcttccagggaagatgcatgtgtgacacattaacattcaaatcaggccagcgcggtgctcatgcctgtcatcccagcactttgggaggccgaggcgggaggatcacttgagcccaggacttggagaccagtcttggcaacacagtgagaccccatctctacaaaaagttaaaaaaaaaaaaaaaaaaaaa

SEQ ID NO: 2272 - DNA, 522 bp, Homo sapiens
caccagccccaacccgctttgggggagcttagccccctgcgtcacccactccctgcacttctgctgcaatcaaggtggttctggtgcgggggtggggtggggggtgaggccttgtggccaatgggggaccccccaagagccagcttggacaatgctcttcttgccccttagttactggctggctgtggcttcagtggtgtgtaagcaggtggaatactcacccaccaagctctggggtaccccgagggcctgacaagaggatggggtgggggtggcatcctccaaagaccagcctccacccccactccagcctcagcggggccccagcgatgttttcttgttgtacaagaaccaggtccgagtgttgcctcctcttccttccggaagccaaactgctcctttattttttagagctgctgattgtgaatctcagagtcttaagagagaagccaaatatattcctcttgtaaatgaagaaataaacctatttaaatcacaaaaaaaaaaaaaaaaaaaaaaaaa

SEQ ID NO: 2273 - DNA, 787 bp, Homo sapiens
ggcacgaggtgagatggactttctcagaatatgaggactgcatgcttggcacactttaaatgtgtgtttcatttttaaagaggattaaagccctcatatggttcttttcctttaaaaaattattgaaggcagcacaaattggtaatacaaaaaaatatggacatgaaagctaatacctaaatagattaagcagttaacagcagtacagacaaaacttaatgaacccataaaatagaatgtggcaattcacattgaaatgatggaagttctggatgaaatacacagaaaacataggcaaggaaaatagtcaaaggttttcaaaactggaagtggaaacaaagatctcagccagactgttaagaaagtgtatagagtgcctctcagcataatgttcaaagatagacatccacttgtcaatgtcttaatcacagagtaaaaatttattttagaaaaataaaacgacaactttactcagatgttatagaaaagatgccaggtgcggtggctcacgcctgtaatcccagctctttaggaggccgaggaggatggatcacgaggtcaggaggtcaagaccagcctggccaagatggtgaaaccctgtctctactagaaataaaaaaattagctgggcgtggtggcacatgcctgtagtcccagctactcgggaggctgaggcaggagaattgcttgaacctgggaggcgtaggttgcagtgaactgagatcacgccactgcactgcagcctggcgacagagcgagactccatctcaaaaaaaaaaaaaaaaaa

SEQ ID NO: 2274 - DNA, 1241 bp, Homo sapiens
ggcacgagattttgcccacatgaattattatttctttttcaaagttacaactttggactttgctatctttcaggttttgctcgtaatctgtcagaaggcaataatgctaattacacagagtacgttgccaccagatggtatcggtccccagaactcttacttgggtgagttaccgtcccaaaatagaatgacatttccacatctgctgattctattgtcatttgctttgagttcatctatggaaaataagaacttcagttaattaaatgtgtcagttacatattgcagtataacaaactacctaaaacttaatggtatgaaacaagcacctttttgtttgctcagaattctgggtgtgggggaatcaccagtttgagttcagctggatggttcttctactggtctctcttggagtcactcacgaagttatagtcagctggtaggtcttctgggagctggttagtttaggggtctcagctggatcagaccatctctgatccctggaaacttatcctccagtaagctattccaagtttctaagtgtgatagttggagaattctgtgctattaagagggtaagccccaaagcaacagcagctttcaagcctttttttgtatggcttttgcctcgttggccaaagcatgttacatgaccacccctgattcatggtatggagaaataaattccatctcttgatggggcaagtggcagagccatattataaaatggtatatgtatggaaatggaagaaattaattgtagccatctttgctaataaacttccacattaagaatgtgaatatccacacagtttgacattctggcttatctatttgttcatttattaattcttcaagtacttatcaagtatctcttatgtccaaccactttgccaggcacatagagtaaatattgaaccagactgagcacagtggctcacgcctgtaatcccagcactttgggaggccaaagccagcagatcgcttgagctcaggagttcaagaccagcccgggcaacatggtgaaaccccgtctctacaaaaaaatacaaaaattagccaggcatggtgatacctgcctgtagtcccatctacttgggaggctaaggcaggagagtcacttgagtccaggaggcagaggtcgcagtgggctgatatcccaccactgcactccaacctgggcgtcagagcaagactccatcacacacacacaaaaaaaccccaaaaaaaaaaaaaaaaaa

SEQ ID NO: 2275 - DNA, 1093 bp, Homo sapiens
  misc_feature (553)..(553): n equals a,t,g, or c
gaattcggcacgaggcaacttctgccatgtggactcaaatgattcatctcagcctcccaaactgctgggattacagtcataagccaccacacccaaaacctagatcttggttttagattagatatatgtagaacaaagctcccacgtaccctctaggagggaagatattaccagaattatgatgaggtcccaagatctcacaggctttgctgtgtgctggggacagytcatyatcctactaattcttgactctcagccttaggccaaggagaattatgtatcttttataaaagatatgtaaactacttgagrtagtttcaagtgaaacaatcggctgtttgtgaaataaagaagaaaatttgtgaaataaggaagatttgtgctgcagagttctttagggatacgggctgcagctgcccaggtgatgagcttgaagaacctaggcccggctggcagagtggagaggagctgggagagacagctgcttttacgactctttcatgttctagcagatgccagatgcgaggcttctccttacagggaagggttatgnttgatttatcatacatttctggagtttttgkttagtttttgktaaatgcaaagctctgkgctggacattgtgagaaacaggaagttgaacgcccataaggagtttagaatagaagtggaagaagtcagtaggtgcccaaatgctatttgaggtttgaatagagaatgggtagaggggagtgtcaagggtaggctaagtttggagttacctaacctcaaagttccaaactgggagactggtgttataattgggagctactgcttttacagtcccctcctaagtgccgtgtgttcccgggacattgggaagcaggagaaaatgggtggtgaaagccaggtggcttctaagatccatgtcagttctaacacttttgacatctacgaatgattcagcatggttgtctctgaagcatgctgcaaatcacctctcgtagcctgcaagtacctgtaggggctaagctttgtagatgccacaggtgctcttagaaagcaaggaaagaaagaagagagagaagaaaaaaaaaaaaaaaaaaaaactcga

SEQ ID NO: 2276 - DNA, 553 bp, Homo sapiens
ggcacgagggaatgtggagctcttcatcgccacctcccagaagtttgtccaggagacagagctgagccagcgcatcagggactgggaggacacagtgcagcctctgctccaggagcaggagcagcatgtgccctttgacatccacacctatggggaccagctggtctcacggttcccccagctcaatgagtggtgtccctttgcggactggtggctggccagccggccttcgaggtgtgtcgttccatgctggcctccctgcagctggccaatgactacacagtggagataacccagcagcccgggctggagatggccgtggacaccatgtccctgagactgctcacgcaccagcgagcgcacaagcgcttccagacctacgctgccccctccatggcccagccctgagtggggagcaccgaggcaggggtgggggaatgtgtactgaggagccgtgcgtctgctcctggctggcccggcctaataaagcagtgttgccatctcaaaaaaaaaaaaaaaaaaaaaaaaaaaaaaaaaaaaaaaaaaaaaaaaa

SEQ ID NO: 2277 - DNA, 1503 bp, Homo sapiens
ggcacgagcactgttaccgagatccctgataccattaatgatctacaaggttcaactaaggttttgcaagcagtgcagtggctggtttcccactgcccccattcccttgacctctgctgccagactctcattcagtacgtcgaagagggattggccatgagtttagtggccgctttttccatgacagaagagagaggcgtctgggcggtcttgcttctcaggagcctggcgccatcattgagctgtttaacagtgtgctgcagttcctggcttctgtggtgtcctctgaacagctgtgtgacctgtcctggcctgtcactgagtttgctgaggcagggggcagccggctgcttcctcacctgcactggaatgccccagagcacctggcctggctgaagcaggctgtgctcgggttccagcttccgcagatggaccttccacccctgggggccccctggctccccgtgtgctccatggttgtccagtacgcctcccagatccccagctcacgccagacacagcctgtcctccagtcccaggtggagaacctgctccacagaacctactgtaggtggaagagcaagagtccctccccagtccatggggcaggcccctcggtcatggagatcccatgggatgatcttatcgccttgtgtatcaaccacaagctgagagactggacgcccccccggcttcctgttacatcagaggcgctgagtgaagatggtcagatatgtgtgtatttttttaaaaacgatttgaaaaaatatgatgttcctttgtcgtgggaacaagccaggttgcagacgcagaaggagctacagctgagagagggacgtttggcaataaagccttttcatccttctgcaaacaattttcccataccattgcttcacatgcaccgtaactggaagaggagcacagagtgtgctcaagaggggaggattcccagcacagaggatctgatgcgaggagcttctgctgaggagctcttggcgcagtgtttgtcgagcagtctgctgctggagaaagaagagaacaagaggtttgaagatcagcttcagcaatggttgcctggaagactcaggagcatttacggatttaacttcccttcccctctatcttcctcagactctagtgtctctttctcacactattgaacctgtgatgaaaacatctgtaactactagcccacagagtgacatgatgagggagcaactgcagctgtcagaggcgacaggaacgtgtctaggcgaacgactaaagcacctggaaaggctgatccggagttcaagggaagaggaagttgcctctgagctccatctctctgcgctgctagacatggtggacatttgagcagcctgacctgtggggagggggtctctcccgaagagtttctgtttttactcaaaataatgttattctcagatgcttgatgcactgttggaaatgtgattaatttaatcatgcagataaaccatttaaaaaaaaaaaaaaaaaaaa

SEQ ID NO: 2278 - DNA, 605 bp, Homo sapiens
tttgagctttggatatgttttatttaatgtggtggcaattcatccaaggggtgatgttctcccagcatttggacacacagggaaacttcctcttctggggagactcagctccttcaggctggcggtgagcgagggcgccgactggcccagggcctggctgcgcatgcgcacgaggttggacgtctctgcagaggccggccaggcctgtcccgccaccgggtttggaagaaggtacctcccagtcagggctcctcccaggctccctcgccttagctgtcttccatcctcactcagctgtcttttatacttcagtgattttccagggccagaagccacatctgggttgctgcatttccgaaacggcatgggtggaggggataatatgtggtcaagccttcactgctaccttgatcttttgaaaacagccttccatctatcacctgtgaaaaccagtttcatctctgtgtatcacaccatctctaggcttcacacttcatgactcaaactcttgaagaacctgacaagcgtttccaaagttcttcaaatgcttctgcagtcattatttgaccctcaaattaacaattctctgcggcaaacaagcggca

SEQ ID NO: 2279 - DNA, 1156 bp, Homo sapiens
ggcacgagtgatgctctaattaaggccattggtacagaaccagattcagacgtcctctcagaaataatgcattcttttgcaaagtgcattgaagtaatgggagatggatgccttaataatgaacactttgaagaactgggaggtatattgaaagcaaagcttgaagaacattttaaaaatcaagaattacgacaagttaaaagacaagatgaagactatgatgaacaggtcgaagagtcactacaagatgaggatgataatgatgtttatattctgaccaaagtgtcagatattttacactcaatattcagtagctacaaagaaaaggtgttaccatggtttgaacagctgcttccattaattgtcaacctcatttgtccacatagaccatgggccagacagacaatgggggttatgcatctttgatgatgtcatagaacactgtagtccagcctcatttaaatacgcagaatatttcttaagaccaatgctccaatatgtatgtgacaacagcccagaagtcaggcaagcagctgcatatggcctgggagtcatggcacagtacggtggagataattatcgccctttttgtacagaagcacttcccctgctggtaagagttattcagtctgcggattctaagaccaaagaaaatgtcaatgctacagataactgcatctcagcagtagggaaaatcatgaagttcaagcctgactgtgtaaacgttgaagaggtccttccacactggttgtcttggcttccactacatgaagataaagaagaagctgttcagactttcaattatctgtgtgacctgattgaaagtaatcatccaattgttcttggcccaaacaataccaatctgcccaaaatatttagtataattgcggaaggagaaatgcacgaggcaattaaacatgaagatccttgtgccaaacgtctggccaatgtcgttcgccaagtacagacttctggaggactgtggactgagtgcatagcacagctcagtcctgagcagcaggccgccattcaggagctcctgaactctgcgtgaagggccttaatgtcacccaccagaaaactaactccaaataaacgcttaccctttcctttaaaaaaaaaaaaaaaaaaaaaaaaaaaaaaaaaaaaaaaaaaa

SEQ ID NO: 2280 - DNA, 1357 bp, Homo sapiens
ggcacgagtagacacccagggatccacctggcataaaaatgcaccctcacttcttttgcttgaaaatatttacgaaggtgattcttcttcaagttttttatactggatttatatgtgggcaatgccggtaaagtgtgcttttcttcttccaaaaagtamcattttgagatgatcaaatggaagtggcctattctatgctcttataagcctgggagaattctgtttttctgttgttataattgacttattggggtttgaaggtgctaagcatgggaaaacttatgttcctgaataagatattaaatttcttagctttggttctttttagaagatacagttaaactgcagggaagtgatttttcaaattatgccatataaggtgattttagtggtctttaaaacacatgtggtagattttaaatgcctcaaataatctagacttgtgattctcagtttgsctgtacagagagtcacctggggagagtggggtggtagtgcttttaaaaatgcagatgctggagtccccttagaccaattaaatcagaatatccagagatatgaccagaatatctgtacttttaaaacgcctcagatgatcctaatgtgcagccagtgttgagcttctgatgtatgaacaaaaatataaaaacctttcacaagttgcccccagttcatcgtccattcaatactgtatagaacagagacaagccctggccaaattgcagagtcatgtgcaaaataaatgaatgttgttgtttcaagccaccgagtttagaggtggtttgttatgcaacagtacataactgataggctaactctgaaatgtcttaaatctgttaccatctctccattcccccaggacaggctcttgttacctttgttgactggatccacccaccttggcctcccaaagtgctgagattacagacgtgagccatggtgcccggcattttaaattttttttttttaattaattgccaacactttaaacactggagagttcatataaaaatctggatgtctagcacctcttgagaactcggcatatgtggccacagtgggtccacaatttctgcacagcagcaaatgaggagacgcagtgcatgtggcactctccaggtggccaccctcagccactcacatgcatattcgtttctgtggcccactgctgaagaaaggccactgcggggcatggtgccatgtacctgtggtcccagctacttgggaggctgaggtgggaggatcgcttgaacctgggaggccaaagttaaagtgggccatgatcgtatcaccgcactgcagcctgggtgacagagaccctgtttccagaaaaaaaaaaaaaaaaaaaaaactcgag

SEQ ID NO: 2281 - DNA, 739 bp, Homo sapiens
gaattcggcacgaggggagtaaggcggactgaaggaggagcttgatggaagcgtgcgagaaggggcgtaactgatttggaaaccagaggaaaggcgctgttttcaccgaattagaatcgcgggaaaatagagaagagtttgtttgaaggtctcgcgagatcgagacgcgcggcctcctcagcctctttcctcccgctgccatgcaccctgcagccttcccgcttcctgtggttgtggccgctgtgctgtggggagcggccccgacccgggggctcattcgagcgacctcggaccacaatgccagcatggactttgcagaccttccagctctgtttggggctaccttgagccaggagggcctccaggggttccttgtggaggctcacccagacaatgcctgcagccccattgccccaccacccccagccccggtcaatgggtcagtctttattgcgctgcttcgaagattcgactgcaactttgacctcaaggtcctaaatgcccagaaggctggatatggtgccgctgtagtacacaatgtgaattccaatgaacttctgaacatggttttgtaacctaccaaaatggataggctgttgaacattccacattcaaaagttttgtagggtggtgggaaatgggggatcttcaatgtttattttaaaataaaataaaataagttcttgacttttaaaaaaaaaaaaaaaaaaaaaaaaaaaaaaaaaaaaaaaaactcgaa

SEQ ID NO: 2282 - DNA, 991 bp, Homo sapiens
  misc_feature (979)..(979): n equals a,t,g, or c
  misc_feature (990)..(991): n equals a,t,g, or c
ggtgatctgcttgcttcttttaccacaggtgatttttaagtaacttgggtttaatttacagagatgaaacatgacagtctgagtaaaatacccagtgatgtagaagtgtgcctgtttattatgtagatacagacatccagcaaaaacaggagaatcacatgctttaaagaacactttctcttaggtttccttgagatatgttcctccagtgcaagcaagataatggtttacagaatttgctttacacaaaacttgtcaagaactcatctgttaaaagcaaggaataactagtttatattttccaataatgttcaaggttttctccttaatatgtttgaaattattgattttggcatttttctaagcaatttatgtaattttatttgaagaaaatgttttgtataatgtttttcccagcctaaacagggagagtcctaacagtgttgtgcttgtatgattctgagactttatttgcgtaagtgatactactatactttatttttgacccatgcctttttaagctgtttcatattgaaaggtggaatattgtaaaaattttgtcaaagatgtactgtagtgctatttgaagtacctgtaacaaaacagttggccctctgtatccatgtactctgcatctgtggattaaaccaattgcagatcaaaaatattagaaaaaatatgtcattttatgtaagggacttgagtatacttggatttttggtatctgtgggttggggggacggtccaggaaccaataccccatggataccaagggacaactgtacttatttacctttattgtcattgcaagcttcttatggaaatttataggaatgaaaatatacatgttaagaagattaaacattagatagtagatggtttgttgcatgctagaactgttagtattgttgaatcaattactttggtttcatgaaaaaataaacgataaatatctttaaaaaaaaaaaaaaaaaaaaantcgaggggggnn

SEQ ID NO: 2283 - DNA, 3287 bp, Homo sapiens
  misc_feature (1412)..(1412): n equals a,t,g, or c
  misc_feature (3169)..(3169): n equals a,t,g, or c
  misc_feature (3246)..(3246): n equals a,t,g, or c
  misc_feature (3273)..(3273): n equals a,t,g, or c
atagtcttttctatttttcatctgtcatcagtgggagggtgtaagccattgctttcagaacagaatcggcagtgtcgctcacagtctttctactaaaccagttgcatcttacagagcagcgtggatgagtgctaagaaccggctgtgtgaccttcagcaaggactttctcaccacaaaaatagagttgcccaaagtcaggcagaggtgataatgtgtaaaagtgactggctccaggcagacttgtagtgaacattgtttttcttccttcctgctagaaatgagtataattttagacttatgtttaggttatgaagagcaaattgaaaagagcacagggtttccagaccaggagtctggagtggcatttatgagagcctgccctgaaatggcactcagtgttgtcctaaggtcgcatggcctctgtgggccatggtgggcttcagtgggcctcagggctctcagtcataaaatgggaatgtctaccctaaccacctctcaaggccattttgagaacagatggccaatttacataaaagcatactatagatgtaaagtaacgtcatacggcttcatcatcaacccctacatctatatgctttaactgttttagagtacattgatctcatagaatgttattgcctcaaaaatatccgtttattttcccagaaattaagaaaggccatgaaatagaaaagaaatcgcttgaagatttactttctgagaagcaggaatcgctagagaagcaaatcaatgatctgaagagtgaaaatgatgctttaaatgaaaaattgaaatcagaagaacaaaaaaraaragcaagagaaaaagcaaatttgaaaaatcctcagatcatgtatctagaacaggagttagaaagcctgaaagctgtgttagagatcaagaatgagaaactgcatcaacaggacatcaagttaatgaaaatggagaaactggtggacaacaacacagcattggttgacamattgaagcgtttccagcaggagaatgaagaattgamagctcggatggacaagcacatggcaatctcaaggcagctttccacggagcaggctgttctgcaagagtcgctggagaaggagtcgaaagtcaacaagcgactctctatggaaaacgaggagcttctgtggaaactgcacaatggggacctgtgtagccccaagagatcccccacatcctccgccatccctttgcagtcaccaaggaattcgggctccttccctagccccagcatttcacccagatgacacgtccccaaagtccacagactctctgaaagcattttgatgcaggtctgcaggactgaccccaaggaggaacgtgggcacaagaggtatatcagcacacgtgtgatcaccgtaggtaactggagcgtcaccaccggcggaatcgnagcttctgagactggaagtctggaggaagacttttgcctccgtccaaaagattcctccaaaaaaagatttaaaaaaagatttcggcatcgacacggacgttgttgcacaaagcacttaaagaacgagagcatcttgttcattgcctttttcacctaagcataaggggaaaaactctcagggccctattaagatttataacctttgtaatgttcttcaccacagacaccttcttgtgagttttcagtctgactgtgggggtggggggtgtgaatgaaatggatgtcacagagtgtcatgtgtctgatgcagcctcctctgctgtgtattaaatgtcaaaatctgaatatatctggatatgtactaatcaaataataatcaatcaatcagcatatacatttcagccaaagccatagaagaaaaagcaatagttgcttgaattatgatcatctaccaccaactctgctcagccctgtaacagggtagggagagggtataacaggaagagctttgacttgtccctgtctatacattctctgtatcttttgggggtaacttcttggcagtttttcagtgttcagccatgtcagttgaaactagatttttctgtagattttttacttacccatgtgagcctaacactatcctgtaattcattttctcaggctatgtgtaaatgtagaaccctaatttttctataaaaaaacaaactaactaactgtgtaaagaaagaaaaagggaagtaccaatgggtttttccaccttatttttacctttgatctacccttgcagatttaacctgtcttcttccctcccattattctcattttccttttacctttctccaccatccagagccacaaaagcaaaccttctacctcctacctacttttctctgggacaaggataaaggaatatgattttccagagccccagagccagctcatcttccaggtgctgaaaccactttccaaataaactaaagcctggatttgatattacaaattttgggaaatcttagaataaagaacgagaacaaggaagtcattggctagtataattaagaaaggtaggattcagtgcttaccgatgatgcagtacttgatagaagaaaacagtctgggaggatagcgctcatttttcagttaccctttaaggagtccctttgtctttgggaaagtagcagaatggtccgcttctttcccatgagtggaaaatgtggcttgtccaactctcctccaggttgcatttcagtttctttccaaaacttattacctcccctaatcctgagactttggaaaaggtggaaggaagaactgttgctttatctccccctccctgcatgtgtcaacattgtgatgtcagtatttactaatctacattcagtggctgtacaaataacagctgtagtaagaagagattcaggatgctagaggtgaatatttgggtcatttacatgtacactacatagcaagttgatactcatgttgcatgttcttttaaattagtgattttgtgtcttaagtctttaacttccaatacttcatcatgtatgtaaccttccatgtttgcttctgataaatggaaatgtaggttcactgccacttcatgagatatctctgctcacgcttccaagttgttctcaatgacattagccaaagttgggtttgccattcatcccctagggcatgggtaaatcttgtgttgttccctgctgtcctccgtattacgtgaccggcaaataaatctcataggcagnttaattataaaacmtctttgggagggtggggaggaggacaggaggggaagktggggggaamcaaattaggggattcnttaagggatttttgttttaaacccaangttttcctgtaggg

SEQ ID NO: 2284 - DNA, 2621 bp, Homo sapiens
  misc_feature (2102)..(2102): n equals a,t,g, or c
tgatgtgttggctgctgccacctggggaagtgtctgggcgtgtgtggacaggtgtgaggggctggggctggggtaggggcaggatgaaatgcaggcctgtgtgggtgtgaggggtgtgtacccgcccggctccatgtgggtgcctgctgtggcggtgctggcgtgttctctgcagccaaggccatggggcgtgaggactccctgggtccccgctctgacccttgctcctgcagggctgatctatgactcggtcatgctgaagcaccagtgctcctgcggtgacaacagcaggcacccggagcacgccggccgcatccagagcatctggtcccggctgcargarcgggggctccggagccagtgtgagtgtctccgaggccggaaggcctccctggaagagctgcagtcggtccactctgagcggcacgtgctcctctacggcaccaacccgctcagccgcctcaaactggacaacgggaagctggcagrkggacactgacaccatctggaatgagcttcattcctccaatgcagcccgctgggccgctggcagtgtcactgacctcgccttcaaagtggcttctcgtgagctaaagaatggtttcgctgtggtgcggcccccaggacaccatgcagatcattcaacagccatgggsttctgcttcttcaactcagtggycatcgyctgccggcagctgcaacagcagagcaaggycagcaagatcctcattgtagactgggacgtgcaccatggcaacggcacccagcaaaccttytaccaagaccccagtgtgctctacatctccctgcatcgccatgacgacggcaacttcttcccggggagtggggctgtggatgaggtaggggctggcagcggtgagggcttcawtgtcaatgtggcctgggctggaggtctggacccccccatgggggatcctgagtacctggctgctttcaggatagtcgtratgcccatcgcccgaragttctctccagacctagtcctggtgtctgctggatttgatgctgctgagggtcacccggccccactgggtggctaccatgtttctgccaaatgttttggatacatgacgcagcaactgatgaacctggcaggaggcgcagtggtgctggccttggagggtggccatgacctcacagccatctgtgacgcctctgaggcctgtgtggctgctcttctgggtaacagggtggatcccctttcagaagaaggctggaaacagaaacccaacctcaatgccatccgctctctggaggccgtgatccgggtgcacagtaaatactggggctgcatgcagcgcctggcctcctgtccagactcctgggtgcctagagtgccaggggctgacaaagaagaagtggaggcagtgaccgcactggcgtccctctctgtgggcatcctggctgaagataggccctcggagcagctggtggaggaggaagaacctatgaatctctaaggctctggaaccatctgcccgcccaccatgcccttgggacctggttctcttctaacccctggcaatagcccccattcctgggtctttagagatcctgtgggcaagtagttggaaccagagaacagcctgcctgctttgacagttatcccagggagcgtgagaaaatccctgggtctagaatgggaactggagaggaccctgagaggagacgggctgggcggcgacccccacagggctctcgagaacagattctcccctccagtatgggccctggctgtggcccccattcctcaggactgcacagaggaggactggctccggctccgtcgggctcacccttaaccactattcctggctctgcaaaccccagactttgcacacagccycaggctccacacagaaatgtgaacttggcctcagacaggctggcccttcctaggctctaggggctaggggggagtggggagccaagaggtcccatattcctgagtgcaggggtagtccctctcacctgcttcctcagacgactctggaagcttccctctaccaccgggcactgagacgaagctccctgacagccgagactggcagccctccatctggtccgtaccctcgccagangcccccctacatcaacctcctggcgatgccctggtggagcagatgggtgctctgggagtcctgtgcttcctgatccaatggtgccaaacccttcatctcccccagaagcgcagcatacccctgggacccctcggccactgcccactcggggagccttctctgtttctggggcctcccccaccatagctctgattcccaccccacataggartagcctgactgagggggaaggggtgggagagaagatacagacatggaggaggggaggctgctctggcaaagtcttcaaggcttttgggggtccaggcctggggtcaagaaggaaaatgtgtgtgagcatgtgtgtgagtgaggcgtgtgtgtgagcgtgtgtgtgagtgaggcgtgtgtgtgtgtctttcctaggacccaccataccctgtgtatgtatgcatgtttttgtaaaaaggaagaaaatggaaaaaaatctgaacaataaatgttttatttgctttaaaaaaaaaaaaaaaaaaaattact

SEQ ID NO: 2285 - DNA, 745 bp, Homo sapiens
  misc_feature (18)..(18): n equals a,t,g, or c
ggattacctgagatgatncctgtagggactccagcataccatctgtgtttgcwatagttattatattacttctaaagtcagaattaaagacctcaaggcgtgagcaccgcacctggccctcaccaaattcttaataatggctacctctagagaatgagaaacaaaaacaaaaactgtaatgtgttcattggtagtagctctttacctaattccaccctttcatactgatcagcttcttcctggttcatctccattgttatcagtagtcaagtcagtcaccaacttctggagatccttcaacttgtaggacaatatccaatatttactgttaaatccatgtccctttaaaacttgccctctagccaatcttcataagctcttcttgggagctgctttctctgcctcagccacaatttctgtgcccatctccctggaacttaagccagtgaactcaccaggactgtatcacaccatattctttcaaaacaggctcacctctgtgcctggaaaacagcccatctttttttctatgtgtattagtagaaaaaaaggtgaaatgactgtgatcatgaataatccccacctctcagtggcttaaaataacaaaggctcctttctcactcacagttgggcacgtctgtccatttgcaggtgggttgggaagctccattctgtatcaccctcgctcaaggacctggactgaaggatttctgctttcaagaaaaaaaaaaaaaaaaaactcgag

SEQ ID NO: 2286 - DNA, 931 bp, Homo sapiens
ggcacgagcttaaaagccatgtagttaagtcatataaattccaaaatgtatcagtttcttctgtgtaggtaagtgactagtaatagaaactaaattattaatatgtactagtgggacatagggaagatgtaagtaattaccatggtgcctgtgtacaggtctccattgttttggggcaatgaatatcgaatgctttctcattcttttcctcttttcccaccaaattgtgatttgtcactcctctccacttctttttgttctgcattttttgttgattgtttagagctggtgaacagcaactatatttaaaaaaaattgaggccaatttggtaaagaaatgagaatctgaattccagtttgctataatttaagctatttattaaatataaagaagtggtatttaaaattctcaggtattgggaaatcttacggtatgttttaaaggracagtttcttaaagtcctaatcattgaattagggagacatagagtctcaaatataagtgtcatttgtatgtattttcttcaacgataatgtttggcatttggatttgattttattaacttaaagtttttaggcagtatgttaaactggctcaatgcttcgtactagttcttttacacaacttgccattattgagttattttctgttgcagaaaaggcaatctctttcacctctggatgactcaaatcaggaaatataagcaaaagaagataaacaattctttctgtgtctttacttctcagtctttcccaatctggctgaggcacataaagcagacttgaggaaattctttacttaggacactatcttaacctgctcagggtatttagaattttttgaaataagcagtcatgtacttctataagtgctaaggaaagtaaattagtgtattattaaatattagatcttaaaaaaaaaaaaaaaaaa

SEQ ID NO: 2287 - DNA, 635 bp, Homo sapiens
ggcacgagcataattatcaaaaccatgaaaaacaacattggtaggatactataaagtactaatcttattttggatttgacgaatttttacatgtttttttcttttttagtttgtactctaagaagttgtattacatgtacagattcgtgtaaccactgcaaccacataaaactaatgaacacaaagtccctcatgctacctttttatgcttacactccatccaaacctaactctgccaaccacttttctcctatcagtataatttcatcatttcatgaatatgataaaaataaaattgtttttgtaaatggtttttataaattttatataaataagttatatgaatttttattgatagagagtatgtaagcttttggcatttttgtcactcagcaaattactcctaaggtttatatgagttgatgaatagttgttttattatttttttttaccaccatgtatctaaccagatgaaagttgtttatatttgagagtagtatacatatttgatgtagtagtttatccattcacctatgagatatatttgcactgttttcctggttttaagtgctataaataaagatgctgtgaaatctaaaaaaaaaaaaaaaaaaaaaaaaaaaaaaaaaaaaaaa

SEQ ID NO: 2288 - DNA, 1187 bp, Homo sapiens
ggcacgaggaatttttcaatgccgtcattttcagttagatgattttgcactttgagattaaaatgccatgtctatttgattagtcttatttttttatttttacaggcttatcagtctcactgttggctgtcattgtgacaaagtcaaataaacccccaaggacgacacacagtatggatcacatattgtttgacattaagcttttgccagaaaatgttgcatgtgttttacctcgacttgctaaaatcgattagcagaaaggcatggctaataatgttggtggtgaaaataaataaataagtaaacaaaatgaagattgcctgctctctctgtgcctagcctcaaagcgttcatcatacatcatacctttaagattgctatattttgggttattttcttgacaggagaaaaagatctaaagatcttttattttcatcttttttggttttcttggcatgactaagaagcttaaatgttgataaaatatgactagttttgaatttacaccaagaacttctcaataaaagaaaatcatgaatgctccacaatttcaacataccacaagagaagttaatttcttaacattgtgttctatgattatttgtaagaccttcaccaagttctgatatcttttaaagacatagttcaaaattgcttttgaaaatctgtattcttgaaaatatccttgttgtgtattaggtttttaaataccagctaaaggattacctcactgagtcatcagtaccctcctattcagctccccaagatgatgtgtttttgcttaccctaagagaggttttcttcttatttttagataattcaagtgcttagataaattatgttttctttaagtgtttatggtaaactcttttaaagaaaatttaatatgttatagctgaatctttttggtaactttaaatctttatcatagactctgtacatatgttcaaattagctgcttgcctgatgtgtgtatcatcggtgggatgacagaacaaacatatttatgatcatgaataatgtgctttgtaaaaagatttcaagttattaggaagcatactctgttttttaatcatgtataatattccatgatacttttatagaacaattctggcttcaggaaagtctagaagcaatatttcttcaaataaaaggtgtttaaactttaaaaaaaaaaaaaaaaaaaa

SEQ ID NO: 2289 - DNA, 921 bp, Homo sapiens
ggcagaggtaactatttgtggcaagccaggtcgaggtcactctctttgagggcatttactcactgcctagtgccccctttccactggggcagacccagagacaaaccctagcagcttacttagctctcatgaactaagggctgtcccttagttctcccaaagtaacccacaatgcaaccctgatgggctgcatcttccaaaattgaaaggcctttgtctatcattccatgaaacaaaaaaagattatcttactttttaacatggcttaaccttaatacccactggatttcagagaacagtggccactgcatggttctcatgcttacagtacgatcctgtagctagatttgttttgtaagaaggaagaagaatgagatgaaataccctatgtataatgttttatgttgctttggaaaagtacaacaatgtagaaaaaggtgaaatcatgataaagtaagaaattaaaaactgtttggactgatttacaagaaaaagatgatgctatgatggttcagttaaaggaacctatgactcacccccctccactttatgggggagctgcagcagcactactggcgcctctccagagtccccaccaccaaaaagtcacaaatccggggcaacaggtatgatctctacttcttataacccaacaggggactccatttaggcagggtgtcacttcttatacccaacagggaactccatttagccggggagtcactctggttctgagaggcagtttccccataacaactgcttacaggaggtgttgctgccacaggccagcctataggatttatcttggtttattctctgttctccacttccaacctacttaattagaaaaataatatgcctatttattgagaagatctaaagtttatggaaggaacaggattgaaaaaaaaaaaaaaaaaa

SEQ ID NO: 2290 - DNA, 960 bp, Homo sapiens
tttttttttttttttaaaactacaattttgaacatttaatgaatgacaaagacataacatcctctgaaaaatctgcaagtaaatcaatcatttttaaacaatrgctaccatatatttgtatcttctccttgggaaaaactttggaaaaaaaaacacgcacataagtatcataactgagggttgtggacaagttacttctattttaccaatttttatattgacataaagtagcacagactagttatttcatttaaaaaaacacactgacaaatcttttctctattacacttataagacttttcacttatatgcttataccaatatagaaacacataacttgagattctagccaatttttattttctcgaaactgtttatcacctgtgtattatctcagtttttccattttcctgcctgcttcttgatgtctgcatttgggccaattattgtttctcagcatcaccagcatgtggacaaaaaataagatgaaaactaaagtcagttcatctggtaattgaagttttgttagaaggactgataggagataatgcaagtaatgtctatagtgaaattatatgattattgatgaatctcaattattactaccactttccccacagataactgagttttgtgtgcatatgtgtgttttcctatggaatggaacataaaggraaattttaaagatatacaaacacatgttcaagtgtataatacatatgtacttttagtttcattttgataaaattaatgagatacaaattttatcatcaatttcagaggtctttgtatctagttctttatcaacgaaaataatcacaatatattgggcactgagtgaatttgtcagctatggattcgtttctgaaaaagtatttctacagtattcctacactactctgaagaccctacagtatgccatttttattattaaaaatagaattacagttgaggagagac

SEQ ID NO: 2291 - DNA, 869 bp, Homo sapiens
ggcacgaggataaatgagcatttaggaggccagccccataaacatctagccatatagaccccttaacattaaatgagttgctctcaaactgaatgtctagactttaacagaaaagagatacttaacctcagggaaaccatctatctgtccaaattatccaataattgagtttcctaagcagaaaattcaatgcctaacttcaagtttttctttcacctttgcattcactgggaatttttaatggaagccatcttcacctttacggtattaaatggtaaaatatagattttcctacaatgcatattaagtactgtaaaaatttctcttgtatgggtattagcctttaatttgtgcaaacagtagatactaaaaaagaatactaaatgaggaaactccaaagaagcattttctaaaacatgttcaatggaacaccagctccttgagatgttcaaaggatattcctcagatagggtatacattgatcaataagtttatgaaatttgggccaaacaaaattaaacaggtttactgacagaaccagcctgtcagagcctttaaaatgcaaacccaccttgtgaatctctatggtaagacataatattcggtgtttaccatgcatacttaatcataaagctgtcttttcttggaacatcttacagggcttgtgtccccagtacaaactttagaaaatgtagccttaatacccttcacattactccaatctaccactctaatggcttgtctactcttcttcatacatgactagcaaatggtggtgtttatgctttaaaagaacacagatctaaaaaaaaaaaaaaaaaaaaaaaaaaaaaaaaaaaaaaaaaaaaaaaaaaaaaaaaaaaaaaaaa

SEQ ID NO: 2292 - DNA, 799 bp, Homo sapiens
  misc_feature (19)..(19): n equals a,t,g, or c
  misc_feature (22)..(22): n equals a,t,g, or c
  misc_feature (45)..(45): n equals a,t,g, or c
ggggggggaaaggaaaggnaanaactccccttactattgggaacnaaagctggagctccaccgcggtggcggccgctctagaactagtggatcccccgggctgcaggaattcggcacgagggaatttcacacaaaccccactgtcggccaggctggacccacagtaccatgtggcttgcatgctagtgggggcccctccagatgaggtgggttctttcttttctttggtgcctggcccatttcagcctgtggtgctccctgcttgatccctgtcgccatctgagtgtgggatctcagccatcggtttccttagttttcttgtcagttgctcagactttcctctttggggcgttagaacacctcagccctagattttcttgccaggactgtgtagtccagttgggtggagcaaagcacttatgcctcaaatgctcagggcctggttaccatctcactggctgataacctctatctgaaggccactgtttccctgaccttccctccctcgcccacacacccacttccttccactgtgaaagcggagtaaggctttaattgcacaggttcatcatttcttgtttggaagtcttcagatttttagttttataccttagctttctgcagaattctccgttgaatcaatgccctgggaaccccatggacagaagcaccttttaatgaagtccttccaaaactcgttcctcagtgcattgctctgttggaaacagtgctgtggggtgttggggtgtatagtatatwttaacatattttaacttaaaaaaaaaaaaaaaaaactcga

SEQ ID NO: 2293 - DNA, 1804 bp, Homo sapiens
gatatcaagcttatcgataccgtcgacctcgtgccgagatttgattttttagcctcctctagagccaatcaggcagttaagagtaataaaggaaaagggtttggtcacaaaccctaccattatctggagattacttcctgctgcactcctgtcttgccatgcacgtcttgccccctcacttttgctcagcctagcagtctacttcactttattgccttgtaagtgtcaggcctcctgggcgctctggaaaagacagggagccaggccctctcacccctactggtaacaggtcattgctgggtgcacccgagggaggtgatttgcatcatggtcatgctgcatgggctccactgggatgctgttaaacaccagaggagccaacctatcagaatcccagcagcaaaggaaaactcagattttagaggctttttacaataaagtagcgtaactctaggtcatgattgatttcaaatgcctgccatgaatgatttgtaagtaattatgtaggatccatcaaagcagtattgtaggcttttgaattgtcccagtggatccgggaccccattcactgtctctcttgatcgtgttaatgatgcaatcagagttcaagacaggccccatgaagtctgactgcactgggatggagaaatgaatttcttcccactgaaggaaactctttctcattcgcagccaagacgggagtgccactgttcctctcttcactcctgagatactgcttcttggaaacgggtgtccacttcctcttctaagtacctttttctctttctcctaaaggtgggactatctcctagtgtttaaatttgccagttactcgcccatgtatgtcaagcatagaaaaggaaatgttttaccttatctcctgtatgtatgatagaacttaaaagaaatgggcatttgttttcatagccccagcagagaaaatcctcttcatagattaaatgtgctgctgtggacagagggaaaaaaaaaccctctacatattgaaaggcaccaaatgtaatatctgacactgttaagatgcccaaaagagcaaagttgtagtggagatgcagggtcatttccccatgccatccacagtgtttgttagtgagtccacggctgacttgcagtgataaagaaaagcatggagctgtgtctgcagacaatggtggctgcatctgtaagtggcttcagaggcagcagccctggggaaattgatgggtgtggcagtggacctgtgaagagggagaatctagccttcagcctgtccagtgttaaccactagagaaactgagctttatatccttttttaatgcctgtgaattttagcatattgaaacattagagcaaatactcaggggatttttcattaaacatccctcagataatttagctatatatcattagaaagggaaagctatcatttttattttaaaactaaacaaggccatcttataaactgtcaccaaagtcttcccttttttattgcatgtgtgccttgaatttcataaaacattaattcacaatgggggtcagaatgtactcttgttgaaacacttcttgtaccattttatgttcatattatgtttgagagggtaaaaatgtatgagcagcttaactgaagtagaactattcatgatgcttttcacacattgtggcataagatgtaaagtttgtaattaatgttaatttctgtgcattttaatattcttttataattattaatgttaatttctgtgcattttaatattcttttataattatgagcattttaataaattcatttttacaaacaaaaaaaaaa

SEQ ID NO: 2294 - DNA, 831 bp, Homo sapiens
ggcacgagctcttgttcagattgcttgcggtttgaaaaagaggtgtgctagctttgcttagtttatttcttatttttggtatacatatacatatatataatattagaatgtgtgtactggaaatgctatgataggtattttgtgttaatccaaatgcaatgatagtttcttgtatgaatgtgcaagaggcctgtgaccgaatgctacgtttttatggtagtktaagattataaaagtagaaatgcaacaattcccagtttttggataggttctaaatttctgagatttgattcatggcagatattctctgttgttgttgttttagatgggctcattacataacgagttaattgtcactagtaggagactgtgaaggaattttgttatactttcaaaaatgttactgtgatgaaaaatcatctattttcagaaaatatttatgaattaatttactatagaattatctctctaattatcataattgggttacaatttaagctccccttttaaatgttatattttaaaatgttattactctataaaagaaaattgcttgctatatttacaccttctttcctaggaaagctttcatccttaaattgttgtattcctaccctctgaagacatttaaaataagcttttgtgcctgcagcagagcctgcagaagctaatacaagggacactggtcttttgacaaaataaacttgtgtaaattttgatactgtattaaaactatttttttaaagttctgcataaaattgagtattaagtatatgtgttcatcttagcaatggtaataaattatttaatctcaaaaaaaaaaaaaaaaaa

SEQ ID NO: 2295 - DNA, 407 bp, Homo sapiens
cggcacgaggtaatcagtaggcagaaatggttggaatttcctggtcccagtttcagatcatatctgtctttccccagactcctaacttcctgttgggacatcccttggtctggcctttccctccagagaagcccccagacccacccgcagccttgatttactgatgcctaatcttattttagtctttcacaccagtttttaacaactcgactgtatagatcttctggaaattttacccaaaaatgttagatgtgccatcccctcacaggggaaagtggtggggtggtgggggttaatgtgttgaaaatctatgtatcttgtattttatttgagtcagctgtgttttcacaacaactctgagagttaacatcatttctactttataaattaaaaaaaaaaaaaaaaaa

SEQ ID NO: 2296 - DNA, 1255 bp, Homo sapiens
  misc_feature (15)..(15): n equals a,t,g, or c
  misc_feature (20)..(20): n equals a,t,g, or c
tttccaaggaatttngggcnccaacccgtaatggctgtacctcttatacacacaagtatgaaaaatacccagcatgtcacccacgtgcagaaagtccttggaaaagttagatgttttggatgagtttgtgggtttcttttattattatgcttcataatttatacacaggttaccatttcagagtactcaaaggagatacaagctataaggaaaaagatgcttgttttcattttctaaaaaaaaaaaaaaagtgattgaaatgagatcttgaaatctgtactcaagtgatttcattaggtgaagcaagaaatgagaattgatttgaactgatgtgaattggctggaaagggattcttagatcagctaagtgaactttctggttttccggatgtggttggagcagctttgccgattacccactggttaacagcagagtcacagctagaatgtagctctcttgaacttccatgctgtgtatctgaagaggaaggtgctccttaaggaagcagagaggcttctcgggaaaggggaggggatccttgttgctcctgaggctttgacaagcccttattaatttgcattttaaaggcaggcatgcctgggtggcggaggaagtctgctgtttggaggagaggtgttgctcatttagatcacgatgcatccactttagtggccctagaaggtgtctgggtgcagccaaagaagtcatagttccctaccacatgtcgatgtagtcagcagacagcaagcacttgctgtgctcctgtgaaattgactctgtaccctgagtcgggggacacgagggtggtgctgaaatgtcagctcaccaggcagagctgtgctggtgtgtgcagcaggtaggctgggcttatgcaggtgcaggcgtagcctggggaactcagggaggtgaaggacagaagcggaggattcccaccctccaagcctcactgggagctgttgtgtaggatgtatttttgtatccagatttgagtcattgggtaggaaagctaaatttcttctagaatttagctggatttgaatttttatatttaaattcttgaattccctgctgactcttacggcaaattaattgaaattgkgaatttttctctggttactactttaaatatatcccattgttttatcattatttttcagaaattctctatttttgatttgtatttcaccctttcattaaatagttgtttaacagaaagctttttagcttacagaaaaaaaaaaaaaaaaaactcga

SEQ ID NO: 2297 - DNA, 1768 bp, Homo sapiens
ggcacgagtttctttaaagctttgtgatttttattaatgttattgttttgtcccaaaggaccagtgcttatatttattcattctaatgtgtttttgtttaaaatctattaatatatggtttcatcttcattctaatacttggataggctttattttgtttctcctagctttttggatacagaattaacttatttacatttattcttagcaggctataggctttcttataagcattgctttagctctctcatatgttgtgatgttcagtattctgttatgattttctagagttctgcaacttcgttttgttttatagttttgactcggtttgttttcaggaggcagtttttgcttattattaatttttatttattgcagatgattagacagtgtgataaatttatttctcctatcaaaaatgtattgagatttttgtttgcaccctgttatgtatcagctaaaaagtttcatggggtcttgaagtatattattaattttcagtgtatagaattcaacatttatcaattagatctatcttattaattatgtgatttagatcatcttttttctcttaagtctgctttctaaaagcatacagctggttccttttatttgtggtagttatgtcgtataaaatcacttccagcacagaattagcaaatggtgaatcattgctcctaggggaaatacaaaattagctttctatgagccactgataacgtttttgtcagctgatcaatacgtaatctttttaatgtgtttctgtttaaagatactgtatttaacatttgattcattagcattgaactcatagccagtagcactttaacttatacttgaattaagtttatctaatatacattttttctccaaaagtcatattgcagcctttttgcatgtaggaatgaacactaaacatgttgaaggggtcattgaaaacaccacattaccaaagcaaaagtacaaaaatgcagaaaatgcaataaatatgtagtcatgtgccacatacaacattttgatcgatgtcagactgcatatccagtggtggtcccatgagattataataccatatttttactatatcttttctattaagatatgcttagatacccaaatacatagctatggtgttataattgcctgcagtattcagtacagtaacatgttgtacaggtttgtagccaaggagcaataggctatctcctatagtctgggtttgtagtagactgtaccatttagctttgtgtaagtacacactatgatgtttgcacatatgaatcactgatgacactttctcatgaggcatccatcattagcaatgcatgactatcacagaaggacactttaagtacacaagtggaaacagaaggcagagtggctcattgttcagcctcagctgggaatgtgtgtgtcaggcaattcaaaatatttaccactctgcgtctccataaatgatgccaaaagtatcgtgagtgttgatttttagggtcacagaaagcctgctctggctgaagatttaaataagatctaaagatttataataccccaaatatccaaatttcaacaaaatgtccctcatgaccagaaaagaatcaggaaaatctcaactgaaatgaaaaatgaacatcaatagacaccaggagaatacagatgtgaattgtctgacaattattttaaagtagccatcacaagaaggctgagcaattataaacatacttgaaacaaatgaaaaaaacagaaagtcccagcaaaaaaaaaaaaaaaaaaa

SEQ ID NO: 2298 - DNA, 826 bp, Homo sapiens
ggcacgagctcgtgccgaattcggcacgagagaaaacacctaaagctgttttgagaggtttgtcattagaagatgacattttcagaccaagcacatggtttgtttcttaatgaactaagataacgagggaaaacttagtgacttcttaaatgtcacatccttctgctggtcaatctgaaagaagaatggattcttcagcagcagttttgggggtattgctcaaaaccttactacttctgtggagctgcctgctttttcccagccagctagttaagcctcctagtggcgctactgtgttctgcaacctgcagtgggcatggagagagagggccagccctgccttgcatgcctgctcctgagggctttgttctggggtccctagggaagcacatttctctggctcttctagagggtgactcgcaactttaggcctctgcgtctggtcttcctcctgatggatgtcgacctaggcttggtcatttgttccttcccaggtgtttatggggtttcctcattgttccctgatataattcagtttaagagttggtgacagaagcagatgccctatattcatgggatgttccatctcacttcatgacttactggaatcctaatttttaaaattttcacagtggaattaagacataatggatgactctagccagacatgctgacacatgcctgtggtccagctgcttcagaggctgaggcaagaggatcatgaacccaggaggtcaaggctgcagtgagctgtgatggcgccactgcatcccagcctgggtgatagagtgagacactgcctcaaaaaaaaaaaaaaaaaaaaaaa

SEQ ID NO: 2299 - DNA, 2243 bp, Homo sapiens
  misc_feature (19)..(19): n equals a,t,g, or c
ggagttccaagcccacggncccggtcgcggcctcgccgccctcccgcgccccgcgccgggagcgggcctagagcgctcgcctcgcccctccgcgagcagggctctggcgcccgcccctgtccgcaccgctggcagcctgaagagagtcgctggccgtggtcgccgctaggtaggatatatctgcatcttgaaaggaagataaaacaaaagccttctttggaatagatggatttttgtcactttctgtgtgaactaaagtgattcaatgtctcttttggattgcttctgcacttcaagaacacaagttgaatcactcagacctgaaaaacagtctgaaaccagtatccatcaatacttggttgatgagccaaccctttcctggtcacgtccatccactagagccagtgaagtactatgttccaccaacgtttctcactatgagctccaagtagaaataggaagaggatttgacaacttgacttctgtccatcttgcacggcatactcccacrggaacactggtaactataaaaattacaaatctggaaaactgcaatgaagaacgcctgaaagctttacagaaagccgtgattctatcccactttttccggcatcccaatattacaacttattggacagttttcactgttggcagctggctttgggttatttctccatttatggcctatggttcagcaagtcaactcttgaggacctattttcctgaaggaatgagtgaaactttaataagaaacattctctttggagccgtgagagggttgaactatctgcaccaaaatggctgtattcacaggagtattaaagccagccatatcctcatttctggtgatggcctagtgaccctctctggcctktcccatctgcatagtttggttaagcatggacagaggcatagggctgtgtatgatttcccacagttcagcacatcagtgcagccgtggctgagtccagaactactgagacaggatttacatgggtataatgtgaagtcagatatttacagtgttgggattacagcatgtgaattagccagtgggcaggtgcctttccaggacatgcatagaactcagatgctgttacagaaactgaaaggtcctccttatagcccattggatatcagtattttccctcaatcagaatccagaatgaaaaattcccagtcaggtgtagactctgggattggagaaagtgtgcttgtctccagtggaactcacacagtaaatagtgaccgattacacacaccatcctcaaaaactttctctcctgccttctttagcttggtacagctctgtttgcaacaagatcctgagaaaaggccatcagcaagcagtttattgtcccatgttttcttcaaacagatgaaagaagaaagccaggattcaatactttcactgttgcctcctgcttataacaagccatcaatatcattgcctccagtgttaccttggactgagccagaatgtgattttcctgatgaaaaagactcatactgggaattctagggctgccaaatcattttatgtcctatatacttgacactttctccttgctgctttttcttctgtatttctaggtacaaataccagaattatacttgaaaatacagttggtgcactggagaatctattatttaaaaccactctgttcaaaggggcaccagtttgtagtccctctgtttcgcacagagtactatgacaaggaaacatcagaattactaatctagctagtgtcatttattctggaatttttttctaagctgtgactaactctttttatctctcaatataatttttgagccagttaatttttttcagtattttgctgtcccttgggaatgggccctcagaggacagtgcttccaagtacatcttctcccagattctctggcctttttaatgagctattgttaaaccaacaggctagtttatcttacatcagacccttttctggtagagggaaaatgtttgtgctttccctttttcttctgttaatacttatggtaacacctaactgagcctcactcacattaaatgattcacttgaaatatatacagaaattgtaatttgcttttttttaaaaaagggggctaaagtaacactttcctacttatgtaaattatagatcctaaattcacgcaccccgtgggagctcaataaagatttactgaattgaaaaaaaaaaaaaaaaaactcgaggtcgacggtatcgataagcttgatatc

SEQ ID NO: 2300 - DNA, 968 bp, Homo sapiens
  misc_feature (953)..(954): n equals a,t,g, or c
  misc_feature (963)..(964): n equals a,t,g, or c
  misc_feature (967)..(967): n equals a,t,g, or c
ggcacgagccatgtgaccccaggtgagtctctgcttctctctgaacaggtacccttctctcagccagcttgagggttaaagtggatgctgggtgcacagcaggccttgcagggtatccagtgccccacctggcccccgtggaggggaactgctctgagttttgcaggaaggatgatccgatgctgctggagattcctttccatggaaatggccgctccccaggtcccagaggaaatgaaggcctgggtgcgtcctggctgtggcacctcacctcctgggcctccacctcttgctctcaggacccttgtggggatgagagaggggcgtggaagggccttaggcccagcactgcatgagtaggatctgcctttgggtctgatgccttcagatcagatgtgcctaggttcttccttttctgttcaccccgtgggcctggcagacctcgagagtttttggggcctagactgggaggctcagtggtgcaacggttgggatgcagggtcactgtaagtcagacaagcggcctgcagctcaagcctcagtgtcctcactgtggarggcggctcactcctcagctgacgtctgacaargacggagttagagaacctcctgtgtgctgagctctggccaggagcttccaccttcctctccctgagtcctggaaggtggtctcagtgatccctattttgcagatgaggccactgaagccggggaagggcaatgacttacccaaaatcatgcagaggcagcagcaggattagaaccagctcatcttcccaacctgcctgggcaatgtaatgagactccaacagaagaagaggacagcggcaaactgccttttcagaccctaaagcaagtgtaatattggctgcctttgttctgaaaaaaaaaaaaaaaaaactcgagggggggcccggwacccaattcgccctatagtgagtcgtatacaatanntcctttttnnccnt

SEQ ID NO: 2301 - DNA, 1532 bp, Homo sapiens
ggcacgagaccgtacatagatgtccaggtcaagttcttccttgtagttttggaaagaaatgacaaaagcaaatgacctctgagcaaatttttttttttcctgctccaatgggcttgcttttatggctcaggtgcttagctggtgtgctaaggagacatggctgctgttgggcatagctctcagatcatctctctcctgcccacagccaaactggtgggctccatgctgaactgaatgacctgaatactcgacctcaaatgactaaatgccacatagagctaatgtacacttttgttgggtgtgagtggaggatagttgagtaggcatgtggcacacagaggattgagaggcagctattatactctatttcccagggcctctggattaagtagaggtgggttaggattgacatgttgagggtgatgtggtattcttaattttgcactgagtaacagaaggtcttcaacaagtgtaatcagacccagtttatgtgtcttcctagattcacttggctctgtccaaccctagatcttagctgcttgtgccatggagagattctggccacctgctgtgtgagcctccctcagggtgaggactgggcttcggcctggcttccatggtacctgctgcagagggagctctggaggctccagtatccatgactgccccaactatacctattaaactacggctgttcacattgcttcctcctgaaatgaaatggcatgccttaggccatgaggtctgacttcctctgcagcttcctggaaggacttagcaaaccatttacccaaataaagtataggcgatagaaattgaaacctggcgcaatagatatagtaccgcaagggaaagatgaaaaattatagccaagcataatatagcaaggactaacccctataccttctgcataatgaattaactagaaataactttgcaaggagagccaaagctaagacccccgaaaccagacgagctacctaagaacagctaaaagagcacacccgtctatgtagcaaaatagtgggaagatttataggtagaggcgacaaacctaccgagcctggtgatagctggttgtccaagatagaatcttagttcaactttaaatttgcccacagaaccctctaaatccccttgtaaatttaactgttagtccaaagaggaacagcttctttggacactagaaaaaaccttgtagagagagtaaaaaatttaacacccatagtaggcctaaaagcagccaccaattaagaaagcgttcaagctcaacacccactacctaaaaaatcccaaacatataactgaactcctcacacccaattggaccaatctatcaccctatagaagaactaatgttagtataagtaacatgaaaacattctcctccgcataagcctgcgtcagattaaaacactgaactgacaattaacagcccaatatctacaatcaaccaacaagtcattattaccctcactgtcaacccaacacaggcatgctcataaggaaaggttaaaaaaaaaaaaaaaaaa

SEQ ID NO: 2302 - DNA, 1874 bp, Homo sapiens
  misc_feature (1593)..(1593): n equals a,t,g, or c
ggcgcgactttttgaaagccaggagggttcgaattgcaacggcagctgccgggcgtatgtgttggtgctagaggcagctgcagggtctcgctgggggccgctcgggaccaattttgaagaggtacttggccacgacttattttcacctccgacctttccttccaggcggtgagactctggactgagagtggctttcacaatggaagggatcagtaatttcaagacaccaagcaaattatcagaaaaaaagaaatctgtattatgttcaactccaactataaatatcccggcctctccgtttatgcagaagcttggctttggtactggggtaaatgtgtacctaatgaaaagatctccaagaggtttgtctcattctccttgggctgtaaaaaagattaatcctatatgtaatgatcattatcgaagtgtgtatcmaaagagactaatggatgaagctaagattttgaaaagccttcatcatccaaacattgttggttatcgtgcttttactgaagccagtgatggcagtctgtgtcttgctatggaatatggaggtgaaaagtctctaaatgacttaatagaagaacgatataaagccagccaagatccttttccagcagccataattttaaaagttgctttgaatatggcaagagggttaaagtatctgcaccaagaaaagaaactgcttcatggagacataaagtcttcaaatgttgtaattaaaggcgattttgaaacaattaaaatctgtgatgtaggagtctctctaccactggatgaaaatatgactgtgactgaccctgaggcttgttacattggcacagagccatggaaacccaaagaagctgtggaggagaatggtgttattactgacaaggcagacatatttgcctttggccttactttgtgggaaatgatgactttatcgattccacacattaatctttcaaatgatgatgatgatgaagataaaacttttgatgaaagtgattttgatgatgaagcatactatgcagcgttgggaactaggccacctattaatatggaagaactggatgaatcataccagaaagtaattgaactcttctctgtatgcactaatgaagaccctaaagatcgtccttctgctgcacacattgttgaagctctggaaacagatgtctagtgatcatctcagctgaagtgtggcttgcgtaaataactgtttattccaaaatatttacatagttactatcagtagttattagactctaaaattggcatatttgaggaccatagtttcttgttaacatatggataactatttctaatatgaaatatgcttatattggctataagcacttggaattgtactgggttttctgtaaagttttagaaactagctacataagtactttgatactgctcatgctgacttaaaacactagcagtaaaacgctgtaaactgtaacattaaattgaatgaccattacttttattaatgatctttcttaaatattctatattttaatggatctactgacattagcactttgtacagtacaaaataaagtctacatttgtttaaaacactgaaccttttgctgatgnkgtttatcaaatgataactggaagctgaggagaatatgcctcaaaaagagtagctycttggatacttcagactctggktacagattgkcttgatctcttggatctcctcagatctttggtttttgctttaatttattaaatgtattttccatactgagtttaaaatttattaatttgtaccttaagcatttcccagctgtgtaaaaacaataaaactcaaataggatgataaagaataaaggacactttgggtaaaaaaaaaaaaaaaaaaaaaaaaaaaa

SEQ ID NO: 2303 - DNA, 1471 bp, Homo sapiens
ggcacgagcttcctgaaagcttaatgcccaaactgattgatttggaagattcagcagatgttggggatcagccaggtgaggtaggttattcaggctctcctgctgaagctcctccaagcaagtcaccatcgatgccatcactaaaccagacatggcctgagctgaatcagagcagtgaggatactgctattgttcatccagttcccattcgtatgactccaagcaaaatccacatgcaggaaatggaacttaaaagaactggcagcgatcatacaaatcccactagcccattacttgtgaaaccatctgaccttttagaagaaaataagataaattcatcggtgaaattcgcttctggtaatactgtagcagatggttacagtagttcagactcttttacttctgacccagaacagatcgggagcaatgtaactcgtcaaaggtctcattcaggaacgtcgcctgataacactgcaccaccacctccccctccaaggccacagccctctcattctagatcatcatctttagatatgaatcggacctttacagtcaccacaggacaacaacaggctggagttgttgcccatcctcctgcagtgcctccaagaccacagccctcacaggctcctggtcctgctgtgcatcgcccagtggatgccgatggcctcataactcacactagtacctcacctcagcagataccagagcaaccaaattttgcagatttcagtcagtttgaagtatttgctgcatcaaatgtaaacgacgaacaagatgatgaagccgagaaacatccagaagtcctgccggctgaaaaagcttctgatcctgcaagttctcttcgagttgccaaaacagatagtaaaactgaagaaaagacagctgctagtgctcctgccaatgtgagcaaaggcacaacaccacttgctccaccacctaaacctgttcgaagaagattaaaatcagaagatgaattaaggccagaagttgatgaacatacacaaaagacgggtgtcttagctgctgttcttgcatcacaaccttctattcccagatctgttgggaaagataagaaagctattcaggcatcaattagacgtaataaggaaaccaacaccgttttggccagattgaatagcgaattgcagcaacaattaaaggatgttcttgaggagagaatttccctggaagttcaactggaacaacttcgaccattctctcacctataagccaattgccgttaactgtgaacatacttgtttttaagtggttttgggttcaaagccaatttggagacctagacattcagctcactgcttaactcaacattaaattttatgattctgttttgccctatatgttcaccgttgtatttaagtatcttttattttttaatttcgacaataaaaaggtcaggatggcgttttctggaaaaaaaaaaaaaaaaaaaaaaaaaaaaaaaaaaaaa

SEQ ID NO: 2304 - DNA, 1117 bp, Homo sapiens
gggtgtgtggctcagacacttgtgtcctcacctgccacagtgggaatgctttgtgcgggaaatccagaagttgcaacaggaagacaagtgccagaagaacaagctggacagctacttttgggaaaatggattcaggagggaggagacatgatagcaaacccacgtatgtgtttgacactttgagctatgtgcatgcttcatcttgataaagataaaacctttaaaaaaatcacttaagtagtatagaaagtataaaataaagtttatcagctattatactaaataatactgaatgcaagctctatattttactaagtgtaaatgggctgaatttgactgttaaagaacagtttatcagattggattattcaacctgtatttatcatttttgctacaagcatctattgccctttcttctagtaaagtacctgatttggatttgcggatttccccggttagatgagattggcagaactgctcatcaaagttcacggctctccaagaaactgacatgtgactctaagctatgccattaggacgtctgcttcctagacttttattcttcctcatagtgacatacagactgggagtactcgggactgagtcatcccagctattacaatatgaggaaactgtccatctgttctgccacctggacctcttcgctacccatttgctctactttctttactggaaaattttcctactggttctatcttacgaattccttttctgttttaactagtgagtctatttcagttgcctatagccaatgaactctaactgatacagttgaaacctccaataagattcagctggataagagaaaaagaaagattaaaatgaaaggtgtgtgtataaatgtatgtaagtaagcaagcaagataggtaaaaacaaaaagaaagcagaacttaaaatccacaaaacagaatttaagttgaaaggcattagaaacaaacagggtcattatgaaatgataaaatatatgattcataaggaagatgtaacagtctaggatgaaaaacaaaaacaaaaacaaaaaaaccctagcaaacagaacctcccagtctcagcagtcaaatacaattgcataaaaaaaaaaaaaaaaaactcgag

SEQ ID NO: 2305 - DNA, 1121 bp, Homo sapiens
ggcacgagtgcaaattatatagccagctctgcctgccaccttaagcttattgcttgccctctagctcttccccccataagagttaccccataattgcaaagtagctctcaaagttccaggcatcaaatctgtgtttgaggcaggaaatagatggaagagttggtgatagcaagcttttcttttatggtcattacgtttatcaggagtttaaaagtctttccagaaacattcagccaacattgggccccatggacacttttagttgcaacaaagtatggaacaataagcatctggcatagaggaatagaaccttccaaaccaatatctcgcaaagaataccgtctaaggcagggattggccaactttgtctgtgaaagggccagataggctctggtggctatatatagtctctgttgcaatcattcaactttgctgctctagtgcgaatgcagacatagacaacatgtaaacaaatgggcctggctgtgttccagaaaaacttcttcataaaaattgtaagtgggtcagactaactgtgggctgtagtttgctgacccctgcttagaactttatttcgctttggttaccaaatggtagaccagggggatgatgataattaagtaggtgctatttattgaatgcctactgtgtattcgtcacctgaagctgaacacattgccatctctaaaacatatttgtattttcttatcaaggaagaaagcagtttgttgagaaggcaagtagcggaatctgccacaacacaaattaagacttgattaaaagagatacaaatgcatagatggaaagccttgctattgtaaagataccacttttctccaaattaatccacaaattccatgcaattccaatcaacatttctgtagtttttttatagaacttgagcagtggatctgctcagtggattttttatggaacacatacatgtaaaaagtaaaacatcaatacttttggtagaaatttaaacttgaagcaggacagagcttaaaaaataagacacaaaaaacgtaagcaaaaaaggaacattttgatgaatcggttttcattaaaatgaaaaactttcatagaataaaaaggctcattaaaaaaaaaaaaaaaaaaaa

SEQ ID NO: 2306 - DNA, 2322 bp, Homo sapiens
ctcgtgccgaattcggcacgagcggcacgagggagacggttgggagaaccgttgtggcgagcgctacacgaggcaaacgacttctcccttctttgaactggaccccgcgagcaccagagtcggcgtaactatcgcctgacaggcatttaaatcaaacggtattgagatggattgggttatgaaacataatggtccaaatgacgctagtgatgggacagtacgacttcgtggactaccatttggttgcagcaaagaggaaatagttcagttctttcaagggttggaaatcgtgccaaatgggataacattgacgatggactaccaggggagaagcacaggggaggccttcgtgcagtttgcttcaaaggagatagcagaaaatgctctggggaaacacaaggaaagaatagggcacaggtatattgagatcttcagaagtagcaggagtgaaatcaaaggattttatgatccaccaagaagattgctgggacagcgaccgggaccatatgatagaccaataggaggaagagggggttattatggagctgggcgtggaagttatggaggttttratgactatggtggctataataattacggctatgggaatgatggctttgatgacagaatgagagatggaagaggtatgggaggacatggctatggtggagctggtgatgcaagttcaggttttcatggtggtcatttcgtacatatgagagggttgccttttcgtgcaactgaaaatgacattgctaatttcttctcaccactaaatccaatacgagttcatattgatattggagctgatggcagagcacaggagaagcagatgtagagtttgtgacacatgaagatgcagtagctgccatgtctaaagataaaaataacatgcaacatcgatatattgaactcttcttgaattctactcctggaggcggctctggcatgggaggttctggaatgggaggctacggaagagatggaatggataatcagggaggctatggatcagttggaagaatgggaatggggaacaattacagtggaggatatggtactcctgatggtttgggtggttatggccgtggtggtggaggcagtggaggttactatgggcaaggcggcatgagtggaggtggatggcgtgggatgtactgaaagcaaaaacaccaacatacaagtcttgacaacagcatctggtctactagactttcttacagatttaatttcttttgtattttaagaactttataatgactgaaggaatgtgttttcaaaatattatttggtaaagcaacagattgtgatgggaaaatgttttctgtaggtttatttgttgcatactttgacttaaaaataaatttttatattcaaaccactgatgttgatactttttatatactagttactcctaaagatgtgctgccttcataagatttgggttgatgtattttactattagttctacaagaagtagtgtggtgtaattttagaggataatggttcacctctgcgtaaactgcaagtcttaagcagacatctggaatagagcttgacaaataattagtgtaacttttttctttagttcctcctggacaacactgtaaatataaagcctaaagatgaagtggcttcaggagtataaattcagctaattatttctatattattatttttcaaatgtcatttatcaggcatagctctgaaacattgatgatctaagaggtattgatttctgaatattcataattgtgttacctgggtatgagagtgttggaagctgaattctagccctagattttggagtaaaaccccttcagcacttgaccgaaataccaaaaatgtctccaaaaaattgatagttgcaggttatcgcaagatgtcttagagtagggttaaggttctcagtgacacaagaattcagtattaagtacataggtatttactatggagtataattctcacaattgtattttcagttttctgcccaatagagtttaaataactgtataaatgatgactttaaaaaaatgtaagcaacaagtccatgtcatagtcaataaaaacaatcctgcagttgggttttgtatctgatccctgcttggagttttagtttaaagaatctatatgtagcaaggaaaaggtgctttttaattttaatccctttgatcaatatggcttttttccaaattggctaatggatcaaaatgaaacctgttgatgtgaattcagttattgaacttgttacttgtttttgccagaaatgttattaataaatgtcaatgtgggagataataaaaaaaaaaaaaaaaaaaaaaa

SEQ ID NO: 2307 - DNA, 1330 bp, Homo sapiens
gtcctgagtccccagccagccttcagggtccccttggattgtgtagatgcagtctagcggggggccggagaagggctcaggtgggaggggcctcagcaggctcccagctcaggggctggcctggggggaaccctgggagccaggggctgactccagcaacactggcctgtctgcctgttctgggagggctgtgaggatgtcttgcagatgctctggatttctgcggaggcacctccattcctttctggctttttttgcgggggagggctttgggcctctttctttgagggaacaccgtcaaagaaagcctgggagatcgaggcttcagtgagccaggatggaaacgcgtgtcccaagtgtccggagcaggcggcagaggcctcagtgcggcaaacacagccccagagcctgtgtggcaccagcagcatcttagagccccaggtatatgctgagatcttatctcacgctgtcctccagtgtctggggggcccaaatgatggcacaggggcaagttgggcttgaagggcgcagatgcctgtgttcaaggaaggtggccaccatgggccgaggtctcacccaggaccccttgctctgctcctcagccttgcagtcacggcagcactatggtggactgcccatggccgtgtgactttgggggcaagtgggagggcgccctgaataatgattgcaaggacaacaggcagaggctaccctagagcaggacacagggtgtggtactgacaaccctagtgtcacctcaaatccatgtccccacactctgggcatgggtgggacttgtgaccctaccctgtcaggcggaccagtggcccaggagccatgaggacagttgtgtgccactggaagagaaactttttgaaaaaccctaaatcaggtagagaaagcaaaaaatctctggccgtaaaccgtgctctctaatttatcggcagcttctgtggatgacctctgatgagcccgggctgcgtccacgccctgggcaggtaggcgggagcttccctgcgtgggcctcatttcttgctgcagagaatcttttgcactaagtcatgctgtttcctcaaagaagctttgttttttgttaacgtattactcagagtcacccaagcctcttggctgagggtgaaggtgggacgggaggcgggagggggctggtggtgccgctcgtgcggtgtcaacgctgcagggagttgtggcaccttggtgccctctgagcacctggccgcctgctgtccccggtgcctgtgaaattcgtcatgccatgacccacctgcattaaacctatttttttaatgtgtaaaaaaaaaaaaaaaaaaac

SEQ ID NO: 2308 - DNA, 1100 bp, Homo sapiens
ggcacgagggccactgtgtcctgggacgtcccagaaggcaacatcgtcattggctactccatttcccagcaacggcagaatggccccgggcagcgtgtgattcgggaggtgaacaccaccacccgggcctgtgccctctggggcctggctgaagacagtgactacacagtgcaggtcaggagcatcggccttcggggagagagtcccccagggccccgggtgcacttccgaactctcaagggttctgaccggctaccttcaaacagttcaagcccaggtgacatcacagtggaaggtctggatggagagcggccactgcagactggggaagtggtcatcattgtggtggtgttgctcatgtgggctgctgtaattgggctgttctgccgtcagtatgacatcatcaaggacaatgactccaacaacaatcccaaggagaagggaaaggggccggaacagagtcctcagggaaggccagtggggacaagacagaaaaagtcaccatctatcaacaccatcgacgtttgagtgaagaaacacacccagaagagagatgcactaacaactggggatagggatggggtcagggggagcccaagatggtgatctgcccgagactcccagagggtaatgccactcccacaatctcaggcctggtacccatcctctttccactgtgagcagagccagaaggtaggtctgttcagagtctgtgcccctggacctggggagtggatatcagatgggatatctccttccattccccggtccaggggagagtcactagttgtaccctactccattaggtcccaaatgggggccccatttcacctgtatcaggactctgagcatccccagctgccccacatcttgcctctggccctcagagaggggtgtttctgtgggtactcctcttaccccagcaaataaaaggaattgtctgaccctagaggcagatgctgcactgcactactccaatgtcttccatggagcctcaggtgctccccctctcacctggcagccccttcagctgctagtgatatcacttgttggacatttttccaataaaggttcttggacaaaaaaaaaaaaaaaaaaaa

SEQ ID NO: 2309 - DNA, 1963 bp, Homo sapiens
  misc_feature (2)..(2): n equals a,t,g, or c
  misc_feature (15)..(15): n equals a,t,g, or c
  misc_feature (1871)..(1871): n equals a,t,g, or c
  misc_feature (1954)..(1954): n equals a,t,g, or c
gnaactctctatatngaatgctggtacgcctgcaggtaccggtccggaattcccgggtcgacccacgcgtccggatgaagcccatgccgctgtctgagggcaagtctatactgctgtttggaggggctgctgctgttgccatcctggcagtggccatcggggtagccctggctctgagaaagaaataggaggcttttcagaagagaaagacagaaggatgtaaggttggagttgtattggctggaatttgaacctccagcagctgtctggacatttgtggaacactctgggataattggggacttctgctcaacatggcagtggcatgttaggcatgttagggcttgaggtggggcattcacattcatctgactgtaaatcccaagggcctccgctcatgctaaattgagaatcttaggggtaaagcaccccctccaggaccgggtttctcagccttggcactagtgctgttctgaccattctctgtgttggggctgtcctgtgtgtggtgggctccacccactagatgccagtggcaccccctcccagagatgacaaacgaaaatgtctctagacattgccaaatgtcccgtgtgaacatcccctattgagacccactgctttagcgagagagggtttacttaggaagaattgggatagaaattcccagctgagagaacttagctgtgggctcctcagctactgacttcttagctcttaatccccttagaatttcatctttctcgatgagcaggctctgcacccactctttttttgccccccgccctcatcctggagtgtgagggtgctcgcccgtactctcagctgcctctcagggactgcactgttcctcttcacccccaggttcctgctaagatcccacgggcgagggcttgctctggactcagtctgtcaagtccccgaagcttcctgcagctccaccttgtaaaaatgctgcctttgggaatcttcgaaatatgtacacagagaaaatcacatgaaggagacctggggtccccacttgtgagtgcaactgcaagtaactctggctagagagacacatgtgtcttgtgtcaaggcaggaggataaccyggatgaccttctgaggtctcttcagcccttttcgctagtggtcacccaccaccatggttacttgccagcaacatctctattgctggatggtccctgtctataaccttgggctagtatattttttccaatatgggaccttagtcttactactgatgagttctatgggtctcttgctagggggtaaggatttttattcttgggcttatagagccagttagatcataattcttatgaaatagagagtgtcctaaatatcactgaaataaaaagtaggaaaaagaagcttgaattttaagactgaggctgctctgcagattctagtttggctttcagagttcaagagtggtggcatcttcacctgaattcttcaatgccagggtaataaaccaaaatagtcctaatcagtatatgctagttgagcatcggcataattttctttcctctggctgatcccagccctaaaggaagggtagacccgtgtctttccagccctaaaggaagggtagacccgtgtctttccagccctaaaggaagggcagacccgtgtctttccatgcccgagggccacgacgtcactatgcagggcacacgtggcttggtttaaaaaggtcatcttagatttatcttagtaaatgtaataaattattttttagatcttgaaatttataataaaaatactttacctaccctgatcaccaaaacctgatgttttaaatgtgctttctttttgaaatttatgttttcaaataaaatctccctaaagcaatatttaaaaatnggtmaaaaaaaaaaaaaaaaaaaaaaaagggcggccgctctagaggatccaagcttacgtacgcgtgcatacgacatcatagngcgatccct

SEQ ID NO: 2310 - DNA, 960 bp, Homo sapiens
  misc_feature (928)..(928): n equals a,t,g, or c
  misc_feature (956)..(957): n equals a,t,g, or c
  misc_feature (959)..(959): n equals a,t,g, or c
ggcacgagctcactgcagcctcaacctcctgggcccccacaattttcccacctcagcctcccaagaagctgggagtacgggtgtgtgcaaccacacccaggtaagttttgttttttgtgtgtwtttttttgcatagaagaagtctcactatgttgccctagctggtctcgagctcccgagctctcaaactcctgccttgacttcccaaagcgctgggattataggcatgagccaccacacccagcctctaaacactttgcatgtgtttcctaaaaacaaggaattatgtgggaacataaccacagtaagacgrttaaaatcagaaaattcaccttcatacaatactattagctaacctcgcccggcctagccttgacatttttgaggagtcggttctgcagaatgtccytcagttkgggaacatctgttgsttttctcaggactagrttcagtttgtgcatttgtggcaggaataccccggaagtgatgctgtgctattcttagtgcatcatagcaggagacctatgatgtcagtgtgttactggggatgttaattttgatcattggttgagatggtgtccaccagctgtcttcacagcaaagttagtattttctctttgtaaaataagtattatgtagccgggcacagtggcttaggcctgtaattccagcactttgggaggccaaggcgggcagatcacctgaggtcaggagttggagaccaccttggccaacatagtgaaaccccatctctactaaaaaatacaaaaattagcatggcgtggtggctggtgcctgtagtcccagtgactcaggaggccgaggtgggaaactcatttgaacccaggaggcagaggttgcagtgagcagagatggtgccgttgcattccagccgggcgacaagagcgawactccttctcaaaaaatnaaatataataagtattaaaaaaaaaaannana

SEQ ID NO: 2311 - DNA, 1691 bp, Homo sapiens
  misc_feature (2)..(2): n equals a,t,g, or c
anccgccggtgcagcatgtactgccgtcgcgtgacaggcccagaggctttgggcaaagcgagccccgccggtccttctttgaatccttcatccggaccctcatcatcacgtgtgtggccctggctgtggtcctgtcctcggtctccatttgtgatgggcactggctcctggctgaggaccgcctcttcgggctctggcacttctgcaccaccaccaaccagagtgtgccgatctgcttcagagacctgggccaggcccatgtgcccgggctggccgtgggcatgggcctggtacgcagcgtgggcgccttggccgtggtggccgccatttttggcctggagttcctcatggtgtcccagttgtgcgaggacaaacactcacagtgcaagtgggtcatgggttcsatcctcctcctggtgtctttcgtcctctcctccggcgggctcctgggttttgtgatcctcctcaggaaccaagtcacactcatcggcttcaccctaatgttttggtgcgaattcactgcctccttcctcctcttcctgaacgccatcagcggccttcacatcaacagcatcacccatccctgggaatgaccgtggaaattttaggccccctccagggacatcagattccacaagaaaatatggtcaaaatgggacttttccagcatgtggcctctggtggggctgggttggacaagggccttgaaacggctgcctgtttgccgataacttgtgggtggtcagccagaaatggccsgggggcctctgcacctggtctgcagggccagaggccaggagggtgcctcagtgccaccaactgcacaggcttagccagatgttgattttagaggaagaaaaaaacattttaaaactccttcttgaattttcttccctggactggaatacagttggaagcacaggggtaactggtacctgagctagctgcacagccaaggatagttcatgcctgtttcattgacacgtgctgggataggggctgcagaatccctggggctcccagggttgttaagaatggatcattcttccagctaagggtccaatcagtgcctaggactttcttccaccagctcaaagggccttcgtatgtatgtccctggcttcagctttggtcatgccaaagaggcagagttcaggattccctcagaatgccctgcacacagtaggtttccaaaccatttgactcggtttgcctccctgcccgttgtttaaaccttacaaaccctggataaccccatcttctagcagctggctgtsccctctgggagctctgcctatcagaaccctaccttaaggtgggtttccttccgagaagagttcttgagcaagctctcccaggagggcccacctgactgctaatacacagccctccccaaggcccgtgtgtgcatgtgtctgtcttttgtgagggttagacagcctcagggcaccatttttaatcccagaacacatttcaaagagcacgtatctagacctgctggactctgcagggggtgagggggaacagcgagagcttgggtaatgattaacacccatgctggggatgcatggaggtgaagggggccaggaaccagtggagatttccatccttgccagcacgtctgtacttctgttcattaaagtgctccctttctagtccttcaaaaaaaaaaaaaaaaaaaaaaaaaaaaa

SEQ ID NO: 2312 - DNA, 385 bp, Homo sapiens
attcggcacgagtaataatcaacaccctcctagccttactactaataattattacattttgactaccacaactcaacggctacatagaaaaatccaccccttacgagtgcggcttcgaccctatatcccccgcccgcgtccctttctccataaaattcttcttagtagctattaccttcttattatttgatctagaaattgccctccttttacccctaccatgagccctacaaacaactaacctgccactaatagttatgtcatccctcttattaatcatcatcctagccctaagtctggcctatgagtgactacaaaaaggattagactgaaccgaataaaaaaaaaaaaaaaaaaactcgagggggggsccggtacccattgg

SEQ ID NO: 2313 - DNA, 1634 bp, Homo sapiens
  misc_feature (1215)..(1215): n equals a,t,g, or c
  misc_feature (1218)..(1218): n equals a,t,g, or c
  misc_feature (1223)..(1223): n equals a,t,g, or c
ttttttttttttttttttttttttttagcagaacaacatgcttttattttaccatcatgcataaaaaggaagacaaatatgccaatggtacacttccaatttgtcagagcaatttcacagtatttaagcaatttaggaaaaaagatatatcacttactaagttgttaccagggaaaattatcatgtaagacaatcaattaaaccatacttttgtagattatttttccatgaaggcaatttgacaagcctaacaaagaccaagttgttcaaactatgtttctaggaatatagtttaacagaaacaagaacaagttgaaaactgttatgactattcatatgtctctatattgtacaggcaagtaagactgttgttcttccaaatgttcccaattgaaatcaaaagaatatctgtacagctcaattttcacaataagtttagaatcagaaaaaaaaattttactaaatcctaatgaaataacaatcttcacataaattaggtcacaaaacaagtaagaaagcattcaaagttgcgctgtctttcttttaaagaaccccttgtctaggcaacatatttaacactttaaccccttcattctccctgaaaagtatttttccattcatcatcattggggagtaagtactccttcctcgagagctcttaacgacagcacagtcttcactctaggcccaatttttacctggcccatgcctctagccttttgttcagtttctcctgcttagggcacctttcatcccatctagatgtgtctctctttaactattctaggagttgataaaagggctaggaagtaggaagttgggaagaaggggaggggcgtaagagctctagcactctattttacaggccaacttctttgcctctgaaaatgacagagccaaaatgaaataaaaaccttgcttttacaaatgtttctgagctatcacttttttaagagaggattgggaggctaaggagggcggatcacgaggtcggggttcgagaccagcctggccagcatggtgaaaccccgtctctactaaaaatataaaaattagccgggcgtggcggcgcgcgcctgtagtcccagctactcgggaggctgaggcaggagaatcgcttgaacccgggaggtggaggttgcagtgagccgagatcgcgccaaagcactccaacctgggcgacagagcaagactccgtcctccgtctcaaaaaanaanttttnaaaaggaaaacagggagagagagggaccttggcaggagccaatgtagggcaggtagcaatagaaagtgactagaggtgaaggaagagcaatgaagtaccataaatcacacagaacaagtggctcactgcttttctcctctgagttcattaacgtccagtaactgtccacagggcatgtgcccatactgctcaatgcagagctgagtaggtggaacaggctcccaaagctagaaatccaagtgacagcaaccagttcagaggccctgggaataaacagggtccaagcagtgcagataaaggcagtacaatctacagtatcatttgcttggcttacaagtagtgtgaaggatgacctcgtagcatgtgatattccagaacagcatgaaggtcatatggaagtggactcgtggc

SEQ ID NO: 2314 - DNA, 889 bp, Homo sapiens
ggcaaggaggagggccgccgttgctggagttcagcttagggaaggaggactctgaggaggccccgagccgcggagctttcgggggaggcgcccgcgcagacgcgaggcccatagccaggaccaccacctagctgattcttgatgacattggtcgggaaaactcgcctttcacggcccggccaaggggcatttgggtgcttttgctgcccgtggctgtgctcagcgttgtgggaagcccctgggaggccgaatgtgcaggatcaccgaggggaaagtgagcttgacaggaaaagaactacagcctgtgtgggtcccctcccgacaattaaaattgcaccataactccaaagatgaaacgctcccagaaagaaaaggcaaagacccatcggaaacaaaagagcaactttcaccgcctgatacatacacttcatgacatccacattgagacaaaatctcgccgtgtgacctacaacacctctcgttcaaccccacctacttggggtcgaatacagattttatctcatcaaacagaaaaattcttaacagaaaaaggaatcccaaaaatgactggtaatataattctggctgcctttatggtagtcagtgcagcgtctgcagatgcctctaaggagtccgaaaccaagtccgaagtcaacaacaagcaatgatggcgatggcgattctagttaataaaaaggggggagatgtgggcggcaagccacccaggcaccgaggcaagagacagaggacacgagctgttccagtataataaaatataaaacaagaatagttataccagatatagatcttagatatgattatatacgaatatcattaatcaaaaaaaaaaaaaaaaaactcgagggggggtcctggtacccaatggtcc

SEQ ID NO: 2315 - DNA, 1578 bp, Homo sapiens
  misc_feature (1071)..(1071): n equals a,t,g, or c
acgcgtccgggcacactctcctctgactcgggccctcgctgagctgtagagggaagggggaaagcctcccagactctctgtcaccatgtgctacggcagatgtgcacgatgcattggacattccctggtgtggctggccatcctctgcattgtggccaatatcttgctttactttcccaatggggaaacaaaatatgcctctgaaaaccatctcagccgcttcgtgtggttcttttccggcatcgtgggagggggcttgctggtgttcctgccagcatttgtgtttatcgggctggaaaaggacgactgttgcggctgctgtggccacgaagactgcggcaagagatgcgcgatgttttcttctgtcctgcctgctgcgatcggagtcgcgggatctggctactgtgtatcgtggcagccctgggcttggcggaaggaccactatgtcttaattcttcgggccagtggaactacacctttgccaacaccgatggacagtaccttctggatacctcctcatggtcccagtgcactgaacccacacatgttgttgaatggaatatctctctgttttctatccttttggccctcagtggaattgaattcatcttgtgtctcattcaagtaataaacggagtgatgggaggaatatttggttatcactgctctcgccaacagcgatatgactgctgaaagaaccaccccaagacagaaccacaaccttcctctatttcattgtaatttatatattctacttgtattaatttgtaaaactttgtaccactgtatcatactttacatattctacttttataaatgtgtataaagactggcatcttcatgtgatgtcaagcgtagcaaacaaaccttttttttaggactgtgaaaacaaatgaggtcatttattgactgaatgacggtcggtcctcagcgtactgaatgaactctggcctgagtaatgtttttgagaaacattataaggataaatatcatttttccatttctattgtatgtgcatttccatttctattgtatgtgcatggaagatgtcaagttacttttttttttttnttaagaccatgaaggagaaaatccaacaacttgaaaagatgtgggtttttttttttcactgtttatatggtgtttcccattcatatgcctgccaatctctgacaagaggccattaggaactgttccgagttttgcaagagacagatacttgcccagagcaggacggctggttgaaaatgcccgagctagaggaaggactcaacaatgttgtcaggagtcctgccagatcttacctttctctgacacgtggaaaactttttgtccttcaaagacaagtgccaaggctcacatcttgaaaaagaaaaaggcctggatactcggacaagaaaaaatgggaaacggaataaaacagttaatcaacatcatgggaaaatgggggagaaggaggaagggcaagaggaccgtgaggaaataaccccaaaacttgatggttgaaatccaacaaaataaagtatccattgaccatgtttaaaaaaaaaaaaaaaaaaaaaaaaaaaaaaaaaaaaa

SEQ ID NO: 2316 - DNA, 2082 bp, Homo sapiens
ccacgcgtccggcatttcagtaataatgtagaaaaatattattaaaaaaagaaaaaaaagttcagaaccacaaccacgaggagcctcactgtgaaagaggcgcataataaaactactaaccagcggaggttatgctattttgagaaaaacaattaacctggttccagagaaatgttttatgtaaataataaactaattgtggcttgtaaatgatttgtatgtgatcctgtccactaaaatcacttaacaattctacaataagcttctgcatcaaagcctgctgcttgctctgtgccgaaataacaccgaatggaatctcctcatctcttgcctgttagccatgtgtctgattcagggcatgtatcttattactcatttttgtacatgtactctcgtttggttttgtaacttgcaattttcaaaccaaagttttatagtcactttttctcttcctgtttcgctgtagtcactggtgttcctttcccccgcgccccccgactgtaactcagtctgtgggagagacgccccggaaaacgtcgtgtactgtatattacctggtcatagctgattttcgcctccacagttcggtttctaggagccaataaaacttccccttgcctcctcatctttccaaattgttctttgaatggaggcgtttgaactcatgaacagttgcttggggatttgtgaaaatcctatctaggtttccgtgtttacagttctttggcgcagcctcgggcccttcccaggtacttgtgcgatgattgtattcactgctggatccttgaaggttcaaaaaaaagtgccatttcattatttgatcatcaccaaattctctctgcaaatggacgtaatcagaacattgtaacttatctatttatagtgatgagattaagactggagtgccatcacctcgggtgatgaattagcttttgctgtgtgtgtgccttccaaatcatgccataactgtaatgttgaatcggacagagccctacgtgcccgagggcggggcctacctgcccgagcgcgagcccttcatcgttccggtggagcccgagcggacggcagacgagtacgaggactacggcgccgacgagcctggcgacgagcagcctccccacgggcgctggcggcgcgccctgccccgcggcgcccggcagtgaacctgagaccgcgcaccgggcggccactctggggggaggtgttgggattttcatttacaggtcagacagagcagtgtacgtcttatctgcgatgtttcttccggcgttgcttcatccaagagtacgctttctgactgtagagaaccttgtgtctgcaggaaacctagctcgctgcacgcagtcttgtagacatttttgcctttgcccttgaaatgcttgcaaaatactttgctcgcgaaagctgcaaggagagaacgtgccttgtgacttcagttagcacaaagggcagcctcagtgaaactcttaggttaagcagtaagtcctggaacccagaactactgtatatttccagagggcagttcatcttttccaatacttgtttgcaattcagttacaccacgattaaagtaattcccctcctcaaaccaaaaaggaggaaaaaaacaactccattgcgattatttatcttcctcttctatcttctgttatgcattagggcatagaatgctcttatacacctcctttaacaaacacaaaccttaagccatgtagctgaaattactgtatcaactggatacagttccatattggcttaaacctccttggtttagacacactaacatttatgccaaattgcagaatattctgcagagatggaattgcatgtttgggttgtatatttagtatgaactatttttttttcagaacataatgtttcttagttatcaaaagcagttggaaaatgtttgcaagactatgaacatagaattgctgcttttatattttaactgcagattgtgaatttcactgccttatattatttatttctgaaacaaaagaggcatttttcaataaaactactgaaaatttgaaaaaaaaaaaaaaaaaaaaaaaaaaaaaaaaaaaaaaaaaaaaaaaa

SEQ ID NO: 2317 - DNA, 1671 bp, Homo sapiens
ggttttcaaaaacgtatttaggtgacactatagaaggtacgcctgcaggtaccggtccggaattcccgggtcgacccacgcgtccggatggcttccccttctaggctcccctcttactggtattcacgatgtcagggttgtgtgagagcagacgtgaggtgttccagatcatgcatatggacgtagaattgcttcggttattggaattatggatggctgtattatttcgttagcgtgggctgtcagaaatctgccaaatttaagagtaaaaaagaaaaagaaaagtcaaaatagagaggtgaggggaggaaaaccacttccttactggtattcgtaatcttccatctagtttttgatcaaaaagtgctcatttatttgtaaaaatccagacgtggtacctgaagcatagaatgttgtctttccaacacattcctcatcgttgtttccccagaaaatcgttttaagagcttatcaaagcagactaggtatccatattcagtttgacctaaatttttaaaataaacatttaaactccagtttttgtgtgtttactgtgcatcagcactcatgcaaatccgggatcagaaagaaactggggtttagccatctccgaatttccctttgcacatggggtacagtgggtttcaatatgcacttgctgcagagtttttgagcaccttatgggagtaagtagtgtttatttattataattaaaaagaaagttaaagctgcatctctgtagaatatttactttgcagagtgtaaagctgtagtatcttttccagcaggatttactctttcattcttaattcttggttgagaaaatcttcagtgatttaacattcctttatatcctcttaacagtgtcaaatctggggtagaagggaaattttttcccaaaaagggctccatctttgttacctttctgatcactcttagaaatctagctatgatcagtagatggtaacagctcatggcttcctgtatcagcactggagaggttggttgtgaggattaaaatctactcttttccctcagtgacatgtaattgctatgtttttggtaagaaagtctggtcagaaaaaatgtgaaagatcactcaaaaccaaagccagttataaggagtactgtctcctgttggtttaccttcacctcagaactacaagaatattacagtacctagtgaatagtctaacatttctaccagtcttttcagtagcctattggtcttggcatttcttggcactatgctctctgttcttggtgatgtcttcttgtttgtgactttttgttgttttttttttaaagtaactaaatgggactataaatgtagatgtgtatcagtaccaataagtttttttctgaaatccctgaattcccgattcctattcaagtcttttaaacttgttattttcttgctaagtagcaaagaacttttatttttcactttcctatatacctaagtatacctaaaaagtacggacactgcgtttcaatggactgtattgcgtgtagttttttgctgaaaactttttctgtaaacacaatggccttgttcagttttgttgtaaactgacttaccataagatgcactgttgatatgctttctgatgtgtgtttcataagggtgataaaataaagcttaaaaataaaaaaaaaaaaaaaaaaaaa

SEQ ID NO: 2318 - DNA, 1142 bp, Homo sapiens
ccacgcgtccggtcgggtctacgtgggcaatgtggcctggatgcacgtgctggcggcccgggagctggagcagcgggcggctctcatgggcggtcaggtgtacttctgctacgacgactcgccctataagagctacgaggacttcaacatggagttcctgggcccctgcgggctgcgcctcgtggagtcccgcctgctggtgccctactggctgctggtgcttctggccgctctcaacgccctgctgcagtggctgctgcggcccctgtttctctacgcccccctgctcaacccctacacactggccgtggccagcacgaccttcaccgtgagcaccgacaaggcgcacgccacttcggctacgtacccctgttctcttgggaggacagccggacccgcaccatccgctgggtgcaggccgtggagggctcagcccggtgacgtggagctggggcctggagcccggtgcgtggcacgtccgtccatccaggtccagggccctctagccctcggggcagaggggctggtgctacaccagctcgcctgccttgcagctccccgtgcttctaagccacgagccgcgagtctgcatcctcacgcctcttaagtcctggggcagggttttgggacaggcacatcttcactctcgacccaggccgacggctggctggggagtgtccgatggcccgattgttctcaactgccctgtcccatctggcttttcaagcaggaagtgagaaggggtcccacgggcttcgtgcaggccttctgaggtctgggcatggattcaggcctggattcggcctgaagatcctttctgactcctcctaccacctggggccctcttggagggtcatagtctcattttttcaggcctggattcggcctgaagatcctttctgactcctcctaccacctggggccctcttggagggtcatagtctcatttttttaaaaaacatttatcgccttttgacagctctctgctcttcaatgacgcctgagcaaacctgcagctttttccttcttcccacctctccacccaaatcacttcctacagtattgtgctgtacccagccgagccctggattaaagctcctaatccaaccctgaaaaaaaaaaaaaaaaaaaaaaaaaaaaaa

SEQ ID NO: 2319 - DNA, 900 bp, Homo sapiens
acgcgtccggtcatttgaggataatggataaaaaatataagggcattccatttagaagacacaaaataaaatctcttaatgtttttaaagataaaaattgatatgacttttttgatcaccatatttaggcaatacttacaatggagctgtgctcctttacttttgcctgtccttccccaaaaagggacaagttcaggagatagtacccaaaatttgtttattttaagtgaggaaagtatcattggaatatgtgtttatcctgatgttgaatcatatttaaaatgcactagagagatacctatctgaaacatatcatttaatgaattcccttagaaagcaattatccattattttattttctgttacaatttcaatttccacaaaggcttttaaactatgggtttaattgtattgattaccccctatagctagaagcagaagaaattaattagggctaccctattagctaacttagtatgctccatgttcagttctgtctttgacccattcttttgatctataaatatttttaaactcttcctgaccaacacaaacaatgctattttaaagtgaatggatattagccaaaatgtgcttgactggttggtaatgcttttgtgattttgtatatgtctccggttgcttctggggctgtgtggtcatgggtgttgaggtttactatttccaaacatcataaataccttgtattgccagtagacaattgaatgttgcatgttgcccaaagggattccatgtttaaagaacacacattattaataaagtaccttagaagaaaaaaaaaaaaaaaaaaaaaaaaaaaaaaaaaaaaaaaaaaaaaaaaaaaaaaaaaaaaaaaaaaaaaaaaaaaaaaaaaaaaaaaaaaaaaaaaaaaaaaaaaaa

SEQ ID NO: 2320 - DNA, 1326 bp, Homo sapiens
tcgacccacgcgtccgctcaattttttaagttagatttttcacagagtttgctattagtaaggcagctctctaaatgcaactgtgggttttcccattttgttctcttttacatcattaggtgtgagttccttagcttccccttgtaggaacaagagtaatgaaaggtcaccagagtgtgttttgggattttttttttttctttgtttttggagggcgggagaaggagacaaggcaaaagagaaattgtcgaatgaggaaggaaaggggggaaaaatcttcaagacgaaatttaaaataagccactgagacttaggtctctcagacatagccatatgaactccattctcggtgaattctgttcgggtttatttttcacatatccttttcttcctttaagaaatttttggtcctccaaaggattttgaagcatgtatattataaggtttagcatatttgttcatttgtctctgaagggtgtggtcagttcagagcagtttattttggacatatcctgaagcctttgttttgaactcagaaatgcaattgcaggaattggtaaaccattggtccaccagctttcctagactgctgaagaaggacttgattctctacgtgcagtcctaagtcctttaatgacactcttatgacaaatgtaaagatttactgtacacgtgataaattttattaagagtgcctcaagccaaaatgaaagtaaacttggccatatgtgaagaatgttgaaatgtactattgtgcattcctgtgctactgttgtgtttcaggtgtcacttagcttctgtaactgagatttctcaaaatgtgtcgaccgctttgcttttcttaaaatcttaagattccggatccaccatggttttgtttagtttcttattgtctacaaaacttaaaatgaaaataactgtttttagaatactagtggcagtcattgacttaaccatttacctgttgaagacctcatgcctagtagtggggtgtggtctggtttcccccagctacaggacaaccagtattcctaaatttataccctttattgaaatttgctcctgactgtcagaagtcaggccatctgatttatagaggattccaaaacaagagtttttgaaaaggcttattttatacacctatattatatggagaaacaaatgtttttattaaatgtttcgctgaccaaaataattttaaagaaattaacgttacttatatctttcaggaaaaataattgtagcagctgatctgtaaatgactttagaagctattttagtaatttaaataaatttactttcttggtttgtaaaaaaaaaaaaaaa

SEQ ID NO: 2321 - DNA, 621 bp, Homo sapiens
  misc_feature (364)..(364): n equals a,t,g, or c
  misc_feature (370)..(370): n equals a,t,g, or c
  misc_feature (426)..(426): n equals a,t,g, or c
gcgcccctagccacagatccgaggacaggcaagaccggcccagaagccacaccctcggctgaacccagtaaaagcacaacgctctccaaaaggcagtctccaggcaaaggcggcaggccagaccctaccctcgggacgactggttccagtgaggacaaccccttctcctatgatgaatacactctccggaagcgggggctgctggtcgcactgtgctkttcatcactggcattgtcatcctcacgagtggcaagtgtaggcggttaccccaattatgccggaatcgtaacaggtgagaccattggaaktaagggccggcaactgaattgatgggcaccccaagactgagtccccaccggctcancgtgcncagccacctccctccccttcgcgaagcctgcagaatagtcaataaagcccagcctnagagggaagacccgcatggagacagagctggggctgatggcccaaggcccctcccctccccaccctgcccacccagaggactgcccagctccctgggcactgctccccaagttacccattgttttcagatgaaaagtaaagcactgtggtccttgaaaaaaaaaaaaaaaaaaaaaaaaaaaaaagggcggccgc

SEQ ID NO: 2322 - DNA, 2144 bp, Homo sapiens
gggtcgacccacgcgtccgagcagatcaacagtacttttccatcttgctgccccaatctccccagcaggccacaggcaatgtgaaatatccctctagccaaccgacatttcctgactgccagtgttgcccttttcagcaaatgccaattccaagttccattgaatcagaactccatggctccttgacacatgctgttgagtgctgactgtgtgttctactgaaggagtaaaacactgactatccaaagagaaaaggatattttgttttataatgatcatatattattgtktattgtkttcttcttcccytttctatgcaactgtraaattaatgaacagagtggtatttggaaatggtaatacatttgtcactgatttgtatactgtatacagcattgggaaaatgggtgggggctttctaatatgataccttctttttaataaccatgacaaaaattgcataagaatgagaaaacaatgttacatttttacattccttcatattaaccttgtacaataacttcatttattttttccactcctttaccattaagttttggttatttataatttatcagccacatgaccaaatggatttccttgtgtctgtttccatgatttggccaaattactaaattcatgtatttcaatcaaatatttatgtgtatgatttaggccacatctctgtgtatgccgctgaacttcatttaagcatcatatacttcatttctttagtgaccacttggataaccacagtaaaagccctgtggggcctccctggcatttccattgggatttgtttcctgcattttatgtccctgccctatgtaagtaggtcttgatttcttaatttatttcatgtcccagtctatatgatagaggaaactcaaagcaggattctaataatctcaaagatcatttcaccaaaggttacccatttacataatcattttcattttgacatagaagcaaaacatgggataactttttttttcattgcaaagtcttgaktttcatcattaaacacacagcagacctttccttcattgtgctaccaggacatatctttgtcttcaattccctttgaagagaactttatttttgtttwcatatactcaagtcatttgtaattcttgaaattcccagtcattttctttctgacagcagacacaaatttaatgcatatttcattttacctttcgggtgaatgattacatttttttattacttttcatttgatcaatttatttggaagggatgtttatcaaaaacctatgtcmctgcttccacagaggaatgaaattaatmcttagatggtggtacccctgcctgtacctttgagtacattcacttaggtgttttgttcaacttctgatttaacctttaattgattcagttgaaacatgttatgtaatcaccaaatgtagagaaaccaaaacaaacaaacagtgaaaataatgtgttttgattcagcatacatacatttaaaacatcaggacattttaactttgggttctcttgacctgggatttggccagaaggaggcttaaagktagaaattgctattcttttagaataggttgggtgggttggggggcaagggtgtctatttgcagcctagatattttgagaagaaaattgttttatataagaggaaagccatgaccacctttctacctcagatccatcttcatccattgtgtttgaaatagctttatgctgctgcagtccgcaaaatctagagctttttcagaccacatcaaacccaagaaaatcacctatttaaagaaaaaaaaatttccctgaactctgaactacmagttgtagatttggtgtcttccttgktctttctttgaaaaaatacgtattcatttttttctgcttgtaattgtgtgcaacatgtcttctctctgctattaaagaaaagctacagaaarcactrcattgtaamcttctaagtaataataaaaaagaaatatatcacaataacaacaaggggaaataagtatgtagttcttttgaaatatgtggtaaagaactaatcatagactatcatctaatctggttacatgttgtatttttcatcctgaataaaagtaattttaacacaaaaaaaaaaaaaaaaaaaaaaaaagggcggccgc

SEQ ID NO: 2323 - DNA, 1187 bp, Homo sapiens
  misc_feature (1076)..(1076): n equals a,t,g, or c
  misc_feature (1124)..(1124): n equals a,t,g, or c
cccacgcgtccggagaaatggcatccggcttggggagactgcttttgcgggggcctcgctgcctcctgtcaccggccactcccactctcgtcccgccagttcggggcatgaagaagggattccgtgccgccttccgcttccagaaggagttagagcgatggcgcctgcttcggtgcccgccgccgcccgtgcgccgttcagagaagcccaactgggattaccatgctgaaatacaagcatttggacatcggttacaagaaaccttttctttagatcttctcaaaactgcatttgttaatacctgctatattaaaagtgaggaggcaaacgcaaaaccttggaatagagaaagaagctgttcttctgaatcttaaagacaatgaagaactcgctgaacaagggacgtctttttcaaaaacttgcctcacacagtttcttgaggatgcatatccagacttgcccactgaaggcattaaaagtcttgttgactttctcaccagtgaggaagtggtatgtcacgtggccagaaacttggctgtggagcagttaacactgagtgcagaatttccagttcccccacctgttttacagaagactttctttgcagtgattggagccctgctacagagcagtggccctgagagaactgctcttttcatcagggacttcctaattcctcagatgactggaaaagaactttttgaaatttggaagataataaatcccatggggctactggtagaagaactgaagaaaaggaatatttcacctcccgaatctagacttaccaggcagtctggaagtaccacagctttgccagtgttttttgttggcttatactgtgataaaaagttgattgcagaaggacctggggaaacagtgctggttgcagaagaagaagcggctcgagtggcacttaggaaactctatgggttcactgagaacagacggccctgggactattccaagcccaaagagaatttaagagtagaaaagacttcactgccagctaacctgtcaaaatagtggcaacctggaattttttgagccagagaatgagataaatgttgaaaatnttcgaagctggatatatttccaaattgtaaataaataggtcttatttntcataaaaaaaaaaaaaaaaaaaaaaaaaaaaaaaaaaacaaaaaaaaaaaaaaaaaaaaaaa

SEQ ID NO: 2324 - DNA, 1233 bp, Homo sapiens
ccacgcgtccgcctggtttccccctggctgacagtgccttggttcctgtcctgttggaatgttaccattgggcctcctgacagcatctgggtgacgccgggagaagcctccctcatcatcaggttctcctctcccttcgacgtccctcccaacctgggctatttccagtactatgtccattactgggaaaaggcgggaatccaaaaggttaaaggtcctttcaagagcaactccatcgtgttggatggcttgagacccttaagagaatactgtttacaagtgaaggcgcatctctttcgcacatcctgcaacacctctaggcccggccgcttaagcaacataacttgctacgaaacaatgatggatgccactacgaagctttcaacaagtcatcctcatcgccgtgggagtctttctgtcgctggcggcgctggcggggggctgttacttcctggtgctgagatacaaaggctggtgaaatactggtttcactctccgccaagcatcccatcacaaatcgaagagtatctgaaggacccgagccagcctatcctagaggccctggacaaggacacgtcaccaacagatgatgcctgggacttggtgtctgttgttgcatttccagcaaaggagcaagaagatgttccccaaagcactttgacccaaaactctggtgcggtctgctagcctgtggggtaagggctctgagccgaggaagctgctgatgtccatgtcagcactttatggaatccggtcctccattttcctgtccccaaaaggccgtcagtgcctgtgaagatgtaacgggtctcatgggggcgacaagcttattgatttttttcttcaaactaagagttttctaatcatacgcgtttttagaataattctacagatatgtccccgaaagattaagatttctcttaaacactaaaaagacatgtaattatttgttagcaaatgggcgtctggcacgcctctgacactttctcgtcagcagccaggacacgaagtcccctccttgatgaacccctcgggcagaccatgtcacctgtcccagcctgccccaagaagggacattaagtggcccttcttcatatccaaacacctggcttgaaatgtgattagccctgtaaatagtttcacagagattaagcctttttttcccccaagttaggaataaaagactataattaactttttaaaaaaaaaaaaaaaaaaaaaaaaaaaaaaaaa

SEQ ID NO: 2325 - DNA, 1197 bp, Homo sapiens
  misc_feature (1182)..(1182): n equals a,t,g, or c
tcgacccacgcgtccgctttcatctgagtcaaatagtatgaaagtgattgagttaaaaactgaaaaacctggggcacctgggtggctcagtgggttaaaccactgccttcggctcaggtcatgatcccagggtcttggaatcaagtcccacatggggctctctgctcagcagggagcctgcttcctcctctctctctgcctgcctctctgcctacttgtgatctctctctgtcaaataaataaattctttaaaaataaaaactgaaaaacctgataaatacttagtatgttaagcaaatttatgaatcgatttagcacatttgcatgtaaatttcccttgagttacccttctctattttatgagcccttgaaaaataatccttaagtttttaaatttattgaaggctccaaactcccagcactagctagatattacaaatatgaaacaaactgatttcaaaatgaccaagatttgggggatctgataactcagccgttttcagaaacaactggagagtgaagagatctctctcacttttgcaaacatgcctgactactcacaactggcttttagcactggctttgttgaatgcacaaagcattcactttactgattggacatgaatgcttcaatatttctgtgtattcatatatctgctcagaaaataaaacatatgctttggtatttgttttttgcaactgagattgtggaggatattcaccctcagtttgatttcttcatcttttgggacatgaaagactactctgccagctctttaaaaaacaggtttgaattaattattttcaataatatataagcaaacaaaatccccttggcagcaattcacattgcattagaatttgagtgatactttggcatttctgctttctcttcttttccggataattgcacagttctcttgctctctctaaactggatgtgtaatgtcttctttcttttgaaaagtccttgagtatcattaatgtgataaaccaagttgtatagcagtaacaaaaacttgtgatactatgagtcttttgcaatgttacctcagctaaaagaggtatctgtgtgtgtgtgtgtgtgtttaagttgtttttgtctagtgtttcaaatgttttcagcaaattgtgtaatatgaaaagtttcaataaaatgttgaaataaaaaaaaaaaaaaanaaaaagggcggccgc

SEQ ID NO: 2326 - DNA, 5077 bp, Homo sapiens
  misc_feature (5055)..(5055): n equals a,t,g, or c
  misc_feature (5071)..(5071): n equals a,t,g, or c
cgagaacaattaccatggtgatgcggttttggcagtacatcaatgggcgtggatagcggtttgactcacggggatttccaagtctccaccccattgacgtcaatgggagtttgttttggcaccaaaatcaacgggactttccaaaatgtcgtaacaactccgccccattgacgcaaatgggcggtaggcgtgtacggtgggaggtctatataagcagagctcgtttagtgaaccgtcagatcgcctggagacgccatccacgctgttttgacctccatagaagacaccgggaccgatccagcytccggaytctagcctaggccscgggacggataacaatttcacacaggaaacagctatgaccactaggcttttgcaaaaagctatttaggtgacactatagaaggtacgcctgcaggtaccggtccggaattcccgggtcgacccacgcgtccgagccgctcgcgctaggagagcgggcttcgggcacttgacatggcggcagtggcggcgactgcagcagcgaaggggaatgggggcggcggtggcagggccggggccggggacgccagcggcacgcggaagaagaagggcccggggcccctggccacggcgtacctggtcatctacaatgtggtgatgacagccgggtggctggttatagcggttggtctggtccgagcatacctggctaagggtagctaccatagcctttattattcaattgaaaagcctttgaaattctttcaaactggagccttattggagattttacattgtgctataggaattgttccatcttctgttgtcctgacttctttccaggtgatgtcaagagtttttctaatatgggcagtaacacatagcgtcaaagaggtacagagtgaagacagtgtcctcctgtttgttattgcatggacgatcacggaaatcatccgttactccttttatacattcagtctattaaaccatctgccttacctcatcaaatgggccaggtacacacttttcattgtgctgtacccaatgggagtgtcaggagaactgctcacaatatatgcagctctgccctttgtcagacaagctggcctatattccatcagtttacccaacaaatacaatttctcttttgactactatgcattcctgattctaataatgatctcctacattccaatttttccccagttatacttccacatgatacaccagagaagaaagatcctttctcatactgaagaacacaagaaatttgaatagttcctgctttctgcacctcccaccaaaacaaacttttcaatgatcaaaaaatgctgcagattttttgagttcccaatacgtttcatagaaaataagtaagaactatttttaaaatattcaaacaaaactaaaacaaaaatccagtgtcacatgggcctgagattttattttagaaaaaggttgttacataaaacaccctggccagttcatttcagcatgctctttcaaccagaagttcttaatatttatgatggcactagaaagggatttggcattttatgtccttctgtgtccttcatgtatctgatcaatgaagacctgtaacactaagtacttgagagttacagtctgaataatgaagtcgtaccagctgaatagcccagcttgcagtatagttatgtttcagtctgcagtgtgtttagcattcccttgtcaaagtgcttgactgcatgctggaaactttgtatttttgaagcggcaaactctgttctctggaatgctctgaagttatggctgggacctatcccctcacatctaatgaatgaattataaaatgtatatgtctatgaagcttcggggtagtgcctgtaatcagaaaacaacttagaacccttttgtttgtttccaattgagtcattactgcctgccactaagaaacgtgcttgaatctaataagtatgtgtgtaccgtaaagaatatatcttatctggagctcagcctcaatcatgtcttaacaaaatgacaggtctcagaaagggggagctcaatagctcaaaagtgacaagtccttttcacagcaccgttctcagaacacctctgagtaacgtgtttgccagtagctattctcactgatgcactgatggccctgaagaagcggatccagtcacataggaaaggaggctgtgttagtgaaagcacatggaaggtgttgctttagaaaggtagtcaggaaaaacattcaggaatagatttatacaccattattgttttatttttaaattttcattcactcttctgtttggatacttttgctaattaacgtcctatgttaatttccaccaagctataagtccatagtcagtaaaacattccccttgggctgtcatgagctaaaagcagtgtcatctccgcatgttggagcagccaagaaatagtttggtactaccgacatygtctaatccatgtcacatcctcatacaatttaattgctcaaccatgcatttaaaactcctcaagaaaggattggtactgcaactgtaggtaaactgaaaaaaaataagaaagaaagagttggatgaaaatgtgaaagcccaagtttagatgtgcattaagtattaaatagcacagtatcttcttcatggagccttttttcctcccccatcccctgcagctgcctttttttgggggcagggtgggggttgatgttgaactttaagagtttaaaagtttagcttattgagtagttgtcatttaaaatataattgcgaatatcagaaaactcatactggaaaactaaattttttttttctcttgagacggagtctcgctctgttgcccaggctggagtgcagtggcgcgatctcggctcactgcaagctccacctcccgggttcacgccatcctcctgcctcagcctcctgagtagctgggactacaggtgcctgccaccacacccagctaattttttttgtatttttagtagagacggggtttcaccgtgttagccaggatggtcttgatctcctgacctcgtgatccacccgcctcagcctcccaaagtgctgggattgcaggcatgagccactgcacccaacccctggaaaactaaatttttaagtgcttatttttatagaagtttgaaaatttaatgcaggcaggtgtgtaataaattatttttgaattgaacattaaaattctgcttcttaaagtcagcactcaacttggacatgttgaaattagaatctattcttgtatttgatagacaaaatatgtgggaaagattttttgcatgacttttctctcattttattcttccataatgtatttctactataaaatagaatcaacttgggttatatttgtcatttactttgttctgttagattttttcagttgtttttggaaaaattctagaaatcaggatgaaaaatgcagcttttccagggttgctggactgggggttttatttgggcctccttattataatttgtcactacttataaaaaacattctgttgcaaacagtggtgttgcattgaattgaactttggcaatgagaacacagcacacagctcccttttcaaaaagggtctcaaccccagtgtgtatttttgtacatcaacatttagaatacttatggcagataagtaaggcatgtcactgtgtccttcagtaacctctctcagtaactggtttctttatccctaacatgaattcatttctcctttgaagtcatttattattttataaattgagaacaaccacaccaccaaatgtcacaccttcttataaagtgtgaacaaggaaggtcatgtttttgtgggtattttgtcagacttagaggtttcatttcagggcatagtcaaaggcatcatcctcccaactacccacttgattatgtatttcagatccctccgtgggggccttcttctgacagagaattctttgaggtccgcagtagtgcttttgtcagcacagactgctaatctacatcttgctgcgttctgtttgctgaggttgggcttattcatttaacacgtaccaaccattatccagaggcaccatggagagttagtcatggaataaagcactgtccttgcagatgaaaaaagtctccagagcagacttctgacaggaaaggtttagatgctggagagttgaagaggtgtaagaagagatcgtgccctcatttttcacttatttttttggttattcatttataataaaaggttggcattgatatggtacaacctgcaaattacttgcagttctgagtttcagataaaacattataaaacattaaattcaatacatactgctcctttgaaatttgggtaaaaaattgtacaaccgtatatatagtcatttttgtattttttctatgttgtgaaaaccaaaattgtaattttataagtctttgattcactaaaattatataatttaaatgtattttttgtatatttagaaataaggagtccagagactacgcttaactttctatgcatgcatttgaaagctgtttttacctgataatgtagtaataagttgtattcataaaatactgatctgtgttgcatttcaaaataaactggtgtgtgctctgcctggatttgaaataccaaaaaaaaaaaaaaagggcggccgctctagaggatccctcgaggggcccaagcttacgcgtgcatgcgacgtcatagctctctccctatagtgagtcgtattataagctaggcactggccgtcgttttacaacgtcgtgactgggagatctgctagcttgggatctttgtgaaggaaccttacttctgtggtgtgacataattggacaaactacctacagagatttaaagctctaaggtaaatataaaatttttaagtgtataatgtgttaaactagctgcatatgcttgctgcttgagagttttgcttactgagtatgatttatgaaaatattatacacaggagctagtgattctaattgtttgtgtattttagattcacagtcccaaggctcatttcaggcccctcagtcctcacagtctgttcatgatcataatcagccataccacatttgtanaggtttttttttttanaaaccc

SEQ ID NO: 2327 - DNA, 1634 bp, Homo sapiens
  misc_feature (1056)..(1056): n equals a,t,g, or c
gctcaaaactaatgtttatgccatgtactttccctcagatgtgacttcattaattcagccatgtgaccagggtatctttagatcaatgaacagaaaatataaatccactttcttgaacagcatgctggcagcagtgaacagaggcatgggtgcagaaaattttcaaaaggagtttagtataaagaatgccatatatgttgttgccaatacttggaacacagtgacaaagacacagttgtgcatgtctggcacaacctctggcctgcaactgtgtttagtgataatgatgaactgtgtgtgtgtgactttgaaggattctgtatgtcaagtgaaaaaaaatgatgtctgacctccttacatatgtaaaaaatataccttcagagttcagcagtaagctggaagaagtagatgtcaaagaagttttgaactytgataataatgcttcagttattcattcattgactggtggtaaaatagtcgawwtggttttgaatcagggttatgatagtgatgaagaaggtcaagataacaccacagaaaaggtgcttatagaagaagacatggtgaaaatgtatggtgggcatattgaaggattacggcagcgtgcattaacaacagaatgaaaaaccatgtcagtttttaaaattgaagagagacttctgagctaaaaaccatgttaatgaggcagatgactccacaagaaccatttttaaaagccttccagcagaatgtctcttcatcccccgtaggatccacttcctggtccctcagctgcttctgatgtttcttcttaactaaaaaacacagtttatagtaacctttgaataaaaacacagcatcataggtgaagactgaaagcctgctgttgtttgtagctgctttttcctttttttttttttgagacgtagtttcactcttgttgcccaggctggagtgcaatggcgtgatctcggctcactgcaacctccgcctcctgggttcaagcagttctcctgcctcagcctcccgagtagctgggattacaggcgaccaccaccacgcctggctaatttttgnatatttgatagagacggggtttcaccatgttgaccaggctggtcttgatcttctggccttaggtgatccacttgccttggcctcccaaagtgctgggattgcaggcatgagccactacccccggctctgtggttggttttgtttaatagctgaaacaggtatcctggtgatgctactatgctgcttagttgtcctgacacattattttttcagtgttaatggtatgtcatatttttactgttaagtacttaatgtatgaataaatgtaagaaaacaattgcctattgttagcatgtagattaagagtcaggaatgatgactcttgttgacatgggtggctgagatagtgacacctttgctttctgatggttcagggtacacaaactttattacaggcacaaaattatcaaaaatacggtataaaattaccttaaggctatgtatataagggatgtgtgtatgtgtgtatacacacaaaaataaattttgtgtttccacttggatcccctccctaagataactcattgtgtacatgcaaatattagaaaatgcaaaaaaaaaaaaaaaagggcggccgc

SEQ ID NO: 2328 - DNA, 1648 bp, Homo sapiens
ggcgggagctcaggaccggcgccttctccttgcttctgggggtcgtggccttgctcccgctgtgcggaaaagaatccaggcccttccacgcgcgtgtgggtgcgggggccccgaagtgctcgtggttccccgctaggtctccgctggggcaggaaccggaatcatgggtgggaccaccagcacccgccgggtcaccttcgaggcggacgagaatgagaacatcaccgtggtgaagggcatccggctttcggaaaatgtgattgatcgaatgaaggaatcctctccatctggttcgaagtctcagcggtattctggtgcttatggtgcctcagtttctgatgaagaattgaaaagaagagtagctgaggagctggcattggagcaagccaagaaagaatccgaagatcagaaacgactaaagcaagccaaagagctggaccgagagagggctgctgccaatgagcagttaaccagagccatccttcgggagaggatatgtagcgaggaggaacgcgctaaggcaaagcacctggctaggcagctggaagagaaagaccgagtgctaaagaagcaggatgcattctacaaagaacagctggctagactggaggagaggagctcagagttctacagagtcaccactgaacaatatcagaaagctgctgaagaggtggaagcaaagttcaagcgatatgagtctcatccagtctgtgctgatctgcaggccaaaattcttcagtgttaccgtgagaacacccaccagaccctcaaatgctccgctctggccacccagtatatgcactgtgtcaatcatgccaaacagagcatgcttgagaagggaggataaaaactttcagaatgagcaaaacaccatcaacgttaattccagagatggaacattttttttcctagtgagaaaacaacccatttgaagagaagaccactaatgagaagaccactaaagagagacatcaagaatggattcagcagaatcatttcacgttttgaacagcagcagtttgaagggccaaagccttgatcagggatcagtcattaaaggacactcttgagtattagtaaaccctcttatgatgattaaaagagaagggcagccctctccaccttttggtactttctattcaacttgcactgaccataaaatgtttctcttctgaacaagccccatcatttggtgaacctccaccctaacaaagtaggatggggttgggggctaaattaattggagtggggcgaggagagagccagaaaacatagatccgagggcagcagtgctgggtggagagagccagaaaacagatctggaggcagcagtgctggatggaattgtctaggctgtggcatgttggttttgtctttcttttctcctttgattatgtaagagctatttcattataacttattatggtgattatacaggcaagaagacaaaaaggagagaaaatgtacctcttctactggaataatgtttatgattacaagtgagataaggtatttttatcaatatgaaggcaaccttggctgataaaacctctatagtgaatactcacatctttacttcactcactatcaataataaatatattttctgacaaagaaaaaaaaaaaaaaaaaaaaaaagggcggccgc

SEQ ID NO: 2329 - DNA, 1726 bp, Homo sapiens
ccacgcgtccggaccatttaaatgaggctccattcaacacaatgcacatttaaatgaggctcagttgcaagagaccactgggcttagcgttttcaatttgtcaactataattctataattgcttttagctaatcatccaaatgattacatgttgtaatggaggcagaagaccctcgtatgcatcatttggtctctttttctcagaggaagtgctgaaggatcaaatgttttgtgtgtctctgtgtgtgtgtgtgtgtgtgtgtgtccgtgttttaacttggtgttctgacgcacaacaccataatagacctccattttcatcaacggtgggggaatgagaacaacgccccccatcccaacatcccccttttccagagggggaaactgagacccaagtttccctcttgccaaggccacaggactagaactagaatcgtcagttttctgatttccagatcaggactatttctgcttatgccattttaatttttcatttctttccataaaattaaatgaccttcttcaagaaagatttaatggtcaagatgcgatttggtaaaaagcttcctcaaggatttttttcttattacaaagatgagaccggctgaggctgagagatttgcaagcagtggtatgtcattatccccagctcagttttttgtgtaattggtgtgaagagattgctgctgatgaatcagcctgctgctcaacagaaaataatgattcttttgtgacgtgagtcagtgtacgtacgtgtacgtttgtggttgtttatgaaaggtatgtgtgtacataaaatgcttatcaagatggataatgtcattttaaagtggtaaataataaaaaatagtcctgagcaaaactgattttacaattgcctgagaatgcagcacttcattttaacactatgcaatggctagaaattgatttttttttttttaatccaattaagcctcaaggttggttatccatttaaaaggtcggatgagttaaacaatgacagtaccttcagttcgtgctaataaatttgcacagaacttcagcacttacatcgtgtgcctcacagaggcatacattttgtatgtgcacaacactgaactaccaaagtcccagcagtggtacagatacaccagcagaccctggaccccaactgggggagtccctgagctgaccgccggccctatcacctcttccacttagatccccgaagcacccccaccccagagtgctgagtccttccatctacctggcccccttttctgtggccccaagagcactgggagatgaaaagttgcctctcatttaaaaggggggaaaaagatgtattcactacttggttttgtgtgctgctgagtttataatgtaacaaataaatcctgttttaaaaatagtactttatagtgtgtatttactgtgtattcatagtgcattaagaaaaagacttcggccgggcacggtggctcatgcctgtaatcccagcactttgggaggcagaggcaggcggatcgcgaggtcgggagatcgagaccatcctggctaacgtggtgaaaccctgtctctactaaaaatacaaaaaattagccaggcgtggtggcgggcgcctgtagtcccagctactagggaggctgaggcgggagaatggcgtgggccagggaggtggagattgcaacactgcactccagcctgggcgacagagccagactccgtctccaaaaaaaaaaaaaaa

SEQ ID NO: 2330 - DNA, 1175 bp, Homo sapiens
  misc_feature (740)..(740): n equals a,t,g, or c
tcgacccacgcgtccgcccacgcgtccggcctccacagtttcctgcggctgtctgcacacccagaccagagcagttcctgcctttgcgctttgcaccattttccttggtgaacttctattcatccttcaaagcccagcagtaatcatcctttagaaagtcttctttcagagggaaccaaaaaggtaatcgctggagacagacagatgctgcctgaatgcctgttgtgttgtgtggttgtgggaatgttacttcacctctccgtgcctcagtttcctcagctgtaatggggatggtaacagtgtctaggggtactgcttggaatgcacatagggagatgagtgaaggcccagcactagaagagtgcaggcactagcagagtgcaggcgcaattgctgctgggaccagcaggtaactcgcatccaagttacagtgcccagccccagcagcagcctcagcaccaggcagagtgtgctcagcamtgtggggggccaagaggacttgagggccgctggtctgtgattctctcatctcttttgaggttmarsamttggcgtctctcctagaagctctggggaamctgacaaatcctccagggaggacacagaacgccaggaagggctggctcggggtgcaccaagatggctgccccgagamaccgtatctgagggcttgggtggaactgaggagaggccggctgggaagsccatccgggaggaaarggcagacggctamggcagcntcaggtggtacagtttgccccggaagtgaggtagagaagagagcgggaggagagagggccacatgcctctcagccatggccctgaatgctggcttggctgagcctcatctttgctgtttgcagaatggggagaattgtgcctgcccagcctcctccttggggactccaggggcccaaagaaccaagagctgcaaatgtcctggtggccttggaagtttatggatggtacagatctggggtggagggcatggccaggacagggagggctgtcagagagagggtctgtgggtttgtggagtgtggggatcagtcgctgactcattagatgaaccaggagcctgcatgctacagcccacctgccaaatcttgcccccacctgctttttaaaataaagttttattggaacatgaaaaaaaaaaaaaaaagggcggccgc

SEQ ID NO: 2331 - DNA, 1014 bp, Homo sapiens
ccacgcgtccgggctgccccccaagtgtcgtttgttttactgtagggtctcccgcccggcgcccccagtgttttctgagggcggaaatggccaattcgggcctgcagttgctgggcttctccatggccctgctgggctgggtgggtctggtggcctgcaccgccatcccgcagtggcagatgagctcctatgcgggtgacaacatcatcacggcccaggccatgtacaaggggctgtggatggactgcgtcacgcagagcacggggatgatgagctgcaaaatgtacgactcggtgctcgccctgtccgcggccttgcaggccactcgagccctaatggtggtctccctggtgctgggcttcctggccatgtttgtggccacgatgggcatgaagtgcacgcgctgtgggggagacgacaaagtgaagaaggcccgtatagccatgggtggaggcataattttcatcgtggcaggtcttgccgccttggtagcttgctcctggtatggccatcagattgtcacagacttttataaccctttgatccctaccaacattaagtatgagtttggccctgccatctttattggctgggcagggtctgccctagtcatcctgggaggtgcactgctctcctgttcctgtcctgggaatgagagcaaggctgggtaccgtgcaccccgctcttaccctaagtccaactcttccaaggagtatgtgtgacctgggatctccttgccccagcctgacaggctatgggagtgtctagatgcctgaaagggcctggggctgagctcagcctgtgggcagggtgccggacaaaggcctcctggtcactctgtccctgcactccatgtatagtcctcttgggttgggggtgggggggtgccgttgatgggagagacaaaaagagggagagtgtgctttttgtacagtaataaaaaataagtattgggaagcaaaaaaaaaaaaaaaaaaaaaaaaaaaaaaaaaaaaaaaaaaaaaaaaaaaaaaa

SEQ ID NO: 2332 - DNA, 1827 bp, Homo sapiens
ggcacgagcargaggaagatggcggcgtccgcagctgccgctgagctccaggcttctgggggtccgcggcacccagtgtgtctgttggtgttgggaatggcgggatccgggaaaaccacttttgtacagaggctcacaggacacctgcatgcccaaggcactccaccgtatgtgatcaacctggatccagcagtacatgaagttccctttcctgccaatattgatattcgtgatactgtaaagtataaagaagtaatgaaacaatatggacttggacccaatggcggcatagtgacctcactcaatctctttgctaccagatttgatcaggtgatgaaatttattgagaaggcccagaacatgtccaaatatgtgttgattgacacacctggacagattgaggtattcacctggtcagcttctgggacaattatcactgaagcccttgcatcctcatttccaacagttgtcatctatgtaatggacacatcgagaagtaccaacccagtgaccttcatgtccaacatgctctatgcctgcagcatcttatacaaaaccaagctgcctttcattgtggtcatgaataaaactgacatcattgaccacagctttgcagtggaatggatgcaggattttgaggctttccaagatgccttgaatcaagagactacatacgtcagtaacctgactcgttcaatgagcctggtgttagatgagttttacagctcactcagggtggtgggtgtctctgctgttctgggtactggattagatgaactctttgtgcaagttaccagtgctgccgaagaatatgaaagggagtatcgtcctgaatatgaacgtctgaaaaaatcactggccaacgcagagagccaacagcagagagaacaactggaacgccttcgaaaagatatgggttctgtagccttggatgcagggactgccaaagacagcttatctcctgtgctgcacccttctgatttgatcctgactcgaggaaccttggatgaagaggatgaggaagcagacagcgatactgatgacattgaccacagagttacagaggaaagccatgaagagccagcattccagaattttatgcaagaatcgatggcacaatactggaagagaaacaataaataggagactttagcacacttcacttgtttctagaagtccagaattttggacctccacgtgaaagaactgttcttacctctgaactgggggctcccataagggataattttcctcagagtagcaaagtttctcttattagagaaatcttgtgactcagatgaagtcagggatagaagacccttggacctggcaggttaatgctgattattccttggcctttcccttgtatttatgcaaggaaggatatactgagctgatactsttccaagcctacaacttcaagttttatcatttgaactcaagtacttttgctgctgaggaatggaatcaaaagaacgtagtctcctggtraccacctcagatctctattattaggctagatgtatagcctctactcccccagcttcttgctcttgaccctgcactgtaagttgcccttctattagcagccaaggaaaagggaaacatgagcttatccagaacggtggcagagtctccttggcaatcaaccaacgttgctatgaaatatgcctcacactgtatagctcattataggacgtcaggtttgttgaaaaaagtgggcaagacatgattaatgaatcagaatcctgtttcattggtgacttggataaagactttttaattttaaaaaaaaaaaaaaaaaaaaaaaaaaaaaaaaaaaaaatt

SEQ ID NO: 2333 - DNA, 734 bp, Homo sapiens
gatttcatttaggtttttgttaggatttccattaataattgtgataaaattttaacttgggttacagtttaaatatctggaaaattctttcacagaaagttacctcattcttcagtgatactggctaagtgaattataaccagttgcttgatggtatatgacatttttgcagcttatttgaatgtttttaagtttttaattatattgctttctattgtaggccttgaaccaaagacaatgattgatttaactgaatttagaaatagcaaacacttaaaacagcagcagtacagagctgaaaaccagattcttttgaaagaggcaagtgtggtagtcagttgattattttcttggctgaactatagagaaatactaataatttatactttgcagattgaaagtctagaggaagaacgacttgatctgaaaaaaaaaaattcgtcaaatggctcaagaaagaggaaaaagaagtgcaacttcaggtatactcagttattctaaacctttaaaaagaattattgataagtgagttgtctggatatgaaattatttgtgtcttagctgtttttgctgttctattgtggatctgctacaaatttaataaatgacaataataacctgaaggagataagtgagtgtcagtgggttcagtcctgaatctgaaatagacaaaaacaaaacaaaacaaaataacaaaaaccaagcaaacaaaaaaaaaaaaaaagggcggccgc

SEQ ID NO: 2334 - DNA, 1392 bp, Homo sapiens
acgcgtccgctctccagcgtggctggcagcggggacggtgcgccggggcgcaggcccaagagtcgcgtgcgcggccccttgcaccatccccccgggcccacccccgggccgcgctgattgggcaggtagggactctgcccagcggaaagttttgggtgccgggaggaagtctaacctttgggagactccaagacagcagctccgaggtcggcgggggtctgggtggccatggaggagccccctgtgcgagaagaggaagaggaggagggagaggaggacgaggagagggacgaggttgggcccgagggggcgctgggcaagagccccttccagctgaccgccgaggacgtgtatgacatctcctacctgttggccgcgagcttatggccctgggcagcgacccccgggtgacgcagctgcagttcaaagtcgtccgcgtcctggagatgctggaggcgctggtgaatgagggcagcctggcgctggaggagctgaagatggagagggaccacctcaggaaggaggtggaggggctgcggagacagagccctccggccagcggggaggtgaacctgggcccaaacaaaatggtggttgacctgacagatcccaaccgaccccgcttcactctgcaggagctaagggatgtgctgcaggaacgcaacaaactcaagtcgcagctcctggtggtgcaggaagagctgcagtgctacaagagtggcctgattccaccaagagaaggcccaggaggaagaagagaaaaagatgctgtggttactagtgccaaaaatgctggcaggaacaaggaggagaagacaatcataaaaaagctgttcttttttcgatcggggaaacagacctagatccaaggccacaagtaaggctatggctctgattctagaagacaaccttccaagatgcctggcaaaaccacctccctgtgccacacagacacactaggcctgtgtatttatttccccttcaaagcagactgaggagggaggagacgaggttctcttggcatcactttctccctggctgcagaactagacacccttgaagatttggcctgggccagtgagactgaaatcaagaaaaacagaagggatgtgcagggtgggggggtccacttcctgctcccatgtcaacccccagggcctccagtgtgcagacgcgtgtcctactcatctgctcccacggatgaccctggtcttcaatggttagcagaagggagaaaagaaagcaggaaaatgtgctattgagattccagtggtgacttcactgatatttagtgaatatttgatttagccaacatgcctttctttatgtgattttgtattaaagtaaaatgatttttatactttctaaaaaaaaaaaaaaaaaaaaaaaaaa

SEQ ID NO: 2335 - DNA, 959 bp, Homo sapiens
ccacgcgtccgcggacgcgtgggcggacgcgtgggcggacgcgtgggtgccgcggaaagtggaggtgagggccgcccgccctagaggtgcccgtccgaaaggcagagctgacaaggaaggtttcgaagcgttttgctggcaaagggatttcttacaacctccaggcatgcgtctttctgccctgctggccttggcatccaaggtcactctgcccccccattaccgctatgggatgagccccccaggctctgttgcagacaagaggaagaaccccccatggatcaggcggcgcccagtggttgtggaacccatctctgatgaagactggtatctgttctgtggggacacggtggagatcctagaaggcaaggatgccgggaagcagggcaaagtggttcaagttatccggcagcgaaactgggtggtcgtgggagggctgaacacacattaccgctacattggcaagaccatggattaccggggaaccatgatccctagtgaagcccccttgctccaccgccaggtcaaacttgtggatcctatggacaggaaacccactgagatcgagtggagatttactgaagcaggagagcgggtacgagtctccacacgatcagggagaattatccctaaacccgaatttcccagagctgatggcatcgtccctgaaacgtggattgatggccccaaagacacatcagtggaagatgctttagaaagaacctatgtgccctgtctaaagacactgcaggaggaggtgatggaggccatggggatcaaggagacccggaaatacaagaaggtctattggtattgagcctggggcagagcagctcctccccaacttctgtcccagccttgaaggctgaggcacttctttttcagatgccaataaagagcactttatgagtcaaaaaaaaaaaaaaaaaaaaaaaaaaaaaaaaaaaaaaaaaaaaaaa

SEQ ID NO: 2336 - DNA, 2263 bp, Homo sapiens
ctcaggtcttctaatttgaataatgttcttgggtttcggatgaatatctttgatctaccaaaggagtattcttccacgggaatttctaattcattaaataggacctccacaccagacctggctggtcctttccaatgaggccatgtttgtttacaaagcattttgtatctttctaggcaaggttcataggcctgcctgaaggcgtagcctgccctccgcactcggacgttctccaaaagccccaggtacctgatctgatgacacactagagcctcgttgaagatgtgtgctgcttttttatcattcggtttgatacacctaatatagtttgggttcttggtctgtaggtttttcatcagagtggccacggatgccttgaactgtgagcctgctgtaggaggccttttcaggttgatcttggcgggattcccttcggggaacaaagacttgatgagggcatggctggccttccacatggcttgggacaggtctcgatagagaaggtcattgtttttgtcaacgaatccttccacctggtacagcacctttccagcataatgctggatcctgaagcagctgtgaggcagagacgtgtcattgaggaaccgagagcacttgctcatcctgctttcaaaatgctggtgggtggcacatacttggttcagcttttctaagaaggtctcatcagtgactgtgccaggtctgaggcactcttcatccagcatggccaggattccatttgtgttattttctattaggtcacaaatgatagcattattgaagtagtcaatgtgagtccattctatatcctcccgtatatactcctcctgctcttctttaagagtaagttcaatgaagatttgttgcagcttttcgttacaataattaataatgaactgctcaaagctgttgtcctcgaaaatctcaaagccataaatgtccagaacacccatgaccttctttctcacttttgtttgtgccttaatgctttcattgattcgatttaccaaccatgaaaacaacctgctgtagaggtttttagccagagcatcacgggcataataagcctgagccacattcagtgtagttgaaactttctctgttggctcaactgttcggaaactgaatgctcgtctagaactgattgatcaatgccggcaattcacaaatttcttttaactcattttatctttgattttgctttcatctagaccattcactcgagattcgggcttgaactcaatgttccccagtttcaacactgctgccaccaccgccaagacagactcagcttcatgatccataaagcccacaatctgcatggcattccgcacggttctaaaatttgctgcatcatccactccattcactttggccgaatccagactcaggtagttatacctgctgaaatccctctcaagcttaagtttattgaggagctcttcagaggcaccagagagcagctgatagaacacatggaagtttctttcacctcttggctgtttaacaacccgagatttctctaaaagatagttacttattactcctcctagtggatcgcctttaaagtcaaattcaatatccatatatttgccaaatctagaggagttgtcattccttacagttttggcatttccaaaagcttccaggaccgggttggactgtaaaagctgttctttaacttgattaacttctgctccttttccacaaacagctgccacataggacatgacaagcttactggcctctgtttttcctgctccactttccccagtaatgagaatacattggtccttatcttgatctcgtagggatctgtatgcttcatccgaaagggcaaagatgtgagggctcagttcataaaaatttctgttcctgtattcttccactttctctggtgaataaatgggtaaagaccgatatgggttaacagatataaccacacttccaatgtaagtgtatatttcactgtggtcaaagcgcttcttgaggttgttgatgaaggtctcctcattgagaggttctaaaagaaccatatccccaactccaatcatattgtccagaagtgaggttttcacctccattttggccatggtctccaggtatatttcactgtggtcaaagcgcttcttgaggttgttgatgaaggtctcctcattgagaggttctaaaagaaccatatccccaactccaatcatattgtccagaagtgaggttttcacctccattttggccatggtctccagctcgcctggcggtcgac

SEQ ID NO: 2337 - DNA, 5083 bp, Homo sapiens
  misc_feature (5079)..(5080): n equals a,t,g, or c
ctcgagtttttttttttttttttttatggaattactgattttaatttttgctttattaaatgttctcatttttctatcatgagaatagattactatatccaacaaaagggagggacagaaagaaaagaattaacaaataatctcattgcaatcgctactgcatacctagaagctaactggtaatacacacttgcctaagaactaacaaatcaattcaacagacacttcaaaagaacccatgttacaaggcatcctatgcatgggacgaatgcaaagtcccacctacaatgtcacttatccccagattccccatctaatgaaaattttctatcttcccacagcacatgccttgcttctaacagacaattattgratgraaaaawtwaaagcaagtaccttagtamcatgaatcacaaaagcaatgtattctgaacctgaaaytgacaattacaaaacaaatgctatcctgggaaaagcatttcctagacaatacctggaggccaactggcattgctggatttacttccgattttatttgttggtggagatttggcaggtaaccagctatcaccagcaggacccgtatggccacccagtgtgtcaccagggatgatatcaaactggttgtacggtgaccctccccgggttttaccaggggccactatagcgccatttttgtgcatattggcttcctgtgtggctacagagggcagcccctccatcatggaggtccactgtttaaagcgagactcggttccagcctccttcccaccaaccatgccatagtccatgccgccagagctgaagccagaaccatatccaggtattggccctttggtttgaaggtctgggagccccacattcaatgcgttgggtaccatgttgtccagatgcggcttgggcccaacaggatgagagggcgagtgcttcatgcctggctgcctctgctgctgctgctgctgctgctgcagtgcactcaccattcgagccagctgctgctcttgctgttggcgtacagcttgagaaatctttctctggttctgtaacaactgctgctgttgctgctgctgcaagagaagctgacatgccaactgaaactggggaatttgtggaagctggctcagcatggcaatttgttgaggagataactggggccccacattgaaaagacctggactcaggccactgttgggaaactgcttgagcattgaggcagaaacctggggggaaataaactggggaggcacttgcgcccggagactgggagaagaatttagtggctgcacgggtgtgtgcagacctctcgattgtgctgtgctgtttccaaacaaaccatgactaccgcccttctyaaaataaggcccactatctgtggttcccatgtctttggaattaggtggacggaacccagatcgatccttcctcatgatatcattaaaatccccgagattcatcgctcgcttgtccacatcaaattttttatctgaaaggcttcctacagacaaatccattttgctgcttggattatcttcagtctgactcagcaatcccatatttgaaaactgtttggcaagaggattcatccatgaatcattgtttcctcctttgagtgagcacttcatttgtttctttcctccttgtccccagcttgctgagttgtgggaggaagcactgccctgagagccagtggtgttccagactcctccatcctcctcctcttcccagctgggatggcgagctcctgtgactggcccgtcactctccccccagccgtcttgcatagatttggaattaggcttcatggcattgggagcgttggcgggcgtgttcccccagcctgtggtcgatgctcctgtatcatccatctcgccccacccaggactgctttcatttggctcaccccaagcggaagtaccattatctggagcaggtggtgtgcttttgctccagactgatgccgatttactggtcattggggtgggcaggtttggttctcgaggtgctgggcccccttgggaattcttatcccacagattcacattcttgtagttataactgttagggtctccccatgctgaagtgccatcatcaatgtccattttccgactaattgactgtggggatggctcttcccaaccactgggttcctcatccttargtgttgcaggctgtggcccgctgctycagctggaattggaaggtcgaacgttgcctggaggtggtggkggtgggcctccccacgaaccagaagcctctggttgtggtggcggcggctgctgtgggggctgctgctgttggtgttgtttatyccaggaawtgggctgtcggcccgtctcattccatgctggggatcttttgcaatcctcccacccaccttttgaagctaggcttgcattgccaccattaccccaagtcccgatttcattctgccctccttcaccccacccagacacaggtttacttgcagaactttcccaattgctgttttttgtctgatcgacttcctccccccaaccattctttccagaagccatccttgattgggctggcgtccacctccccacccctgatccttgctgggattctcattccaagaggaaggtgtcttttcatcaggtcgtcctcctccccagttggaagagttgttgttcttgtagtcattccagcctcctgtgttcttggggtctttccactctgtagaggctgagagctccccccatccagacttcatttgattgctttggctgggtgcatctccccagccccctgagttcttggtctgtgtggcagcgctctcccacccctcagttcctttgtcagatttcccctcaggccttggcacctcttcaatgtcccacactgtgtcctgcttaatttgagtttggccccagccagtgtttgagagcaccctggggtccaaatcagttcggctcaaaagagtctgcaagacagcctgacaatcaggatgtgtgggcctgtacgaccgacggccagagttatgactgtcactacttcctgctwtgtggttgcttccagtgctttgacctccaacttcacttcctgtgragctggaagatcttccccaacagggagcctgggcattgccttggttttcagggagggggtggcccttttgattgtcccatgctccagtgctagaatttggttggtttggaccactccattctccaattttcaactcatcagacccagtcggctgtttccattctccctgagagaccccagatgtcattttgttcccttcaccccatttgttgtcattagagtcctgggggccaaagttccaggacccacccgtagacctgttattgttgtcccaagagtcattttttgacccagttgatttctgaacagaagctcctttccaggagtcctctctctcttttccattgttcccattgtttccagaattgctttgtccagagactgwgycagttccagaaggccccctagctgcaccccaagatccaacactcccagtctttcgatctccagtgctttgtgaaggggcatcagtgctcctggaggtgttccccaagcccattccaaagggcattcccttattctccatggggtttggtgaacttaagttcaaggagttagtgtttccattttttggtccatcagtgttatgaatttgagcctgttctctgccagagacaacaaaattaacacccgcattttccatctttgactgctgttccctggatgtctgacctactgtgctaacctgtgcactggaattactattatctgtttccaatgcccctttcctagaagttccttcttggaccagtgctggccaggcagatgggttgctatttgggttaaagttgctgaagccagagccaggtccaattctatcctgaccactcacattcctccaatttcctagtccattgttgttctctgtagtagagttggaagattgaacagatttagccttagggtcagatttccagaccccaagattacattcgttcccagaacttgcagactggcactggctcccttttcctttgttactagtggtgcttcctggcagagtgctcttctcagagccagggttcgaggcactgttgttatcggtggtgttttsggaagaarattcartgtytttgytggcaawacaargccaytyttcmatktcagacccgtytacaatcaccttktcccagatgtgaattgggttgggggaggtgccgttgttggaggaggytcccgagccccaagtggaatttgcataatttgaagcagcagcacctccaagggttgagtctggcgcagtcccactctcaytctgcagcagcgctcctgtcacttgtgcgttgtttgggtttgctccaggtgctgtgcagggaggaggccctgccccacccccaaggagcatgcaggacggtggagggggctgcccacgttttagtaacactttgtggtcctgctggcaacggaattgcggcggcacctcccgaggcatgtagcgggcggcgcttggcggttgtccgttcggcactgccacccttttggcattgttgccaccattgactggtggcgatggagagctgccaattgggctggcggccgttggttggcttaaacttggtttcgtcacttcgggcactttggttttttgttccgtgaccttctgagtggcttcttttttctttttatcctctttcttccttttcttgtcttccattaactgttcttccctttcttgctccttctctctcataaagtgcagcagtgcttaaatccagcaaattgaggcatacaaggtagaaatggaaatgaaaaaaggtccaaaaaatgaattctttttgtctatctgtttttttgtattttaaatattcagaaaccagcagagactctgtcggccattttggcttgaactaactctctctcacacactctccctcttgctctctcgtcgacgcggccgcgaattcccgggtcgacgagctcactagtcggcggccgctctagaggatccctcgaggggcccaagcttacgcgtgcatgcgacgtcatagctctctaccctatagtgggtcgtannaaa

SEQ ID NO: 2338 - DNA, 1790 bp, Homo sapiens
  misc_feature (639)..(639): n equals a,t,g, or c
  misc_feature (827)..(827): n equals a,t,g, or c
  misc_feature (852)..(852): n equals a,t,g, or c
  misc_feature (858)..(858): n equals a,t,g, or c
  misc_feature (886)..(886): n equals a,t,g, or c
ttggcggtaacaatgctctttatttgtggcgtttaaaggcggggttgggcgggacagcgcccttgcgtgtattaggcacaggttcggaacgcagcatctttccaggggcttccctactagctcagccccataaagtcactggtttcctccatctggaccagcagccgcaccagccaaggcgcccactgggtgtcggaggtgggcgatgtcaatccccgtggccttcgtcgggagggtggagctggccaaaaagagagcggtacagttctgtcctggcatcatcattcattgtagtatggtcaataggtgccatgaaactcagtagcttgctaaggacatgaaaccgaagtttcctgcctttgctggctttcctatctacttttttgtggattttgcttcgtaacttctggattgcaagccactgccttcccatggccacctgatcgttgggatccaaggagctggtcttccgttctatgagttctcgaaggagctggtggtaaaagtcatcatcatcaaagatttcttcatccaagtccttcagatgagcattagcaggggcttgaggaaggatctccggttcccctggcaaactctctgggacaggctgagctgctggctcaggtttgccaagaactngatagacggagcgcttggtctgtgtccttcgaagtaatctctctttgtccatcagaatatggtcgatctgagtcaagattgagcgttcaaaggcaccaaaacccttcccagttttcagaagccagttggtcttatcgtgccatttcttaagtgtccggttcctgtagactgaaaagtcggcaaagcgntttgccaatgaagttggaatagtcntccatntccagcttcctctttgcagggacctttnttggttgctgcttcttctcttctaccagctcatcatcttcactagaaatctcctcacttcccgcattgggctttgtcccatctactagatatctagtgtctgggtactggaaaagcaactcttcctgaagacctaccaatgacctcaacaatgctttaagtgccttgtgactatttttcagggcactggaaaattctgggccacctttgtccttgaacaatgggaaaacatctggttgaggaagctggttggtggtcaacagagctttttgtagtttgatccttccttccaagagctggtcccacagtgctatctggttcttcacggctcttcctttctccacttcctcagaaactttgacactagagaaggtcatcaccacaccatcatcctcactgtttctatctccagccctgtcttcctcactctcgccttgggagtcttccgcgtcatccccttcttccatgccactctcttcgtcttcctgtatggtgccagttgcttcttcatcaaagcaagcaaaggcatttctgatgacatcttcaggatctgtgccatttaacttctcaccaaacatggtgaggaacatggtgaaattgatggggcctggagcctcattcatcatggcatctagatactcatcagttggattcttccccaatgaagcaagcatatcatgcaaatcttccttgtcgatgaaaccatctctgttctgatcaatcatgttgaaggcctctttgaactcctgaatctgtgactggtcaaacatagcaaacacattggatgttgcacgctgagggcgcttcttggtcttggtctttgttcttttgctcgacatggtggtggttaagtcccggcacagctacgagaatccgagcacctctccgagcccctcggtcgacgc

SEQ ID NO: 2339 - DNA, 829 bp, Homo sapiens
  misc_feature (16)..(17): n equals a,t,g, or c
  misc_feature (25)..(25): n equals a,t,g, or c
ttatgaccaattaggnntttttgcnaaaaaagcttattttaggttaacacttatagaaaggttacgccttgcaaggtaacsggtccggwaattcgcggccgcgtcgactgtgtatgtgtgcatgcatgtgtatgtgtgcatgtgcgtgtatgtgtgcatgtgtgtgcatgcatgtgtgtgcatgtgcacatgtgtgtgtgaggaggggctgctttcctatggcacagtcactatgggggagcccaaagctgcagggtcagccctggggagccccctcattggaatcagaggaccacagctgtctgtaggtgaggctttctggggcctggatctgctctgcgcccctccggcattctgtgtgacagtggctctgccacagccctcctcagtagaagctctggcttcctggtggacctggaggccccgggagaccagggggaccctggatccctggttcacccttaggccccatggccccccgctggcctggtgaccctgtcttccctgcaattcccggttttccctgaggccctgagggccctggagaccccgggggcccttctggccctgggggccctatgtccccttttgggcctggctgtcctctcggccctccagttccaaagctgccctttgagcctttgaggcctgggaaccctcgagggccaacagggcccctttctcccacaggcccggcctctccaggttgcccctgaggaccctggggtcccagggggcccaagctgccggggtcgtcgacgcggccgcgaattcccgggtcgacgagctcactagtcggcggccgctctagaggatccctcgaggggcc

SEQ ID NO: 2340 - DNA, 2574 bp, Homo sapiens
atttatactatgaacattggggtaatacattttattttttcattgctatatgacagctaaggggcaaatgattcaagtatattttaaatcagaagtattcaaattatttttgtataatactgttcagtacttccaagaataagctctgacaacagccattgtttctgcttccactcatattctctacacattttaatacagaaatttttgagagggggttactttattgcttgtgggttagtatgtctcttacttcaattaaggttacttatttggtttgccttaagcattacttttttaactttgtgccatttggtctttactttttatggatgttttcaaagaaactattttatattcaatctagtttatttagtctactgtatttctatttcgtggaagccttttcccctcaaataatatattatatcatttttggacttatataaatgataattaaataaatttttttcttaatactgttggactttgtatatacaagttcaaataactttttcgaagatagtttcttatataaatgtaatttaatttttttactcttctatacagttctttagatgtaaaagaattagcacaatctctggcagttttataaaagctgttgaagctcttgtcctgcactgtctttaggtatcataggtatcaggtttgctttgtgttaatgccacttcaagtcattatttggtttctgctatttttttacctgaggataagaagaatgaatattaaatttgaatattaaatatatgttactttccaagcactgtataatgactgttcagtgaatatcagacttccgtgtcattaaaagtcatgagagacagcacagagaggttataggttgccttggtgtacttttgtccaggagtaacagggacagaatactttctttccttccttcaagtacaagaaggctttctctaccatttgcgtctacactttattttaaaagctatccttttctagtagtattttatcatggcaatggcatgatgacaacaacagtctttcattacagactgaagggaagcatgtccttacttaaaatagttctgctactttccctcctattataaggaaatyttacagattctaaaaataccttaatttttctttgatttttattttaccaagtcacaaatgtctttttgatgttttgagaattgttctcatagaatcacaaatactgacatttcattagatgattattttcctagaatccccaaagagcagtggcagtccatggcttggttgaagctagaaattttcctgcccctggtgacctggtaagcctcctgctcggaaccgtgtgagtgggtgaggaagatgagagatggtcagatggaagagagraatacatgaactgctctggcctctctggttctgttcttggcccagagtttttgaaaagcagcggagcatgactgacttcacatgctcagctttctcagccttttgtttattttgttgtccttagatttccctgttgtaaaaggggcaagaaaagtaactcatcatctctaacacaccatggcagcttagccaggtagtcttagtggtggtgtttaggcataagatatgctgatcatcagtctcaggccacagtttccttcactaatcgtccagcttgagtgttctgttctcttcctgcccatttccttgaacctcctgctctagccttggcggagggagagtgctrtttgcttttgttctccctctgtcttaggaaaagccatctttaatatagttcttcaccacygttggggttgttttgtgattttttttttcttccgaagaactcctggttgttattggattttgtattttaatacaaattattgaattttataagcttgtacacaatatttaattagtgtgaaaggaaacaaagaatgcaggaaaaataatttaatatcaacctcagttgacaaggtgctcagattattcaattcgggatcctccttttgttaggtttttgagacaaccctagacctaaactgtgtcacagacttctgaatgtttaggcagtgctagtaatttcctcgtaatgattctgttattactttcctattctttattcctctttcttctgaagattaatgaagttgaaaattgaggtggataaatacaaaaaggtagtgtgatagtataagtatctaagtgcagatgaaagtgtgttatatayatccattcaaaattatgcaagttagtaattactcagggttaactaaattactttaatatgctgttgaayctactctgttccttggctagaaaaaattataaacaggactttgtagtttgggaagccaaattgataatattctatgttctaaaagttgggctatacataaattattaagaaatatggatttttattcccaggatatggtgttcattttatgatattacgcaggatgatgtattgagtaaaatcagttttgtaaatatgtaaatatgtcataaataaacaatgctttgacttatttccaaaaaaaaaaaaaaaaaaactcgagggggggcccggtacccaatttttccaaaatgggcgag

SEQ ID NO: 2341 - DNA, 1579 bp, Homo sapiens
  misc_feature (1522)..(1522): n equals a,t,g, or c
  misc_feature (1537)..(1537): n equals a,t,g, or c
  misc_feature (1541)..(1541): n equals a,t,g, or c
  misc_feature (1563)..(1563): n equals a,t,g, or c
ttgaaggtacgcctgcaggtaccggtccggaattcgcggccgcgtcgaccacagacaggacgcakggttactagtattttggattgactgcagattttgaactgtctgcctagatgaactataccatgtccctagggccaagtcccatgtgcattttgtggctactagaccctcttcagaaatcaaacacaaaatagctctggcctgtaaagaaaacaaacttcaccagtaaaattgtttcctgttcctatccaccaatgtgcatagcacagtgtgtagtctgggtaatacggtttgcataattttttgataatgttctacttaaaaagggcagtgtatttatatattacttatgtaattaaaaaaaaaattcttctggctgggattacaggcgtgagctgccgcgcccagccgtgactgggctctttcacttagcgtggtgttttcagagttcatccagaagaggatgytatttaaaactagttttgcagatgctgttccttacggcatgactcttacctcttccatggtcattgggaagaaattccatctgggtgcagcgtgacgggaatgttttctgttttcttttagggtttgtcacatggaggatgtgtacatatggattctctaaattggatcgcgctatacatattttttttttttattttcttagctattctctattctagattatgytttgaattagcttttccagtttaatagaaaaatctttttgagatttttgatttcgggagaattgacagttttacagagcccaggaaaatggtgtttctccttgtttgttaagctcttcctgttcttcagtgaagtctcacggctttcttcgtgtcgtctgggctcattcttagtcctggagtgcttggctcttgcgttcttacattccatagcagtctgcagattcctatgaacagaagagcctctgaatctcagattaggctgtgtttcgatctgacaggaaagctggttccctgataaaaagtccagaaatgcccgctcagctcagctactcctgaggtcaccagggccttctgtgcactccacgctgctgtttttgctcaggtttttgcctcgaggtttcacagtggctgccagagctctgaacatcactgacacattcatggcaggcaccaggaagcctccggagaagggacctttgctttccatggatctgktggctgatccgcagcagcaagagccatgtctcccagaagactgctccctctgkctcatgagccagcctggctgctctgctacaggacactccttgtttttatgtctctctgtgtattccagtgggatttggggaaggagaggcatcgggtgcagggactcagtgtgccttcttgaaaccagaaacctctcacgctctctgggcctgtttccacttctgttgatgtggtttttactccgttgtatgccgttgctctgtcttcacacgggcagccacaccggtcgacgcggccgcgaattcccgggtcgacgagctcactagtcggcgacnactctagaggatccntcgnggggcccaagcttacgcgtgcnggcgggtgtccttaaa

SEQ ID NO: 2342 - DNA, 2202 bp, Homo sapiens
  misc_feature (255)..(255): n equals a,t,g, or c
  misc_feature (1084)..(1084): n equals a,t,g, or c
  misc_feature (1177)..(1177): n equals a,t,g, or c
ggcacgagcctgattccatgttcttggccatgttagccataatatcctgtgcagtatgtttttcctgtgcagaggcaaaaacatattgggcatatgttcccaagcccccagcagtatgacccatactttggagtgacactcctcctaagatttatcatgattaaggagcatgggctccaggacccctaactccacctgacatagaacagttagactctcagaataatgtcattaattataccgctccattggaangacttcctttgtgtgtcaccacaaagacatcactcagccatagctgtcttacagttcaagctcacacatggttgagtcactatgggaaaatcatgtacttattaagtcttggttatattaatgtaaccggtgtgctaaccaaccattcctggcccagtcgccttcattgtgctgactatacagaatggattcccttcaatagttcctacccccctccatagacccagtgtcttagcccactggctagaaaacawtctatgttaactggagacattgtggatkggggacctaaaggccaattagatggaaaagaagaaaatcagaaatcatggcacaaactttgctggcattggtggcaagcttttaatgcttcttctttatataacactgggatccaatcccagtcggccgcccagattgcttggcatggagcaggctttagcccgcctcttcctcagtggcattatctagggaggaaaggaccaattcaaaagatgatatggaaggcagcattcccatttatgaatggcaacatctgggttgtaatactatccaataatagcaatagtaagcaacacagtcttaatgttacatttgtaaagaatatcaccactcaatttacagtttgtgtttttaatccttatgtgtttttggcagctaagaaggaccagctccaggtaaacaatacccaattgacctgtaaatcttgccagttatatcactgcattaatcatagcacattgcaaacacataatatctctactttgatgattttaggttgcatccctgggctatggattcctgktaatctgtctgatccatgggctgncacaattgctttacattttgtgaaacttcttctaactcagtttactcattgkgtccgtagaggcttaggcatgataatttttgctattggttnacttggtcacactaataatttctgktgtgatgtcctctgtagctttgcatagttctattcaaacagctcagtatgtggagaactggacacgcacagtcaaccaagggtggctacttgagaataaaattaacactgagttacaaactgaagtggcagtgttataatccacgattctatggttaggggaacaagtacaaagcttgcaattgcagcagtaattgtgttgtcattttaatcacactcatatttgtgtaaccaacttagaatataaccaaagtgagtatccatgggatctcttgtgaaagcccatttgcagggagctttcacatccgacatcacctttgatattggtgaattacaaaacaaaattcttgatttaaataaacaaattccagagtttcagccttctttagaagactggactgaattccagcaaggcctggagagcgtcaacccttggacctatctaaagcaccacattaacatcttatatatagttcttggaataatgttgttttgtctctgtcttctgttcatagtctgtaaaatcggatggactgccaatcggagaatgaaagctacccagcctggccttacattctttcacttaatacataaacaagaagggggaaatgttgggagccaaaaaggccaaagggatggtgaccaactcagcattccactggaggctacatgatcaaacagcaaactgtttatcatgaatacagaatgtgggcaaactcgcttctgtgcctgcccagaaggtttgctgagggccatcgctccctggccccggctccttgaggttatctactgggacatctagagcctattgtttgaggaatgcagtcttgcaagcctactctggaccgagcagctgacctcttcttccacaccccttctcactatctcttttgcctaataaatatggagggctgtgtaaagctcagggcccttgtccactagaggcaaggtgtcccctgacccttcttccaaacataaaaaaaaaaaaaaaaaaactcgag

SEQ ID NO: 2343 - DNA, 1556 bp, Homo sapiens
ggcacgagtttcatccccagctgtaattcaagatgaggaagtgttttatcagtcacttatgtatcagcttgattaggtagatcatggctcttttcagaatatttttagtagcttggtttgtagcctttcttagtgtcaggaaattgaaccccatcctgagagcccttgaggagctttgaagctagtactgtgagcattaaactgagcagcatctaggcaattaaaggaaatggattttatatagtttggagtggcctgagctactttctcttgtgctgttttggatattgcaatcaggtgtgtgatgtttacctctggcaataggaagtggactccaggtggcaagaataccaaagccgagtggactccctcattccctggatcaaacagcatacaatactgatgtcagataaaacttttccccaaaaccctgttgaactaaaggtaaagtcaaggacttaaattttttttgtaaaatctttctaaggagtaagtctccaagcttatcactgctggcttctaggtgaggtggtatgaaaaatggggtcctatagtttgtgtccatttattcaccaaatattaattttataggcactttataaccaatatatacacttcaaagaaacagaaattctggccaaggagagagaaaaaggaagaattgaggaattatataaattactagaggtaagtgagcttatcctttgctgaacttggggtttgctggtctgtactgttgttgcttcttgattatagattccttgtttcttttcccaaactgcattaatagaagtactctcctggtgacaaataatagcaccactctcaggctggtcttaaaatgttgtggtaaaggggcaatgtcagccatctctgttttttaaagggcttattgaaaaatgacatgtatttattcagaaatcttgattttgtggacaaattttctgcttctcagaggaactaaatctttccctaggtggaaagaagagagacttctattcagaatttgattcccagagaatttgaagttgtagaaatgagaatttaaccttgccagataaaagttattgagggaaaggaggatttatagaaagtgtaaaaggaatggaatgacttagagtaggtagtccctacattctagaggtgacttttctgctctttaactcaagggtgaagaacctgatacatatttgattgtttttccatgttagacaataggaaaaactgctgaatggctgggtaaagaagcaagaagtgatgtgcaaataataaatcaaaactgggacaagagggcatggctgtgtttttggactgaaagagtatctgtttcaggtgtggattgaatttggccgaattaaactgcctcaaggttatcaccctaatgatgtggaagaagagtggggaaagctcatcatagagatgctggaacgagagaaatcacttcggccggctgtggagaggtgggtccagatcctgagagtggtctgacattatttattgcgctccagcctgagcaacaagagtgaaactccatctcaaaaaaaaaaaaaaaaaaa

SEQ ID NO: 2344 - DNA, 2185 bp, Homo sapiens
aaaggcccaaataattcccacaattgctatttcagaaataatttttatttggctttgaagtcactttctacctcccactgccctggctgttcctgctcatctccctgacgtctgagcttggtgagctccagcactcagcccttaggcttcaatttctttcccactcatgctctctaggttagtgtttctcaacgagggcactagttggaattttgagcctagtggaatttggtataataataactcatgatgagaaaccatcccatatattgcaggacatttaggatctctgtttcctgccatttaatgtcagggatgtaccctcctacccccagccttcargcaacgagaaacactgccacacataacctgatgtcccccggtgaacatcactgcttggtgagctcaggtataccaaggcattaaatacctgtgttctaaagactccagaatatatctccctggctcagatctgactgcagacttgcagaccaagtatttgtctaatcagtgtctcaaactcactgtgtccaaaacggaacccttgatgttgtccacatctcctgcctgagtctgcccaatctcagtaaatggcgccttcattctaccagctgctcaggctcgatgctttggagttgctcttgatttctctgcgtctctcagcaaatgcctctaarctctgtcttaaaatatatccattatctgacctcttctcagcacctccagaccgttggcatctcttacctgggttattgcagtagcccactgcttggtcttcaacctccactcttgagcatgtccatatcagggatggtgttaaacatctcagtctgatcaacatcaccactcagctcagccattttgggcttcccttatcactcagarccaaatcctgtggtgagagcagcctacagcacgcaggargacctggscccacaatgtgtttctgctctcagctttggacagtctcttctccactcactctaccccagccagactcacctcctggcccttccactgacacgtgagggcctttacacctgctcttccccctacctggaatgctcttccctcagattttccgactccttcagatataccctccctcagggataccttccctgaccaccctttccagaatagcattccctgactcctgaccctgcttcatttttcctcatcactgtcagacttactgtgtgtctgtctgggtatttgtttctatgaagcagatcctccctaacggaatctaagctgcatgagagctgggagcctttttattctatctccagtgcccaaaggctgtagaagggcctgttgagacacccaggtacacatttaggtagttcacgcctggctgttcttgtgtctttcctggctctgcctttctttcagtaggctcattcttgaccagggaacggcaggccccccagtatccctgcagaatctccatcaagcacagactggagcactttcccagagggcactcaccggccagcttcagctctgccagctgtgttcctttcccaacaagaaaaggcctctgaacagatgtaagaattgaggcttttcctgatgggtctgtgtttgacccatttcagagcctgcagtgcagtacctgattgtatccatgagtcaaacagctcttattatctcctccccagcccatggcagagttgaaggaggaaagtgcgccagaggtaagcgtgctgacagttctgtggtgtgacagcctcacagtttggaaagacaaaattttaaaagcttagtagtccacaggcacttgtagaggcagagaggcagacccgataggcctcaatacggtggcacactgcatctcatagttttaaaataatgaagactggctgagcacggtggcttacacttgtaatcccagcactttgggaggcctaggtgggcagatcagttgaggtcaggagtttgagaccagcctgatcaacatagtgaaaccccatctctactaaaaatacaaaaattaggcatggtgacaggtgcctgtaatcccagctatttggaaggctgaggtgggagaatcacttgaacccagggggtcagaggttgycagtgagctgataccatgccactacatttcacatttcagcctgggcaacagagycgagactccgtctcaaaaaagaaaaaaaaaaaaaaaaaaaaaactcga

SEQ ID NO: 2345 - DNA, 1649 bp, Homo sapiens
taaaattcatgattttgggcaaaaaaaaaagcatatcaaaacaaaattttaactactaatgggaaggttaaaaagctgccacgtatttctagtacaatgtatccaataagagcaaggacattgttaaatggaacaagacagctgggaaaggccccactatctctaatagaattgtgctactataaaacatgaagatatcagcaatttggccacttgcagtttttttcagcatgttaaagcaagtgctaagtactttattagtactttatttagtactttattttaaaggtctagaaaacaacagtcttcctggaggccccagaatccctttcatgggattcataagggactcaggtattcttattttctgccaaaaggtgtgcttatttagggactcttttacgatactttgtttctgaagttaggtagatcttggtttactgtgccaaggtcctacctagcattccctgtaggaatatttgaaattccactagctagtctaagaagtcaaagcacaaaattaattgtcaacgcttctctcatattcttaaaattgaagcagtttgcagggaagaacaagaatgaggtgtccctgccttggtaaagcaactgccaaattttgttctagaaagaatccccaagtgtgtggatctattataatttctttatcttttatgaatgagggcatcttttctacttgagcaagatcatggtccttgaccagtgggcttttccttcatatctgtcttgtgtagttgtgcttttcctttggctcgtttttggtctgtcagggtaaccagcagtgcacaatatgagacaaatgctctttagagagaaatctggtgagactgtagaacccagagcaaaactgtttttttttcagtctctgttttcttttctaaatgctatagaaaataaaggcacctgaaaagaaactactactttaacactgctgtggaaggcctttgctttataagaaaaatattattagctatgggaaagtaatgttctttatgtaaagacttaaaaatagactaatagtttacagagttattatataaaatacgatgtgaatttatttcaaacaagttgtgaaggtaccaaaaaccacaataaaagttaatatatataaaaactactagaacaaaaaagcttgaaggtgtgggggtggagggtatggaagaccaaaagtaaatttaaaaaagaaatttttgaaaggaaacagctttatcaggggaagttaaatataacactccgtttttttcttctttctaataatgatatggatcaacaaatgcaatttgaactttttaagataactctaaatgtgttttgtttcttaaatgcacaattgattcttctatactgtaatgcttctttgctgacgctggaaaatggtcagactgctgactttgtgcctttaaaatgcattctgctttgacagtggcagactttttggtgctggagaagattcactagcagtcttatatgtgcttttcaggaaatatctttctacttaaggccttgagagattcaaagtggcatgacttaggcttggaccaaatataagatcttttacattgcaaacaaaatgttgtattgaataaaagggttaaaaaaatcataaaaaaaaaaaaaaaaaactcgag

SEQ ID NO: 2346 - DNA, 2665 bp, Homo sapiens
ggcacgagcggacagctgctgcagggcccatggcggacacccagtacatcctgcccaatgacatcggcgtgtctagcctggactgccgtgagccttccgcctgctgtcacccacagagcgcctctatgcctaccacctgtcccgtgccgcctggtacggaggcctggctgtgctgcttcagacctcccctgaggccccctacatctatgctctgctcagccgcctcttccgcgcccaggaccccgaccagctgcgccaacatgccctggctgaaggccttaccgaggaggagtatcaggcgttcctggtctatgccgcgggtgtttactccaacatgggcaactacaagtcctttggtgacaccaagtttgttcccaacttgcccaaggaaaagctggaacgggtgatcctagggagtgaggctgctcagcagcacccagaagaagtcaggggcctctggcatacctgcggggagcttatgttctctctggagccaaggcttcgacacctcggactggggaaggagggaatcaccacctatttctctgggaattgtaccatggaagatgccaaattggcccaggactttctggactcacagaacctcagtgcctacaacacccggctcttcaaagaggtcgatggagaagggaagccctactacgaggtgcgggtggcttctgtgcttggctcagagccttccctggactctgaggtgacttccaagctgaagagctatgaattccggggaagccctttccaggtgacccggggggactacgcgcccatcctccagaaggtggtggagcagctggagaaagccaaggcctatgcagccaacagccaccaggggcagatgctggcccagtatatagagagcttcacccagggctccatcgagggccacaagaggggctcccgcttctggatccaggacaaaggccccatcggggagagttacatcgggttcatcgagagctaccgcgacccctttggttcccgaggagaatttgaaggtttcgtagctgtggtgaacaaggccatgagtgccaagcttgagcggctggtggcgagcgcagagcagctgctgaaggagctgccctggcccccaacctttgagaaggacaagttcctcacccctgacttcacctccctggatgttctcaccttcgctggctccggcatccctgccggcatcaacatccccaactacgatgatctgaggcagacggaaggctttaagaacgtgtcgctggggaatgtgctggctgtggcctacgccacgcagcgggagaagcttacctttctggaggaggatgacaaggacctgtacatcctctggaaggggccctccttcgatgtgcaggtgggcctgcacgagctgctgggccatggcagtggcaagctcttcgtacaggacgaaaaaggagcattcaactttgaccaggaaacagtgatcaacccagagacgggcgagcagattcagagctggtatcggagcggggagacctgggatagcaagttcagcaccatcgcctccagctacgaagagtgccgggctgagagcgtgggtctctacctctgtctccacccgcaagtgctggagatctttggctttgagggggctgatgcggaggacgtgatctacgtgaactggctcaacatggttcgggccgggctgctcgctctggagttctacacacctgaggccttcaactggcgacaggcccatatgcaggcccggtttgtgatcctgagagtcttgctggaggctggcgagggactcgttaccatcactcccaccacaggctccgatgggcgcccagatgcccgggtccgcctcgaccgcagcaagatccggtctgtgggcaagcctgctctagagcgcttcctgcggagacttcaggtgctgaagtccacaggggatgtggccggagggcgggccctgtacgaggggtatgcaacggtcactgatgcgccccccgagtgcttcctcaccctcagggacacggtgctgctgcgtaaggaatctcggaagctcattgttcagcccaacactcaccttgaaggctcagacgtgcagcttctggaatacgaggcgtcagctgctggcctcatccgatccttctctgagcgtttcccagaggatggacccgagttggaggagatcctcacacagctggccacagccgatgcccgattctggaagggccccagtgaggccccatctggccaagcttgaggaagatgtgtggccttgcccccaattccatcagaccaaggctgcaagtggccctccattcgtgtgtgtatttaggggctggggagggggaggggcaggagcttggaccttggtactacctcagctgagggtggtgacacaaccccttccatttgtcagcactttccagcctgccaattgcttcccctctgtgatctcatttcatctgcactgccatacgtggagtgagcaagacagggcttaccatcctgtctaccagatgaggaaatggcagttctgagaagtcactggtctagatcccgcaggtggcacatgacagctagggttcaaaacgttctcaccaaatccaatgctcctcacatattaattttataaccagacaaataaatattagagacaaccaccaaaaaaaaaaaaaaaaaa

SEQ ID NO: 2347 - DNA, 1258 bp, Homo sapiens
  misc_feature (805)..(805): n equals a,t,g, or c
ggcacaggggsagatggacggccgccgtgttttgggccggttctggagtggctggcggcggggcctgggtgtccgcccagtgcccgaggacgcaggctttggcaccgaagcccggcatcagaggcaaccccgcggctcctgccaacggtcggggcccctcggggaccagcccttcgcggggctgctgccaaaaaacctcagtcgggaggagctggttgatgcgctgcgggcagccgtggtggaccggaaaggacctctagtgacgttgaacaagccacagggtctaccagtgacaggaaaaccaggagagctgacgttgttctcagtgctgccagagctgagccagtccctarggctcagggagcaggagcttcaggttgtccgagcatctgggaaagaaagctctgggcttgtactcctctccagctgtccccagacagctagtcgcctccagaagtacttcacccatgcacggagagcccaaaggcccacagccacctactgtgctgtcactgatgggatcccagctgcttctgaggggaagatccaggctgccctgaaactggaacacattgatggggtcaatctcacagttccagtgaaggccccatcccgaaaggacatcctggaaggtgtcaagaagactctcagtcactttcgtgtggtagccacaggctctggctgtgccctggtccagctgcagccactgacagtgttctccagtcaactacaggtgcacatggtactacagctctgccctgtgcttggggaccacatgtactctgcccgtgtgggcactgtcctngggccagcgatttctgctgccagctgagaacaacaagccccaaagacaggtcctggatgaagccctcctcagacgcctccacctgaccccctcccaggctgcccagctgcccttgcacctccacctacatcggctccttctcccaggcaccagggccagggacacccctgttgagctcctggcaccactgcccccttatttctccaggaccctacagtgcctggggctccgcttacaatagtcctccctctgttcctgaccccctcacacacactggaaagtgagggtgggggctctgcagtcagacaaacctaagatcacatcctggacaggccacttgcttgctgtgtggcattgggcaagtaactttacctctctggacttgtgataataaaagttcctacctcatgttatggttttgaggatttgctaaaaaaaaaaaaaaaaaaaacc

SEQ ID NO: 2348 - DNA, 1027 bp, Homo sapiens
ggcacgaggaaggttttcttctgcacatgtatttgtttgatctgccttttgtgcgtggggtgggagttaggtaggaatcttaaagtggagagccagtttcttcccaaattactgacctaacccatccttaacccccagttcaaggccacctttgtgatagtgaagcttccacatgctcactcagccccttctgctctctcttcttctctactgtgcatgtcggcttgtacttttgccagtttctctaaagacacaaccagaggtggggtggctgtgtgtgcacaacttcaactttacatgtggggctgagtccctatgttgtatatccttgtgcaaaagcacaatatgttaattgctatagcttttaaaaaaataattaatagtttttcataatcaaattttcttgcttttttgttttttcaaaaaagcatacttttattgaagaataaaccccttatatatgtacacttatttataactatgaacctgaactaggatagaaatgcattgtgtatattacaaaacataacaaaaataataggggtagggaggtgcagatgttggtcaaaggatataaacctgcagttctatgatgaataagttctggacatctggaatacagcatggtgactatacttagtaatactatattgtacacttgaagcttactgaaagagtaaatctcaagtgttctcaccacacaaacccaaaggtaactatgttctcaccacacaaacccaaagggaactatgtattaattagcttgattgtggtaaccatttcacaatgtatacatttgccaaaacattatgttgtatacctggaatatataattttatttatcaattatacctcaataaagctgaaagaggggattactaattcccacaaaatacagatttaacaaaaacttttattcaacaaacagtgctatgaagttgtaaattggaaacaaaagaaataaaatttcatccacagtcttctcatcaaaaaaaaaaaaaaaaaaaaaaaaaaaaaaaaaaaaaaa

SEQ ID NO: 2349 - DNA, 1248 bp, Homo sapiens
  misc_feature (8)..(8): n equals a,t,g, or c
aacctttnttagttgagcaaaagamcaagcaatttgcttttgcaamcaataaaaaactcacttttttwatatgkgcttatcttatcatgattccatttttacccttaaacttttataggctgcaataggatctgtggctttggacacagcaaggtcacatggagagaaacaattagaagactatggaatggatgtgttgacagtggcatttttgtccatcctcatcacagccccaattggaagtctgcttattggtttactgggccccaggcttctgcagaaagttgaacatcaaaataaagatgaagaagttcaaggagagacttctgtgcaagtttagaggtgaaaagagagagtgctgaacataatgtttagaaagctgctacttttttcaagatgcatattgaaatatgtaatgtttaagcttaaaatgtaatagaaccaaaagtgtagctgtttctttaaacagcatttttagcccttgctctttccatgtgggtggtaatgatctatatcaccaaccttaatctctctgccttttttttcaaacaccccttcatcatccatcttaatttgcataaggacatatctactttaatgtactaccacagtttacagttaatgtgggaaagaccagcttcagtatcctcttcagctaggattgccctaacttttaactttcacagtttcctgattcatatttgcccaggctctgatgccttgaattggttttggctctcttttttggatctgtttttgttgttaaacatcataatgcagtctctcattaatttttaccatcatttaccctgataatctgcctcttctccatttctccttcccttactacctttctttgaattactgtaactgattggtcccaccaaaattttaaagtacatgaagtatcttcattggttcatcctcttgccccctccagatgtcaaaaaactttatcctgccccctagctgaccacccaggttcctttatttcagtggcccatgtgagtctaccttcccctaaggagtgccctaatccagccctttttttgtttcttatgacccatatctttaggctcttcccatttctaggtgggagataggtaagtttcaaatctatgccagtcttatgaatattacattagggtaatgtgctataatgaagaaataaaaaatacagtgcttaaaagaaaataaaattctatttctgtctaaaaaaaaaaacggcacgtaggggggggccccggt

SEQ ID NO: 2350 - DNA, 1019 bp, Homo sapiens
tttttttttttttttttttttacataagttttacaagataatacatttttacagtgacctgatgtggatacaactttgcaacttggcaaaaagcaaatcttaacttacattataattaatttgctgcattttacacatctctgattctcaattttggcaagtacaacaggttaagggttctatttagtgtccccttctgatgaatatgatgatcttgaacccattcttcctcctcaagcacggtcatcctcctctgatggcaacagcagaacctctgggaaaggaacctttcggtatccagaactcccaggtggcagcccagtgtgggatttggagcatgacaacaaaggcattttctcaacatttactaaaggagagtggggtgttctatacgctactgatggggactgtacatgaacacatttaaattgaattacaacaacattttagataggaaatatagaatcttataagaacataatctaaattataaccaattttaaatagcaaagtttaacaataaagctacttaagtgtttgaattagaaataaacagtaaaacatctgtattaattataacagagttgacatttgttatattttatcttcagtattaaccaaaggagtggaatttagccagggttgcactttttaaaagttgtatatacttttatttattttacaaaaggaaaaaaaaagacatacttttcccataaaattccaggtcttactatgtaaaataaccatgcactacttcatgttataatcataattttagactatttccagtaggtaagtgtcataaagaaggaagagatatggcttccacagcttcaatgaggtgtaaggctagaccatattgcccatgtttttctggtaaaagctcaattactttatttactagtttagctgttgttgcaattggcacttcagtgttttgaaggtcctgggggtccattgctttcagccaagtacacagtgtgggtggaagtctggcaagcagctccattcctcgtgcc

SEQ ID NO: 2351 - DNA, 1309 bp, Homo sapiens
ggcacgagagattcacttgtaaatgttttcgggctccctatactagaatatgagttcagtgactgtggagatttttgtttggtctgcatgctgtatttccagcacctcttttcaccctttcctcgcattcataagactaaaatttatcataatttggatgtcttttaggattggaactgttggagtaagatcgtattgtcatcttctcactaaagattttgcaggtggaattatgtgtggatgctacctttaatttctagcattaaaattctgaagttactttattatttttctgtttgggggtggggttttttttgttttggacagagttttgctcttgtcgcccagcctggaagtgcaatggtgcgatctcagctcactgcaacctctgcttcctgggttcaagcgattctcccgcagtagcctcctgagtaggcattcaccacaccctgctgttttgttacttgtttgttttttgagatggaatctcgattgatcgcccaggctggagtgcaataatagcaccatctcagctcactgcagcctccgccccccccagggttccagagattctcctgcctcagcctcccatgtgagctgggattacaggcatgtgccaccatacccagcgtaatttttgtatttttagtagaagaaagggtttcaccgtgttggccagactggtctcaaactcctgacctcaggtgatccgcctgcctctgcctcccaaagtgctgggattgggggcatgaaccaccgcacccagcctgaagttactttggaaacaaatatatttgtatatgacagcttgtaaaactgtagtgagaagagcagaatcatatatttctcagtgaaaaagaaacaaatcttataatgaagcacagaagaggctttaagaattactgataccatcttgccttttctcctttgttggtaggaaattagtaaataagccaggtttgatggctaaagagtgatttctggagttttttaaaagttaaaatcttttcttattaggcatccacctaccccaggtttgggaaatggtattgaatgttgggctttcccttgtgttttagtgattatttaaagcttgggagtgtttttttcttatttttctgcaggtggttatcactaggctaaaactggacaaagaccgcaaaaagatcctcgaacggaaagccaaatctcgccaagtaggaaaggaaaagggcaaatacaaggaagaaaccattgagaagatgcaggaataaagtaatcttatatacaagctttgattaaaacttgaaacaaaaaaaaaaaaaaaaaa

SEQ ID NO: 2352 - DNA, 2255 bp, Homo sapiens
ggcacgagctcaagagaggccttttccataatctctgtaagccagcctggaaaggctcacaacaattttcccaagatgtgatggaaaagctcgtgttagtattggcaaatttgtttggaagaaaatatattccagcaaaattccaaaatgctaatttaagtttttctcagtcaaaggtgatccttgccgaactcccggaggattttaaagctgctttatatgagtataacctggcagtaatgaaggattttgcctccttcctgctgattgcttccaagtcggtgaacatgaaaaaagagcatcaactccctttggtcaagaatcaaattcacaggtaaagaatgtgaagactcccaactcgtgtctcacttgatgagctgcaagaaaggaagagtagccatttcaccatttgtttgtctttcggggaacacagataatgatttgcttcgaccagagactatcaaccaggtcatcctgcgcacagtcggtgttagtggcactcaggctcctctgctgtggccatggaaattagataaccgaggaaggagaatgccactaaatgcatatgtgctcaatttctataaacacaactgcttgacaagattagaccaaaaaaatgggatgcgtgtgggacagcttttaaagtgtttgaaagattttgcattcaacattcaggctatcagtgactccttgagtgaactatgtgaaaataagcgtgacaatgtagtcctggcatttaaacaattgagtcaaaccttttatgagaaacttcaagaaatgcaaattcaaatgagtcaaaatcatttagaataacaccatggaaaactttcaagtctgattatgtggtatttatccctttgcaaggagagatataattaagcttacacaatgaaatggaaaaaatgtttgtcttggagtcaaacagaattaaactcagataccagctctgctattttctaactgaatgactttaagttatgtaatatatctgagctttaacttcatttttggcaaaaccagagtaaaaatgaatacctctagttgttttgaggattaaatgagataatgtaagaaaagtgattgggattgggtggtgacttaatgaacggtagtggttttttaagtagttaatgtatagcaaaattagtttcacattgtcaagttttcaatacatccccaagttaattgaattttaaattaatgatcaataaatcacaaaggacccaaatcaattctgaacaacaatttagttatgtaagaagacttctgagattacaagaaactcactgctgtggactggatgtttgtgccctcccctccaaaatttttatattgaaattctaaccctcaatgtgatggtattaggagatgataggtcatgagggtggagctccttggatgtaattagtgcctttaacagagagacaagagagcttgttctccaatctctgctcactaccactggatgatacaatgggaagatggccatctgcagaccaagaagcaagccctcaacagaactgaatctacttacaccatgatcttgaactttccagcctccaggattgtgagaaatacatgtttgttgtttagccatctagtctgtggttttctgttgaagcagtctgaattgactaaaacagtcacttggagtagttataaaccactttcctgttgaaagcagaacatgctgattccactgttttgttcaatagcaatgatagattttgtttaagtcccctacactttcttatttctaaatgatcaagagtacacttcctggcagtgattaaggagtgtgtatctaacagaaaaaatatatataccctgtgaacccgaatatggaattcagattgtttctgccctcagtatcatacttaaaaaacaagcatacaaacaaacataagggaacaaacagcaaccataacaaaaacaaacctttaaaggtgggtttttgctgtgataaatgaatacggtactctgaaggagaaaaaagtttctcaaatgagcttaaactgcaagtgatttaaaaattagagaatataattcttaaagctattgaaagtttcaaccagaaaacctcaagtgaattttgtatgtaaatgaaatcttgaatgtaagttctgtgattctttaagcaaacaattagctgaaaacttggtattgttgtagtttatgtagtaagtgacttggcacccatcagaaaataaagggcattaaattgaaaaaaaaaaaaaaaaaaaaaaaaaaaaaaa

SEQ ID NO: 2353 - DNA, 1659 bp, Homo sapiens
ggcacgaggagaatctgccttctgatgagagctgtctttctcttgatgatcttgccaaaaggatagagattgcagaggttgttcctactgaaggattggtctccatattaaagaagaggaatgatactgtaggagatcatcctgcccaaatgcaacacaaaccatctaagcgaagagtgagattccaagaaatagacgatagcttggatcaagatgaagttggaggtggctcctgtattttgctggtcttgctgtgcatagcaacggttttcctcagtgttggaggaactgcattatactgcactttcggtgacatggagtcacctgtttgtactgactttgcagacaaatggacttctattacactaagttacttcagggagtggcagaactgaagcactggatctacctctcctagcagcattccagacacagacatgctggcagtgagagtgaaaggcgggagactttctaaacagtttttctttcaggaattctgtagcattcccccttccctctgttaggaaccaaggacatcagaaatagcaactttaagtggcaagccggaggaactctgttagaataatccacacagtgaggcaaatatcaatctaagcattgtggatggaaggaatggtctttggagagagcatatccatctcctcctcactgcctcctaatgtcatgaggtacactgagcagaattaaacagggtagtcttaaccacactatttttagctaccttgtcaagctaatggttaaagaacacttttggtttacacttgttgggtcataaaagttggctttccgccatcacgcaataagtttgtgtgtaatcagaaggagttaccttatggtttcagtgtcattctttagttaacttgggagctgtgtaatttaggctttgcgtattatttcacttctgttctccacttatgaagtgattgtgtgtttgcgtgtgtgtgcgtgcgcatgtgcttccggcagttaacataagcaaatacccaacatcacaaagatgatctttcttcttttaacttgatgatgatgtgcaggcacaaatctttggagaaggcttaactgtggaatagatgaattctagaactcttgaccctgcaatgagaaactgtgacagatctgtgtcaattaacttgattagccagaaattaatcacaggcctagagaccaaagaaaaagctcccctgagtctcaggcaacagttttgtcacggatgcaaagcttcctgaaatcatgaatgctggactcagtttggcaaacgcttacacctattatgttctgagattctgagaaccagaatgcaaacttaagtaagatacagttcccactgtaggtgttttaatcctggtcttatatagaataaaccagtactttgctgagtgaaatcaccatatagaattcagtattaacagatcatgcattcagatgcttgaatgtgcattcttgttgtgggcttgatttagatcctattgcggggtcattacgcaaaaattcaatcataccttccatagacaaatgtctgatttttgtttaaatctgtccgttaggtggcctttccttatctgaggtgtagtggtctaacatttaggaagccttgctttgactttatcgggcagcattaaaaaaaaaaaaaaaaaaaaa

SEQ ID NO: 2354 - DNA, 2845 bp, Homo sapiens
  misc_feature (813)..(813): n equals a,t,g, or c
  misc_feature (836)..(836): n equals a,t,g, or c
  misc_feature (927)..(927): n equals a,t,g, or c
ggcacgagataatatataaaaagtaataaatataataataaagttttttaactttaaaaataaaacacgctttaaaagcaactgctacctcccctcccccccactaataaaattctagtatgataaaaatgaataccctgctttcattggaaatttctagcttacactttctctctcactccgtttctccttttctgtctctctctactccttctccctccctccctccctctctctctctgtctatatcaatttgctttaagaggaaactgggaattaaacaaactgggatcaatgatgtaatgtatctttagtactttggattttctaaacaatttcctgtagtttctgagagttgtattttaatcacattcatagaaactcagtcagtctggccaatggaggagaatagtatagtcctgctctttcaaattatgttgagcaaaatggctttcttctctgggaatgcactgtactcaaagatataaggtattagactagaggctcccttaagttacggctagttctaacgttctaaaactctaacacagaatctttcttctgttggattgttagttctttgaaactagacagtgtgttctaaatactaaccctcataataccctgaataatacagttagtatgttaaaaattaattaaaagaatggtcatcacaactttgaattccatggtacactttccacaaatgcttctgtttgtaccatgtttgattagtaatgtgaccctttctttcccatgtttagtgatttagaatctagaagagaagtaaaaaaagaagaaggtgaagctttngcacgagaacatggactcatctncatggaaacgtctgctaagactgcttccaatgtagaagaggtaaataagaggccctttaaaatcttcatctttatacttaatagaaatgtnttatatatcttcattttacttattatttaagtttttagtcggatggtctttgaacatcataaagtaggaaagtttcttccctttgaaatcccttgtaacattcaccttctgtcagactcttaaatcatattgagccttctaaagcctgaatgttttcttacatttttgtacgtattttcactccctccctttttctaaacaatttcctatagtttctgagagttatattttaatcacattcatagaaagtcagtctggccaatggaggagaatagtgtagtcctattctttcaaattatgttgagcaaaatggcttctctgggaacccactgtactcaaagatacaaggtattggacttcttcgtgttgcatggtagggaaatcttttttgtgttgcatgggagggaaacaaggaaccacactaatgaaatttggaaatgtttcaagacagcagaacgtttgtagctatttatatccacttctgcttattttttttaattttatttatttttttaactgtcaatatattaccacatcaccacttctgcttaaagtattctattattgctgtgtaacattttacaaagcatgagaatcctgtttcatctattgatgaaatttgtattatttcatttatttccattgatgaacctgaactattggaacttttctgaacacagtgtatccttttatgctgtatgtgtttgtgtttggaggtagtatgtatatacatattataaatagatgattacatagttgatcctttctaaggtaaatgtattactatactgttattttataaaaagaggtaatgaagctaagaaaagtagtagtttatccaaagtaatacttagttcccgatttctagataagaacagcttataagagcaactacagaaagtagttctaaaaaacaaatgagttaagaatcactgccgtaaggataacagaggtcagggtcctgggcaacagctagcatgtgccttcaatgtagtaagcagtcagtaaatatttattaagaatgatacttggagctcttctgattaacccttgaacctaaaaattgactacagtaattctacagcattggtattttcaccgaagaattctttcttaggtaaaatattatacagtcatgtgttgcttgacaaaggagatacattctgagaaatatgtcaccaggtgatttcatcgtcacgtgaccatcatagagtgtacttacataagcctagatggcatagcctactactgcacctactacacacttctcttagtagaccttggtgccagaggaatgacacagtgatgatttcccttggttttctttttgccacatacccgagactgggtgctagagaaacaggcaacctagaaaggtcaacaggcacagaaaaaggaaagtcttctagccagagaaccaggaaataggcaggtcagaacagtgttcgcaagccagaacactcttagaaagtaaccattctactgtagccaaacatcacagaaaaaattgtggttctgcttccacaatccccaggcagtaatgaagtagcacctaccaccaccatttcccttgttggagtggagtgagaggaagccaactaaacagtggtttaaataagacccagagtctcataacatagtatctaaaatacccatgtttcaatagaaaatcattcatcatacctagaaccaggaagatcttaaattgaatgaaaaaaagataataggtgccaacagtgaaatgacagtggtgtttgaattatcttacaaagattttaatgcagcaatcattaaaatgcctcaacaaacaaggaacatgcttgaaacagaagagtcttagcaaacaaacaatctgagcaaaagaaatgcaagataaaaaaaagaaccaaataggaattttaaaaaaaaaaaaaaaaaa

SEQ ID NO: 2355 - DNA, 1647 bp, Homo sapiens
ggcttttactcatcccttcttttagaaaatgctgccttgacagtctgattttcatggtatcatgatccgctatctcctgatgtgtcctctgtacatccagctgctctttctcactctcttatttgtgctctcacttccttaaattttaaccttcttctcgtgctgcactttctccaggtatatgagaaacctctccatttttcactttcatctgtattgctctttgcctgttggcctcaatttctcccaccacaagatgagcccctatacgtatctaagaatgtggcctcaagaaccccagtgtggcaatcccagtgaaaagccttttcccagtactcatctttccatcctggggaaggcatgggattgcttttggttggttgtgtacctaccctggcacacagcactattatcagagtgatgggccaatacaatatatggtgagggaaatgaggttccatgattggccccatcagtcacaaggatggaaaggcagtttcctaagacagatgtatcaggcaggagagaggagctatacaatgtcaacagggaaagtgtaatataaataatcatgaactaataatagagggttagccactaagggataaaaagaagtctaaaggttacagaaacaggtgaatggataaacaaaatgaaatgttattctgccataaaatggaatgaaattctgatacatgctaccccatggataaaccttgaagacattatgcaaaatgaaataagccagactcaaaagggcaaatattatatggtgccacttatacaatgtaccatgaatagtcaatccataaagacagaaagcggaatggaggttttcaggagctggaggaaggggagaatgggaagttattgtttaatgggtgatacggtttggctctgggtccccacccaaatctcatctcaaattgtaatcccatgtcaagggagggacctggtgggagatgattggatcatggaggtgattcttgtgatagtgagtgagttctcatgagattcgatggtttaaaagtatgtggctcccttctgtctctctttttctctctctcctgccactttgtgaagagatctgccttgcttaccttcaccttccaccatgagagtgtttcccaaggcttccccaggcacacagaattgtgaatcaatcaaacctcttttcttcataaattacccagtctcaggtagtatctttatagcagcgtgagaacagactattacaatgggtatagagtttcaccttggactgatagaaaagttttggaaatagatagtggtgatggctgcaaaacattgtgaatgtatctaatgtcactgaattgtacacttaaaagtggttaaaatgataaatgttatgtatgttttaccacaaaaaaaaaaaaaaatacaggccagcctggccaacatggtgaaaccctgtctctactaaaaatgcaaaaatgagctgggtgtggtggcacatgcctgtggtcccggctactctggaggctgaggcaggaaaatcgcttgaacctgagaggtggaggttggagtgagccgagatcgtgccactgcaccccagcctgggcaatagagtgagattccatctcaaaaacaacaaacaaacaaacaaacaaaaaaaaaaaaaaaaaa

SEQ ID NO: 2356 - DNA, 640 bp, Homo sapiens
ggcacgagaagaaatccaaactacaggctctttaatgagatcttccaaattttaaatgtcttctcaactttttaaaatgaagattaaaaactgtgtgacccaaataaaacagacatgtccacatatgttttttagggaaggatttttgtatctgttcactgctgtattcctaggctaccaaatgaattcagcctgtaggcctcgaatttgcaacttctgacttatatgtaaataaataataaatgtattttttcttttttgagacggagtcttgctctgtcacccaggctggaatgcagtggcatgatcttggctcactgcgacctctgcctcctgtgttcaagccattctcctgcctcagcctcccgagtagctgagactacaggcgtgcgccaccacgtctgactaatttttgtatttttaatagagacagggtttcaccatgttaaccaggctggtcttgaactcctgaccccaggtgatccgcccacctcagactcacaaagtgctgggattacaggtgtgagccaccgcacctggccaagtgttgtattcttaatcatctggaaaaaaataaaaaaaaaaaaaaaaaaaaaaaaaaaaaaaaaaaaaaaaaaaaaaaaaaaaaaaaaaaaaaaaa

SEQ ID NO: 2357 - DNA, 706 bp, Homo sapiens
ggcagagagatcacacccttgcctattactaaagatgaagggaaggatgtttattcagaagaacagagagcttgcctggaacagagctacttgcttgtatgttgggttctcccatatggagtgagtggacacagaaaaccatgctttctgccttgaccttgtacatatggcttatgtgacctttggcaaatcacttgctttctctgagtctcgttttcctcgtctctaaaaaaaaattaaaattgaatagaggatggtgtgagatttcagcaagattaaaaggtataagaggccagtccactgctgggatatggagtgtggtctgatgatccttttaaagaatggctgcctgggagttggggagtaggcggctgtcatatgaaagaccctgggccaggtgcagtggctcacgcctgtaatcctagcactttgggaggccaaggcagaaggattgcttgagcccaggagtttgagaccagcctgggcaacatggtgaaagcccatctctaccaaaaatacaaaaattagtcattcgtggtggtgcaaacttgtagtcccagctccccagggggctgaggtgggaaaatggtttgagctcaggaggcagaggttgtagtgagccgagatcatgccactgcactccagcctaggcaacagagccagaccttgtctcacaaaaagaaaaaaaaaaaaaaaaaaactcgag

SEQ ID NO: 2358 - DNA, 1264 bp, Homo sapiens
  misc_feature (1211)..(1211): n equals a,t,g, or c
  misc_feature (1256)..(1256): n equals a,t,g, or c
gctcgtgccgaattcggcagaggcaacccaggcgatggtttgcggtgaggggtaattgaagaggctgtaacgttttttgctgccaagagagaataaattatttaagggaggcattagctactgcgatwtaawtcgtatcgctgggtgtaatrcccctctccccattctgggtataaaaatgttggctgcattgttgtgttagtgtgtggggatcaaggaaaacccataaaatctctttaggagcaaaggatgtaatttaatttcgttcctaaagaaagaaaagtatctgattgcagawtacacaatatattaaaacttatttttctacatgtacttctggaagggtcagatcaaggttttatttagtgtttttattccagtactctaatattttataaataagtagttggagatgagcccagtcacaggacaratttttacygaaagtacctttawayctttagtttgattaaatggcagtctcttagacaaatgagatgaaaagatcyctgcctatttycagactttatttattgkaagcttgcagtataataactctgtcttttaaaaaatgactttgaattaagtgaataaagaaaatcatccaggaaattcagtcagtggcattcttaatctgtcagcacttagttatcgagctccttgattcttatacgaaggtaccctttgaattaaatataatcctgtgatttattacttaatatttagagaagatatgtattttgatattacaaagtccattagaaactaaactataacaataagcatactaatcttactgtttctttaaaaaagaaggcacatgtaatattgacatatacaaatattcagtagacgttagatttctaaaaaatgagatcttgattttttaaaaaacactgtttacagaattttattaagtttaaaatttagagacaggaatggttgacagtaacttatctgaaaaatttctcagtgaagctcgctggttttgacatgcttgttttttgtaaatcatcatatgctttttgtatattcccacaattgataaaatatttcgtacatttttcatattcaaaaagcaaactttcaaacgtatgctaaatttaagggattacaacagaacattccaraaagatgaaaagtatttgctaaaatgattgtggttactatttttggacccgtgatttgtgatttaagtattttgaaaagcngagtatcttcttggctgtgtaaggttggagtgggtttagagtatntttgtgta

SEQ ID NO: 2359 - DNA, 2249 bp, Homo sapiens
ggcacgagcgatcatgaatttttgcgtggaaccaagcttttggtttataaattgatcagtaaaattattgatgtaaaaaccaatgtacagtgcattccacaactgtttatgtttagcattgcacgtactcacttttctgtatgatgtgggcagctcagtaaatcttcagagaaaaatctgactcagtcaagtcagggatcctgaaagctgcagatggcacaaagaccttttacaagtgacctggcttgatcactgcacacgccatccctggtacctgaggcagaagacacatcttgtgcttccctagtcatcaggttcatcacttcgaagcatagaagctgtagactgaccccgtcaacagaagggtcatttaagacagtgctgatcactcttaccatggaatattagcttttgctggtgggaacattagcttcctagtcaccaaataactgtatgtgggataaaactgaaccttgaactgcctcataaaatgactttatattttaggacatgggaagaacagaagacagagcatgctcttttaagtctgataacatggtttcaagcccagcccccagcctttcttaccaatcaaggactcagaactgaaggcaattatttcttttggtggacttggaatctccgtttgtctacactgtcctcttcacagtggagtctttttatttcagacctacagattgtttttatatttgttgtcacagtgtgacaattttttgtacagtcggttttaaggtcttctctgccattagagccagtaggttacagctattgatgtaactatagctgcaatttttgtgcaggactgagaaacacagtgcattatttattgcggaatcattgctgctaaataactactgtctgtttatttaacacaacaattgaatgcctgaagaagttgcagtggctttattatatgtgaatgcatctgtttctcctcacgaattgttttactgctgcattttttgtttttaaaattaaactgcagtgtttcctggaatgtaaatttagctttgcttaatagtaaaataagtgagccatcttgaacactttaagtttatactatataatttcttaatgaacattggcaaatagagtagctaagagattgacaagcacattacgtttagataagcatgtgatgcagaagttgattcaagcaagtgaatccctgacattttgaggatctcacattagacaccaacaaattaaagctccaaaattatttattttttatgtgttcctcactttagaaacgtctactgcatattactggatatttgtatactaatacacttacctattttacattgtgttttaaatttagttaaaacttaaccgtagaagtctgttcaaacgcgaaaggtcttgctttgtttgttttaaatacatttattttattagaaaggatgatatttcattggggaatagtttctttcatttgggggctatgtgtttcaataacattcacttggaatcagctgaaagctgtaatatgtctttgaaatgagccatgataaattacaaacaagagaaatgagaacttacaggattgcttgaaattattgtgggtattatctgtttaccagagatactaaatattagttttaattatgcatctctttgaacatcataaacacactttggtgttggtaacagtattttaagcatttttgttcacttttaaggactatttgtttagtgcatcttacaaactataaatcttaattggtatattttgaaatggtcgtgtaaatttttgccttatatatcatgaaaatagtcataacttaatttcttttcctgaaattcactgtaaaacattcaggggtcctaccatttctgttcaggaaatcttgtagtttattgttgttatttaacagtattaagtggatttttgtatatttcattttaactttatttgtgaatagtgattgtggcatgtttggggtgttattttaatatttcacgatactaaaattttaattttaaaaaattctggaagaaacagattcatgtgtaatggtgaatattggaccactactgcttttcacatttgtaaattggttttatgttaaaccttgtagcctaacaaactgctgttctttctaactgacagacatgtattaatattgtactttgaaggttataaatatgtggaaattccttcattttgttttgaaatttataataacaaaatctccatgttgttaaaaaaaaaaaaaaaaaaa

SEQ ID NO: 2360 - DNA, 1450 bp, Homo sapiens
ggcacgagattttcttaagtacatctggtcaaacatatttcctgtatgctttggatgatggcacaatacaaatacaggactatcccttacatctggaagcacaaagtatagctttcacaacaaaagacaaatgcccatacatggcatttcataacaatgttgctcatgttttttactttttggacaagggagaggctctgacagtttggactcagatcgtctatccagaaaacactggtctgtatgttattgtggaatcttatggcccaaaaatattacaagagagtcatgagatttcctttgaagctgcctttggatactgcaccaaaactctgacactaacattttatcagaatgtagattatgagagaatatctgattactttgagacacagtgttccaaatagctgttggctgtgatgataaaaaattcattgcaattaaaggatttagtaaaaaaggatgtcatcaccatgatttttcatacgtgattgaaaagtcatatctgaggcatcagccatcgaaaaacttgagagtaaggtatatttggggagaatatggctgccctctgaggcttgacttcacagaaaagtttcaacctgtggttcaactatttgatgataatggctatgttaaagacgttgaagcaaatttcatagtgtgggaaatacacggcagggatgactatagctttaataatactatggcacagagtggttgtttacatgaagcacagacatggaagtcaatgattgaacttaacaagcacctcccactagaagaagtctggggacctgagaactataaacactgtttttcttatgctattggaaaaccaggagacttaaatcaaccatacgagattatcaacagttctaatggtaaccatatattttggcccatgggccattctggaatgtatgtatttcgtgtgaagatcctggatccaaactatagtttctgtaacctaacagctatgtttgcaatagagacatttggactgattcccagtccaagtgtctacctggtagcttctttcctcttcgtcctgatgctgctcttcttcactattcttgttttgagctactttcggtacatgaggatttatagacgatatatttatgaaccacttcacaaacctcaaagaaaacgtaagaagaattaggaaaactgaaagtttgtttattacagatatatgcatatagagaaacagtgtattacatagtgatattgagaggtgtgtttgccctaacatactatatataagctcgtagtaggcatcaccaaattcaagatctggatatattctgaactatctcctaaatagaatgttttcatatatattgttattaaattaatcctttgtttgcattcatttttaagatatatatgtacttcacatggcatgaaaaataaactaaatttgactattaaaaaaaaaaaagaagta

SEQ ID NO: 2361 - DNA, 1645 bp, Homo sapiens
ggcacgagctaagtaatcaattgaggttattccaaccaaacatttaaaatatccttattaagtgtccaccagtgagtggtactaagtgtgacatactgtgcacaatccttgctctcaagaaacatgaacagcatagctaggaagaaaagttggagaggacaccagggcataagcagattcgcactgcaagataaagcaaaaagaagataagtgccaagtaccagatggaatgaaatcatgttccttttgctctcttgcccagcctaagaagacaggccaggggagtttgtgatcatggtacagaaatggaggctattgctcaatttgctcactctgccccatcggtcaaaattgctattcaaaatgtgccttactccctattttgtatttagagtcttggattcttatttgaaacttggcagctttggaagctgtcttatattttgttctgctttaagactttcactgccaagtacatattcaggctttgtttgccagtttttttgattgtgtggttgaatgccatccctggaaagatgtacttttgagctagtatgaagtcaatgagctgccttcagcattcatgaagaggttctgaagtttctgtttcaaggcttttgacatgtcagcgtgtgtaaatctagtctgatgccaagatgccttatgccaatgggttccttttgattttggtatgcatgattttccttgtgcatattaacctgttgccattaaaagaaacagaaaattataagatcatgtaatataacataggttctagccacaaataacattagtactgtatcacaacactagtggattttggtttgttagaatttttaactgtcttggcttttttttaatatcctttctaaaactgtgtattcaactcctgatttttcattcaacccatgatgatgcttcctgactgctcagctggaatctggatttgccttctttcattcagcacacttctgaagcagtggcaggtcttgtggggaattttgggggtagcagattcaaatttggcaggaccctggggacattaatcaattggaaaatatcaatgagcaaatcatttctcagataaaatggttcaattaaaaatgatattgaactgaaaaaaacaaaacgttaccaaactaaaaatgtgtacaattcataggctccacgatacgtttattttgtttctatgtactttttaggcttgatcttaccatctttataatttaaataattggcaataacttataacttgttgtaatgataatgagttcacctttactacttactccctgaccgatgttgtggccctctccagtgccttcctcgcttttattatgtacccacagcagcctaatacacagccctgtggccagcagcttccacaatatttgttgtggaaaatactgattgatattttgggtgaaaaattgtaacttaatggtactttatatcattattaaacatacataatatttcaaatattaaataattgcaatgttcctcagataaaaacacgtctatccaacctggccattggaagtaagagaaaacttcccacagaaaactcttaatatattatttttgttgctgttgttgtctgtttccaatgtttattcttttgtccaaaaaaaaaaaaaaaaaa

SEQ ID NO: 2362 - DNA, 979 bp, Homo sapiens
  misc_feature (9)..(9): n equals a,t,g, or c
  misc_feature (23)..(23): n equals a,t,g, or c
  misc_feature (976)..(976): n equals a,t,g, or c
gaactcccntgaacaaattctgnagctccaccgcggtggcggccgctctagaactagtggatcccccgggctgcaggaattcggcacgaggtaaattccaaaaaaattcctaaaagaaatgttcccgtgcccctgccaccctcactcactaggaatgcaacaatgcattggacaggagggtctcggcaatcggcttgggacccacactgtctaggaaagaaacttctggtttccatgtgctgactgagcaacaaccccttggaagaaatccttgaaaaactgggatgttctatggagggaagctactcatgagttgtgtaacttaggcaaaggcattcaccttttctgagactcagttttcttcttatcaataaaatggagctaacaataggcaccttcagaattatgatgattaattggctcgtgttttctcaacactgtcaattgttcttgaggtcactattgttacccctacttctatgcacccaccatgtatgcatggaatgtgctagaaggggaagaggtagtgggaggtgatcctggggcaaatacagctaagacctccccccatcctacatgcactcattcttctctttcctctgktagtctggaaggggttggggctgttggaagaaaaggaacataaagcagagagaaggatgcagtgagggtgtctgggactgttggcaggcarcagtcgggtttgggggctacagggctctgcaattgaggaagccagaggtggatgaagagttggccacacctctcccctaaagctgcagaatcttctgactataaaaagagctggtgcattcagaatcctctacaaccagtccttcccctgaccttcccagaagcttcgaaccctcagtgctgagctgccaagacgagctgggtgactaacatagccattctccagtttggggatgtcagaatgtccaccccttccccacktctgggggcggaccgaacccgngcg

SEQ ID NO: 2363 - DNA, 2952 bp, Homo sapiens
  misc_feature (1145)..(1145): n equals a,t,g, or c
atttacagagacaactgaagtaaggaaaactaaaatcagaaatggaatatcatttacaatttgggatcgatggaccgtacatggaaaagaagatttcaccctcttggatttcataaatgcagtcaaagagaagtatggaattgagccaacaatggtggtacagggagtcaaaatgctttatgttcctgtaatgcctggtcatgcaaaaagattgaagttaacaatgcataaacttgtaaaacctactactgaaaagaaatatgtggatcttactgtgtcatttgctccagacattgatggagatgaagatttgccgggacctccagtaagatactacttcagtcatgacactgattaatacaagttgtcttaacgttactccaggaccacttgattttgggaaagagtgcacttaattcagaagctaaagaaaatcagttcataatactatggatttctctttcattaagccttaattttaagggaaacatcagtaagaaactgcactgaagaattataaaacattttggggcatagcatacacttgtctaacggttcacacgtggctatgatcacaagcaactttgaactggaatgctrtttacaaaagttttgtgtattaatctgtgtattaatctctctggataaaaagaaggaaaaaatatgtatgaccagaacagatatggatgaagaaattgaaagcaacgaatgcaactattcaaaaagtttaattttatgaatttcttttttgtttagtcttgaagactgattttctatgcaaatagtgtttggcatcctgcacctctgatatgatttggctttgagatttataccatgggaagaatatgtatggtggatgaaggtggatattttaaattgtgcagttacagtttactgtcctattacctctgctcgtttaaccagtttgttatatcactgtgtccccaaaatcaggatttttgttgatagcatcagtgttgtaggagcaataggtcagatgagacatattaacttagactaaacgtgaacagtattatatggactctcacaacgctcttagagaatccgtgaatgtgaacagacaaatgtggctaaccatttgattcttcagtatgccttctaatgtggctattttatttatgtgnagactctaaacctgattgtcctaatatataaaactaaaagattttgtaaagggagtgtctttagaaatagatgaaatgtagaatgttaaaaattattgctagggtagtcttttttttttccagaaacctaattagggtattaaattttgtgttttttttgttttttttttttaaacagaagcatgttatttcattcccattcccagaaagggagttaatgaagataaaaatttattttttaaggtctttattgagagaaactttgttttctgatatgaactattgcagatgtttttataaatactttcattaaaatgatgtaaacagtagtacccaacactgtaaactcagtgaaaatagtaaatgattcttttattactaagactgtyatgcattctgaagcagttggcttttttttaaccataggaagtcatttccctctagctccttcccttctactctcctgctcagaccattagtaggtactttgttaaataaaaaactagattaacatcaatattactccaatttggtatcttttacactatgtattatacctactttctttttatttcatttacaaatagtttaaattactttatcaaccagctgtattgtttccctcttgtaaaagtaccatcaagtggggaaaatgtatgtggaagtggagagtgaatttgtatgactaaaggataatctgtacatggggaagtgggcaaaagtggataggatgaatttaaagaaaatgactacctttggaaaaaagaaattaaattttgttcacatatcctaccctttcccattgtgcatatcccaagtgtcatatttaaaactaaggttacttaaaacagaatccaggaatatcaaggctctgtggcttggaattttagaggataggactaataaaaggacttttgcaaagaaggcttttttccacgttcactttgttttgtgttctttgaaagtaactgatacttttcgggtagttaattcagcagtccataaatatgatccagtaacttgcttatattttattgaagtctcgacagctcttcagaagtaaatttagaacgatgctgtcagttcatatttatagatattagtgttttagcagataaaacaaaatcaacaaaaattaagttcattttgtgattaaacctgcaaccatttttccattactttttttctatagttaatggttattgccatgatttcttctgtttggttctactaagctagaaagccagggtgaagttaatgataattcccattattttatttctgtaccatgagattgctgttgatgactgaaataccaggtgcaaaaattaatgatttgatttttgtacagtttcaatgagtattttttacttattaaaaataaattaagaaatgtaagaatatctttgtaaatcatgtttcataagttgactccagagattctgattttgctgtttattttgtgagtaatgttgctttggtgtttcctgattttcaagtttgcaatcatggagatacagcagttattaggtgtggaaggacattacctcaaatgtcctcagatggctccaggaaattcttttaaaacagttggagagaaatagtcgtgaccatgtaaaacctagaggatctggtaaatcccatactactggttagggatttgtaaagtccatttctttttagagttcaaagcagttctgttacttgtccataagttcctcataaattgtcccaaaggtaggacatggaaataaatgtatatctttattttttaatctactatgtcacactctggtgatattcatgg

SEQ ID NO: 2364 - DNA, 1117 bp, Homo sapiens
  misc_feature (35)..(36): n equals a,t,g, or c
  misc_feature (1096)..(1096): n equals a,t,g, or c
  misc_feature (1114)..(1114): n equals a,t,g, or c
gggactttttactggtaaagctcacaaaagctggnngctccaccgcggtggcggccgctctagaactagtggatcccccgggctgcaggaattcggcacgaggagactatcagcggcagcattctccagggaagacccatcccctagtgccagagcttgcatcctggagactaaagattgcacttttttgtagttttttgtccaaatgcaatcccatttctgtgcctcttagcatgcagttagatttggacaaacaagattcctaaggaatgactttattaactataatatggttacagctattatataaatatatattctggttatagttctaatatggagatgttgtgtgcaatgctggcctgtggtggtctgtgtaatgctttaacttgtatggaggaggccaggctcagagctgagatgtggcctgaaccttccctgtatcgatcctttaatttagaactgtcaagatgtcactttctccccctctgccttttagtggtatctgacatatactcaaaacagtaatttcctggtcacatcattaactgctaattctgtatttataaagaattttcagatggacatgtacaaatttgaactcaaaccatccccagtccagatacagggcagcgtgtaggtgaccacaccagagcctcagcctcggtccttctcagccgtcgggataggatccaggcatttcttttaaatctcagaggtagcagtaaacttttcagtattgctgttagcaagtgtgtgtttgccaatagatacccattatactaatgtgccaagtaaatgttcattgcacatctgcttccactgtgttcccacgggtgccatgaagtgtgtgaggagcccctcatctggagggatgagtgctgcgttgactactgctatcaggattgtgttgtgtggaatattcatctacataaattttatatgcacagtaatttccctttttatatgtcaagtaactatttgtaaaagttatactcacaaattattataatgattactaatatattttttccatgtttcattgcctgaataaaaactgtttaccactgttaaaaaaaaaaaaaaaaaaactcgnggggggrmccggaaccgngtt

SEQ ID NO: 2365 - DNA, 860 bp, Homo sapiens
cccacgcgtccggtttctgtgtatgctttgtatttttcattgagaactggatcttttgactgtaatgatataactctcaaaattcagattcttttccttcccatggattggcgatgttacttgatgcccctgcaatcatctttttattggtggcttttccaaattattttcacaaaaactatttttcttattatatgtagtcaatgatgactctcttccattacttcacggcgagcagtgctttaacagagatttcctatattatttggatccaatgtaaaatttttttaaaatgtgtttatcttttcataccttcttagactgatattactggtaaagctgcttcagcctgaagtcttgaaacagtggccagtctctgtgccagacacttagcaatcacaagcaattgtcaaaacatacaccgtaatttttgaagtacaatatacctatcatccaccctagcaccagcaagccacactggaattgttggcccccatccacgtggttgttcactatgggactgaagggtagagaatgggggccattatagaaaacagtgaatttcactgtaatgaaccctgactctttcttcataaagctatcatctggagactacaagtgtccaaatagactcgagaattccaaagtagtttctctagatacttcttgtcagttcaataactgttttggtaaaggtactaagttctggagcttctcactttgctatcatctgttatgtcattctaattttctattttctaaataaacctttgtaatctaaaaaaaaaaaaaaaaaaaaaaaaaaaaaaaaaaaaaaaaaaaaaaaaaaaaaaaaaaaaaaaaaaaaaaaaaaaaaaaaa

SEQ ID NO: 2366 - DNA, 1086 bp, Homo sapiens
  misc_feature (519)..(519): n equals a,t,g, or c
  misc_feature (531)..(531): n equals a,t,g, or c
tcgacccacgcgtccgcaaataccatgtggctggtaaaaatgatggtgtaaattatatttacagactgataaacgtaaaaagtatctgggacatagcattattgaaaagaaagcaggctagtgaatactataattattttgtaaaagtctcttatggacataagttatatatttacatggccatattttgcacaggaaatatgaaaaagtatatatatcaaacagtaatggcttatttttatcttctgggagttttgcaggtgcttccctctttacaccattatatgtcatctgaagttttgttctgattctgtattatttcatttctaaaagaaaagccccaaaaccaagtgctgttttcctggtctgtggaaacagagtctccgaggaattaggctagacatggtaagaacaaagttctgttgtgataaaagctttggcctgaggttccaaccattcagtttgccagctcagacttgatcttgaacgarggcggggttctgtgactggagaccattncycycctttkgnatttgttggtgtgtccaaaamcctcagatctcccagcttcaggcttctttgaggscagtgctaaattggttgaaacccttatttgaggcagttcctgaaaagggtaggtgaaatttcctgctgataaaaggcatcytgtgtcttgttcatccttagcaaattgccaattagcaaagaagagagggcagatgaagtaccagccaatttgaaattggtgtggacttccatcaaggtatattaattcattttacctagatgattcgaaattagttgcttttttcttttaatcctaaaaggataattttcttcatgttcttcttgtcatgtcagccaaatcctatagtgtcaactttcagtaaatgtatcttagaaataactatggaccaatctagatctttctctctctatcatctatacagtttagagattttaaaactcttaccacttagtttgaaattttattttaatttataaaatgatatattcttatgtaaaaaattcagacaataaagatgtatttaaagtaaaaaaaaaaaaaaaagggcggcctagagg

SEQ ID NO: 2367 - DNA, 969 bp, Homo sapiens
  misc_feature (10)..(10): n equals a,t,g, or c
  misc_feature (969)..(969): n equals a,t,g, or c
acccacgcgntccggcaacttcttactcccccaacggcttcactttccatgctttgtttgttcttattagcatctatcactatctagcatgtagactgtacttctttttattttgtttgtcactctcccctcttagaatggaagcactgtgaggacagcattttatgtgcatatgtgcgtgtctattttgtgcctggaacacagggggtacttaatacatttttgttgagtgaacaaatgaatatgttgagcctcatcatgactctgagctgaacaagctgagcatcatctgcatcttacagatgaggagactgaggctctgtgagcctataaaatggggagccagatcaaagccaggtctcccaatgtcatgacctttatatttttcccttcaccggtaatacccttagacttggtcagtggagatcctcccttgggcctcaaattttagagcatcccggagtctttctctggctgtaccccttaccattaagtgggatacagtggctgcctggagtttgtcctgcctcttctagatcacgttgcaggtacccaggactctggagttccctgctcagatagtcttgagcctgctgacaagaccaacattgggggtttcttcccaggctgtctctactcaacctgggcctgaaggatgggcacagggtggttgcttatagaatatatgggtagaatttgaacatatgggctgcaaggatccacccacatgtgtacaaggcccctggtgatataagatggagttaggagcagaagagaagtgatacagtaagaagtgtaagaatatgagcacaataactgaaagtaaaatctcaatggatacattaaacattaagttagatgcagcagaaaagagaagcaatgaactacgagatacatctaaagtaattatctagaatgcaacacagagagagtaaggtataaaaaatccaaataagagttcaaaaaaan

SEQ ID NO: 2368 - DNA, 1206 bp, Homo sapiens
ggtcgacccacgcgtccgcccaaggcagcccagccccgtctctgccctggtggattggtggggagctgcggagggaaacagcagccaggactacttcaaggcaaatcagggcccatgacgggggtggttctggtggctgttggggaggtggctatgaagatcctgcttctctgcctctgcctcatcctcctcagagtgaggtcttgcaggaggaaggcagcaagggcagcattgggcatggaggctgcagacgctgtcacggactaatctccagactccagactgcttccagatgcctcctcatccagttcctccacagtctgagcggccgtgtttcctctgcaggctttgcatggtctgtcccctgctggactctcctgatccctcctttccctgtcacccaacatctccccaaaccctccgggccaasgactmtgcggctcttgacactttgcacgtgtagtttcttctcctgaaacacccttccctcctgccaaaccacgtctggaccctccttcaggttcactttttttttttttttttgagacacagcctgggcgacagagcaagactgtctcaaaaactaaaacaaaaaaacaccaccaccaccaccaatgtctgattaaatctaagccacggttccattttggggcaaggggcagggtgtgggtgtggtggacagagaacgggctccagccaccatcagctgcacgtcctggtagcacctgagccattcccagtctcctgtgctgggagatcatcatctaatcctgatgatgacgccctcctctcagagctcgggggatgagctgccaaaacccatggaggttcaaaacccgggctctggagacagaagacactgggctcagagacatggggccactgtccaggctttccctgggcctggacctgggctccttccactgtctgagcagggtcagcctgggctggctgtgctggttcaagagatgagggaggaggacacagcggttgccaggaccctgaggcactggactgggcactgccccaaggggcagaggatggaacccggtgttgatattgtgatgctgacccgtctgctcacctgatttgggtgctgaagggcagctgacccccctaatcttttatagacttgtgaaacgaaaataaataaaagtcaagctgggaacagcttagggcaaaaaaaaaaaaaaaaaaagggcggcc

SEQ ID NO: 2369 - DNA, 1623 bp, Homo sapiens
acccacgcgtccgcatattttcaatgattggcatagcgcctggtctactaaatgctagcttatcgtcattattattattctcattgttattatttattgttgtaatagcaaagcttaattaaataataatgatactaatgatggtgatccgtttcctgctagtcccacttcttattcccaccactgatcttcacgcaactgccaattcctcctgatgttatttgccataagtaatcaatacatgacaacagggttagaatcactgttgaaggaggcagaacaaagtgaaccatggacaggttgtagagagagatgccccgccatggggagggaaaggacattcagctgaaggctcttaggagacatactccttagggcctctgactgtgggctgtccctgttctcctggtctcccaggccctctgcactgtcttggattctgctccccacctgcctttcttccctgctctcctcactgcctgcctgaaaatgccttctgccagccaagtcctcacagtggagtgaaataatccttttaccgtggggtaacgagagggacatccaacctggagttggaactaaggtgcttgaatccttccctgcccttcgcccctcagatgactgtgtttatggacctaggtggctttgtctatgaagcatgcatggcacagtgccagccaattccctctttctgaagcaactgctagaatactgaataccttccctgaaggtaaaatacaaatattttttaagtgaaaaatgaaaatacatttctgaaactgttttctacatgctgatcacaaaagggaatagattactatccatggtcctcttttgctctttttcctctaatctaatctcagtttgatgtcctctctccttgaaagattatatacatagagagcctaattattaggctgcccaaaacagctgctatacctggacagaacgctcactgaggtttggtcaccagactcagacaaggttgaacacggtagcatctgggacaaaaatatgcttgcaaaaatatattgaaactgaaattttaaaagggattctttctctgcttctgttttctaaagaraattatctgcacaattgttctctgtatgtcacttcatttgacatgaacttttcaaactgcaggttttagctagctagtttatgcctaaaacaaaggaaatastgattgaggagamcagtggcatggtggagagtgagtcctttctcagctgtagatatgacctgggtctcctaggctttggagtcagactttggctatgccactttctggctgtatggctttgggcaaattacttaacctttttgaacctccatttcctcaactgtaaattggagctgataatagtatccatctgtagggatgtagtgaagataatatgaaataataaatgaaaaatacttggcacatagaaaggttttgattaatattagctatattgtttttaagacagagtcttgctctgtttgccaggctgaggcacaagaatcacttgaacccagggggcggaggttgcagtgagccgagattgtgccactgtactccagcctgggtgacaaagtgagactaaaaaaaaaaaaaaaaaaaaaaagggcggccgc

SEQ ID NO: 2370 - DNA, 1370 bp, Homo sapiens
acgcgtccgaagtaatattttattgacatataatgcacatacagtaaaatttactacttcacagtataaaattcagtggttttagtatatccacagagttttgcaatcatcacaactatttaattttagatcattttcattgctactcccaaaagaaaccccatatccgttagcagtcattcttcattacccccatcccctagcccctagtaaacactgatgtattttttctgtttctgtggatttgcctgttctgggtatttcctataaaaggaatcatacaatatatctttgtgactggcttcttccacttattgtttttaaggttcatcatcagtacttcattttactgccaaatcacattccagagtatgtatataccatcttttgtttactcatccattgatggacatttgggttgtttccactttttggctattataaaaaatgttgctaggaacattcaaatacaagtttttgtgtgaaaatatattttcatttctcttgggtatatttgtaggagtgaaactgctgggtcatacaataactctatgcttaacattttgaggaactgccaaacagtgttccaaagttactgcaccattttataatcctaccagcattgcatgaggattccaaattctccacattcctgcccccatttgttatggtcgattttgattctagctattctaataagtggtatcttattgtggttttgatttgcacttccttaatgactagtgatactgagcattcattcctatgatggttgcttccattctatgagttgccttttcattttcttgattgtcttctttgaagcaccaaagactttaattttgatgaagtatgatttatcttttttttgttatgcttttggtgtcataatcaagaaagtactgcctgacctaaagtcacaaagatttaccccaacagttttctcctaacagtttcatagttttataggtttagctcccacatttaggttgatgatccattttgagttaattttggctatggtgtgaggttggaatctaacttctgttgtctttatatggataaccagttgtcccaacaccatttgttgaaaagacaatttccctgttggattgtgttagactcttgtcaaaaataaatttgccataaatatgaaggtttatttttgaactcccaattctattccattgatattttggtctatccttatgccagtatcatgctgttttattgttaagttttgaggctgggatttgtaagtgctccaactttgttctttttaaagattgttttgattattcttggtcctttgcatttccatatgaattttaggatcatcttgttagtctctgttaaaaaaaaaaaaaaaa

SEQ ID NO: 2371 - DNA, 751 bp, Homo sapiens
  misc_feature (5)..(5): n equals a,t,g, or c
  misc_feature (20)..(20): n equals a,t,g, or c
  misc_feature (82)..(82): n equals a,t,g, or c
  misc_feature (124)..(124): n equals a,t,g, or c
  misc_feature (135)..(135): n equals a,t,g, or c
  misc_feature (144)..(144): n equals a,t,g, or c
aaggncatccagttttgccnttttcactggtgaaagaaaacccccttggcccccaatacgcaaccgcttttcccggcgcgtngccgatcattaatgcagctggcacgacagtttccccgactgnaaaccgggcantgagcgcancccaattaatgtgagttagctcactcattagcaccccaggctttacactttatgcttccggctcgtatgttgtgtggaattgtgagcggataacaatttcacacaggaaacagctatgaccatgattacgccaagctctaatacgactcactatagggaaagctggtacgcctgcaggtaccggtccggaattcccgggtcgacccacgcgtccggtggctgaagacttttgttatgaggagctgcagattagctaggggacagctggaattatgctggcttctgataattattttaaaggggtctgaaatttgtgatggaatcagattttaacagctctcttcaatgacatagaaagttcatggaactcatgtttttaaagggctatgtaaatatatgaacattagaaaaatagcaacttgtgttacaaaaatacaaacacatgttaggaaggtactgtcatgggctaggcatggtggctcacacctgtaatcccagcattttgggaagctaagatgggtggatcacttgaggtcaggagtttgagaccagcctggccaacatggcgaaacccctctctctaaaaaaaaaaaaaaagggcggccgc

SEQ ID NO: 2372 - DNA, 2329 bp, Homo sapiens
  misc_feature (12)..(12): n equals a,t,g, or c
  misc_feature (2292)..(2292): n equals a,t,g, or c
  misc_feature (2305)..(2305): n equals a,t,g, or c
tagaaggaaacnggaacgcctgcaggtaccggtccggaattcccgggtcgacccacgcgtccggttatatcctcaacttggatttatggtaaccccttttagttcatggagaccaaaatttggggtatttataatagtcagcgcaggaatgcacatggaatatctacttgtccttttgaacctcacgagtcatccagaatgtatagacaggaaaagcatgtcttatttaaaactgtaatttatgggctcaggatctgaccgcagtcccgggagtaagcatttcaaagggggaaggcagtgtggtccctaccctgtgtgaatgtgaggatgtagacatccatcagtgcaactcgagctccatcctcctccgatttctaaggttccagttttctggagggacagtcatcatgttttgatttatctgggagaaaactgtggtgcacagcttgtgaggagggcaaggttgtgacgttcgagcttagttctggtgttattctgtctcctcttctttgtcatcagccaaaacgtggtttttaaagagagtcatgcaggttagaaataatgtcaaaaatatttaggaatttaataacctttaagtcagaaactaaaacaaatactgaaatattagctcttcctacacttcgtgttcccctttagctgcctgaaaatcaagattgctcctactcagatcttctgagtggctaaaacttatggatatgaaaaatgagattgaatgatgactatgctttgctatcattgttacctttcctcaatactatttggcaactactgggactcttcagcacaaaaggaatagatctatgattgaccctgattttaattgtgaaattatatgattcatatattttatgaatcagaataaccttcaaataaaataaatctaagtcggttaaaatggatttcatgattttccctcagaaaatgagtaacggagtccacggcgtgcaatggtaattataaattggtgatgcttgtttgcaaattgcccactcgtgataagtcaacagccaatatttaaaactttgttcgttactggctttaccctaactttctctagtctactgtcaatatcattttaatgtaattgattgtatatagtctcaagaatggttggtgggcatgagttcctagagaactgtccaagggttgggaaaatccaaattctcttcctggctccagcactgattttgtacataaacattaggcaggttgcttaacctttttatttcaaactctctcaactctaaagtgctaataataatctcagttaccttatctttgtcacagggtgttcttttttatgaagaaaaatttgaaaatgataaaagctaagatgccttctaacttcataagcaaacctttaactaattatgtatctgaaagtcacccccacataccaactcaacttttttcctgtgaacacataaatatatttttatagaaaaacaaatctacataaaataaatctactgtttagtgagcagtatgacttgtacatgccattgaaaattattaatcagaagaaaattaagcagggtctttgctatacaaaagtgttttccactaattttgcatgcgtatttataagaaaaatgtgaatttggtggttttattctatcggtataaaggcatcgatattttagatgcacccgtgtttgtaaaaatgtagagcacaatgggaattatgctggaagtctcaaataatatttttttcctattttatactcatggaagagataagctaaagaggggacaataatgagaaatgttggtgtgcttttctaagcatttaaaactaattgccaattgaaaccctaaatatgtttacataccattaagatatgattcatgtaacaatgttaaattaattataatgggattgggtttgttatctgtggtagtatatatcctagtgttcctatagtgaaataagtagggttcagccaaagctttctttgttttgtaccttaaattgttcgattacgtcatcaaaagagatgaaaggtatgtagaacaggttcacgtgattacctttttcttttggcttggattaatattcatagtagaactttataaaacgtgtttgtattgtaggtggtgtttgtattatgcttatgactatgtatggtttgaaaatattttcattatacatgaaattcaactttccaaataaaagttctacttcatgtaatccaaaaaaaaaaaaaaaaaaaaaaaaaaaaaaaaaaaaaaaaaaaaaaaaaaaaaaaaaaaaaaaaaaaaaaaaaaaancctcggggggggncccggtccccctttggccctttgg

SEQ ID NO: 2373 - DNA, 953 bp, Homo sapiens
ccacgcgtccggaggatttctcttcctgttatatagccttttgcttccccctttcctcattccagctgataccccgagaaaaaactcagccataacatgattatgttgcttaagtaagtccatggtctttttcagtctcttaagttcctgtctacacagttttttcacaggatgcacttgatatggttgtgtgttacaggtttattcatatcagctactgaaatacatgctgtgtgtacatataataggtacattgtctctgcttattgaacttataaaataataataaacagctgaataaggaaagtaatgtaagtgttgttaagtaaaggactttgttgaagaagaacttcagtttttaacaaaaaaatgggagccagaagaaggcggctgaaaggtctgtttctctcatatgtggagtaaagcaaacaaaaatatgttttcttatatgtggagtaaagaaaacaaaaagccacttaaagagtcttgatgtttgagattaaggggtggatggtttgttcttcctttttgtccatagttttttcagagtgataatttttaattcccatcgtcagtaattaaagaaagtgatattttttacactttttaaaaaagcttcagtatttcatgttaacctgtgctaggtttaactgaaaggtttgggattttttagttgttttttggggggtggataatattaaacgtaagactgaatttggccagctgaatctaattagggcaataagttgcattatttcatctctgaattatgaaaataatttgaaattttttttcttatatttcaggcctttttatggttatcatgagaaggaaagacactttatgaagatctatctttacaatcctacaatggtgaaaaggtacaaagataaatgaaaccaaaatatgaataactatcattgaagtattttaataataaaaaaaaaaaaaaa

SEQ ID NO: 2374 - DNA, 932 bp, Homo sapiens
cccacgcgtccgcccttagtcttctgggagggcagtgaccccagaagacgggcacaggtcatggggtgcagagaaactggtaggcagtggtggcactggggggcagaagaggccaggactctgggggtcccagggcagatgtggccaccgtgggggcggtcagggcgggccaccgtgaatccttaggagggctccaccaccgactggcccagtgaacacagccatgtgctccctgacctgaaggaggaggatggcagcctcagcctggatggtgcagacagcactggcgtggtggccaagctctcaccagccaaccagcggaaatgtgagcgtgtactgctggccctattctgtcacgaaccctgccgccccctgcatcagctggctaccgactccaacttctccctggaccagcccggtggaacctggatctgaccctgattccgtgcccgccttccaggagaagttgtcacacttcctacaagcttcccacaggagtttgcccaggatgtgggccgcatgttcaagcaattcaacaagttaactgaggacaaggcagacgtgcagtccatcatcggcctgcagcgcttcttcgagacgcgcatgaacgaggccttcggtgacaccaagttctctgctgtgctggtggagcccccgccgatgagcctgcctggtgctggcctgagttcccaggagctgtctggtggccctggtgatggccctgaggctggagcccccatggccagcccagcctggctctgttctctgtcctgtcacccatccccactcccctgggtggcctgactcccactccctggtggccccatcccccagttcctcacgatattggtttttacttcctgtggatttaataaaaacttcaccagttaaaaaaaaaaaaaaaaaaaaaaaaaaaaaaaaaaaaaaaaaaa

SEQ ID NO: 2375 - DNA, 1812 bp, Homo sapiens
cccacgcgtccgtggaaatatgtttgtcacaggtaaaattgtcacttgggtaaattttatctcaagcaactcctttttagttttaatactttctatgttgcccaaatcaagtcttatttccatgaatcactgttttatgtaataattttcttggtgaggtcaatttacatagttttggtactttcatgtcagatttctaaggtagtataatttagtttagaggaagaatttctacacagatcatgcaattgtctcttcattatatatcagggtaaaatctacaaaaaacaaaattggtttgagaacaaagctgtcattacttgcaagatgaaaacagaaaaattgcatgtgtttattaaaacacagaagtatattcctgtgcaaattaatgcagattctgaagtgaaagacaggacttttgagagattttgagtccaaggattcacctcttcaaacacaactgaaaaaactctattttttttatttttaaatctaatcagtttatatatgcccaggtccagcaaaaagaagctgggttgataatgtgttttgcagttattcaagctagtttgaaagagtacctggcagtgattgtgaagaccaatgattgtgctactaaggtctctcaattgccagacacccaccaagtattttttaaatatgctattctgttttgaaactcaaaaccttgtatttttgttaatctagttacctgccaaatcaaacaggaatccaaagtttcataaccctgctgtattctctggttactagaaataagcatatttttgatgttttaacaaccttttaaaataataatttctaataatgaaatagaatatttctatttaagtagctattgggtatatctttacataactagatgattatattaaatgggttttttagatgaatgatgtgcatgggtagatatttttaaaatgaaatatgttttttccttttttacttaaatttctttttagaacatactgttatgaacattaacatttattcaagtccttgggacaattcttcttcagttacccagtaaaattttcatgatctctgcaaaacatagaattagaaatataaaataagataaattttagaatacagtgagatgacttacacaatttgataattttttatataatattttatgattaaccagttaactgaaacctaaaaacctgtattaactgattaatattgcagcaaaatgtcagttcatgttattgtatcaatcacttatggatacatgattatgctgtcgtgatatgatttctaacaattgtctggtcatttttagctttactattataattttaattaaaatatattaaagtcactatgtcataacagactttatattgtgccatgcagtcctattgctcttttgtttcaaatatcatatagtctaaagcaatgattctcattaaatacatgcatcaaaatcaactgcagttattacatgctaactcaaacttacaaaatcaagctctctgtgatcctggttaatacatctaagtacttgagccgataatccaagtactttggggggtcgaggtgagaggatagcatgtggccagaagttcaagaccagcctgggcaacatagcgagactccatctccacaaaaaagtgttaaaaattagccagacatggtggtgcatgtcttagttctaactactcaggaggctgagaaaggaagattactttagcccaggagctcaaaggtgcagtgagctgtgactgcactccagcccgtctaaaaaaaaaaaaaaaaaaaggaaagaaaagaaaaaaaaaaaaaaaa

SEQ ID NO: 2376 - DNA, 594 bp, Homo sapiens
cccacgcgtccgcccacgcgtccggttatcacctatgttctcatattatttttatctttttttgatcagtatagtttgcagatgataaattttattaataaaatgttaatctttagttttcatcgatgtttttaactgtttttctgtttgttattttatttatgtatgcttttatttttgttattacttttttttttactttagatttacttttgtcttttttgtcccctagtttcttaggtggaaggcaaggtcattgactggagactgttctttttttctattgtgggcctttggtgccataaattttctcataattactgttttaatagcatcccgtatgttcttattttaatttcattcagttcagcatactttctaacttcttttttgagttattctttgattcatgagttatttagaagtatgttagtattcaaatattggacattggacattggacaatggtttttctgttaatttgtaatttaattttgctgtcatcaaacaacatactttgtattattttaatacatttaaatgtatcaaaaaaaaaaaaaaaaaaaaaaaaaaaaaaaaaaaaaaaaaaaaaaa

SEQ ID NO: 2377 - DNA, 909 bp, Homo sapiens
ccacgcgtccggaaggctgctaattggattttggtagttcttacctcaagaaaacttgaattatttgggggaaagtaggctcaaaagagaatatatctttcacattcacattcagaacccagcaacctggagtccaattttcagtattttaactacctcaataatgctatgaatgtaagatattgggatagagatcccaacttgaaacaacagccagtgcctgtggtaacttaatgtcttgtcaaatacttttattgattggtttatatgccattcttgttatagaagaatatgccttttaaaaaagcttattaataacactttcccaatttatattttaaaaagctaaagaacactggattaataatcttttgggagggtagaataaaataattgattactattgctgcatacccggggtgggatggggtggttggagaaccagaactatttttaaaacattaggtttcaatataaatacaactcacaactgctagctttggggggtgggggaacattgtgtgggttttgttttgtttaatttattgattagtctttaaagtaggcttttttttttttttttgagaatactggaccatcattaaatgtgtactgtgaagagattaatatgtatgaagggctttaccaaagtccactaaataaacactactcaagtacagactgcaaaccaaaatgtatctgtgttacgacattaattgcaaatagcaagtatggtgctaaagtctacaccaatggaattagatgagtgctatgcacttaattttaaaataaaactagttttcagtaaaaaaaaaaaaaaaaaaaaaaaaaaaaaaaaaaaaaaaaaaaaaaaaaaaaaaaaaaaaaaaaaaaaaaaaaaaaaaaaaaaaaaaaaaaaaaaaaaaaaaa

SEQ ID NO: 2378 - DNA, 1463 bp, Homo sapiens
ccacgcgtccgtgtatttctaactgcctgagtcacacagaatagggtaagagcctgaccccattctgtaaatcagaaagcaaggatggagaccctttcctgctgctattattggctctctttgaggaagttggaggttaaggaaggaacttgtttgtttccgtatacgactccttcttctctctagttcagtcttcagccagtccagcgctctcttccacacttcagagccccttcagagaaagcattagcaggaatgagacaaggcagagctgcagtgccccctgaggcttccacacatctttctgaatattatttttcaagtaacaagggcagggacagcggaaacagctgcccaccccccccatcccagcagctcagctaagccctgatgagaatgaagccacaggagttgtctgaggtgaacccagccgctcagccacacatggaagccattgcctttgcacatagttcttgggttctttttcctaaaaaggtaaggagctgaggtgtgtggttttttaatattaagaatatataatggaaaacacacgactgacgctcaggcatcttcccctactccccaacagatccccagaagacagcgtggaaggcagtgtagacagtaaatcgggcttcagttctatagccaagaagagatcagctgctgaaaccaccagtgggtaccccaggccacctgcctttgaacttggggatttgccatgtctgatcttgtcacatacttgcttttttacaagatgaactctttgtatttatgatttggggggcaatgaaaggtgcaatgcaggaactgctgctgccgagctcgctggtcacatgggggtgccaggcgggattctggaaaaccagtgcacttaaactgatcctgaagagagctgtcccagcactctggccaccaggagggccagattccccagaaactaccttttgcccaaagaacatgctcagtatttggggcatttcctcccacaaaccctgactgcttctgttacctcagggccttggtacctggatactgccacagaattggggcgggtgggggaggggcctatttttaaataaaataactgttcaaagttgggggtttttttaaaaaattaagaaaaaggaaagctattctgtattgcaccttttcacaatttaatacattttcttacattttcctgtgattttcgaaactaaaccattgtgtgcctgtagtgtcctggttgagctgccgctcagcagcttcctcggggggatttggaacacctgtgtctgtcgccgcactgcctgtgggaggggcccagagggctgctgggactggcgtctgtacacacttgtttggccttttctgtagttgatgctgtaaactctatggctttttaaaaacgatttcatgtttttatttagtattggaaatccaatacacttttttaatccaatcaaaaaaaaaaaaaaagg

SEQ ID NO: 2379 - DNA, 809 bp, Homo sapiens
gggtcgacccacgcgtccgctccttagctgttaaaacaagaaagattgagtgatattatgtttttatttctgagaaaaggtgtgcaaagatgaaagctctcatgattaacgttattatatttgtcatatgaatttctatgtgactctgtacagagtattccctcttgctttttctttgtctctcactctctctttgaattttctaagattacataattccataatgaagttcacgtgacgtctcactgaaaggtacacatactattccttttactgcccgatagataaaagactggattaggacccagagagacctcccttattgaagatagtcaaagaatttgaccttattgccatcttttaatagtatataaccgatattgtgtgttctttcatttctatctgtgcctctctgtagggattagagatggggaattagctttatcaagcctttgggtaaaatgtaaaaactgagctgatttgtctttggcatctcagtaacaaaaatatagatctgattttaacatttacagcactgcctgtgtgctgactgcctataggtgtgcaaagatgaaagtwattctttagaataatattaaagaaaggtttattaaatggcacagtacttctgaagacatagaaacatataaatgatgcaatataggttgctaagcctttttcctcccatttaaaattatcagaacaattttaaatggatttaagccaaaaaaagggactttttttggatttaagcaaaaaaaaaaaaaaaaaaaaaaaaaaaaaaaaaaaaaaaaaaaaagggcggccgc

SEQ ID NO: 2380 - DNA, 1583 bp, Homo sapiens
  misc_feature (892)..(892): n equals a,t,g, or c
  misc_feature (897)..(897): n equals a,t,g, or c
ccccgggtcgacccacgcgtccgcccacgcgtccgaaatagatccccaggcattaactgtaataatgaaataccagagtgaatggaaagatgttattttgcttttacacgttccttccccaagctttcatggtggtacggctctaccaatcttaagctttgtttatgcatggcctattctaagatcatctggggacaaacctgaatgaggaggtctcccaaaagagcaacaggattgccaaagtaaaagttgcatcagggtccaacctaaaagtactagccaagtgtctcaactcttagattggatgctgtagggggtcaacctggmcattaaagtcattaccacaccaaccatttctgtgtattagggttatccttctttattttcagcagtagctattatttcagccaacacctatccaaaccatgccaacaatataggaatatacttgattctcagcaaaggtgatttcttcggacaaaggaaaaaatatctatgcacaatggttagttggttcaaatgcacacatacggacccagcataagatgactgcctgatgtagagccataagggaatcgtgggatccaggtcttccatctgtaactcatcctcccacttataaatattaccccatctttcttacttaggctgctgcttgtctctgctcatccctccacctctgttccccacctgggggcmgctgaacyyggactattgcccagctagatgttaggatgaaggcccattctaatactttgctggtaattctttttaattatccacaaatgtctaaacattttctggcccttacccagtcccaatctggcagctttacctattccagtggttctcaatcaggartgatttgctccccagggaacacctggaaaantctanargaattctgatataactgggagggggtgaggtactactggcatcttgtgggtagagagtasggatgctgtttaacatcctgcaatgcacaggacaggccctgacmacmaacagttatctggccccagatgccaaaagtgccagagttaaagaactttgccttgtacttcatwattgtgtcctccatgctaatgtttctcaccacttaaatattgtagatgttttcaggttgattgtgtccccacccacatctcaccttgaattataataatcaccacgtgtcaagggtggggccaggtggagataattgaatcatgggggtttcccccatgctgttctcctggtagtgagtgagtcttacaagatctgatggttttgtaaatgggagttcccctacataagccctctcttgcctgacaccatgtgtttgcttctcttttgccttctgtcatgattgtgaggcctccccagccatgtggaactatgagtcccttaaacctctttcctttataaattacccagtctcgaatatgtctttattagcagcatgagaacagactaatacaagggctaattttttttgtttgtttgtttcttttgatagggtctcactccagcctggccaacagagtgagactctgtctcaaaaaaaaaaaaaaaaaaaaaaaaaaaaaaaaagggcggcc

SEQ ID NO: 2381 - DNA, 352 bp, Homo sapiens
  misc_feature (12)..(12): n equals a,t,g, or c
ctgcacttgccngccgggacatggcagcctggacgtggggctggggctgtgggcgctgctggcggggttgactcttccagtgagggcagaaccaggctggcaggaggggaggacggtgtacctgctgctcagagcccccaaggctctcctctgagagccaccaagcaggacagagcagctcttgtcccaggtccctcgggctgagcgccgtgtcaccaggagaatagtgctcacagcccaggcagggtgtgtggctcctggatgggctcgtggggcgggakgggacagggcacgggctctcagaaaataaactgctttattggaattaaaaaaaaaaaaaaaaaaactcgag

SEQ ID NO: 2382 - DNA, 453 bp, Homo sapiens
ggcacgagagacacagctgctgccctgcaccagggagcagtaccaccactacccccgtagctctcctgagcccatgccggcatgttttgtgagcttctctgtattcttctgcgccaccgtcccttgtgctgggagcatgcctgcctcttggcaccacctgcagtgttagagagactgcggctgatcgtggggaccctgcatcacgcccctccaccccccgcagtgtcccaggaatccattcctgtgtccactgagcacagcctgcgtgggaggcctgagccccggccccaggttctgtcgctccggatagggatgagtgattggactttggaaagggaaaatcgatgccccctttaagaaatgttatttttaatcaaaataaattctccctttcctgtgaaaaaaaaaaaaaaaaaaaaaaaaaaaaaaaaaaaaaaaaaaaaaaaaaaaaaa

SEQ ID NO: 2383 - DNA, 996 bp, Homo sapiens
  misc_feature (514)..(514): n equals a,t,g, or c
  misc_feature (574)..(574): n equals a,t,g, or c
gcggcacgagcacatctcatcttccactggaacgtttagataaaggagtgtggggtgtaataaagaactaagctaaagcgagagaaacactgaaaaactacgaaatgtcacacaagtaccataaagagagtgattacttgattaattaatgataggaaccctacatttaagtctttcagttatacttgcatcagtcctctttgcctatcagaatgcggtttgtttctgccaacgaataactatcaaaccactgaggcctaactgatgtgtgattaatgtgggctccattaattgtgtggctgagttttatgcatgaagctgtatccttgatttttcacctttaatttcctcctgtttaactgctggtcataaaattgtttcaaatgtatctgctgagtctgagagcaagttttgcaacttgaaaagtgcctgagtcagtttgggcaccttgtttggtaaaaccgacttgggggaactcttaacgctgtaagatgaattgctacttggcttccantcccagccctgctggctcccttcctgccactgctcactggcactgcatctcatctattancattaagcacatgcatagcattgataatggcaaaaggcttaataactttctttctgatagcccatcatatgtggctctattcaaccttattttagacagctagagatgatgacatctgtctttctggtctttttcacattcatttaccatctctgttaatatcacctgattttcttttggggcagcaccccttcccatctctgcttttattttctgtgtttcaagtagggctggtctcatttccctggctccggagctaggcctggacaattagaattccagtgattggttcggggataggcatgtgacccaagctcggtcaactctcggtcaactagagagacaacctaggtcaactagacaggcaaccctaggactttagcaggaactattaggagaaaaaaaaaaaaaaaaaactcgag

SEQ ID NO: 2384 - DNA, 2444 bp, Homo sapiens
  misc_feature (1655)..(1655): n equals a,t,g, or c
ggcggaggcggaggcggccccgggctcgggcggctgggatggagcagaagagcgcggacaccggagggcacgcagctgacggagctgcgctgcgttcgcctcgtttgcctcgcgccctccactggagctgttcgcgcctcccggctcccaccgcagcccacccggcagaggagtcgctaccagcgcccagtgcgctctgtcagtccgcaaactccttgccgcccgccccgggctgggcaccaaataccaggctaccatggtctacaagactctcttcgctctttgcatcttaactgcaggatggagggtacagagtctgcctacatcagctcctttgtctgtttctcttccgacaaacattgtaccamcgaccamcatctggactagctctccacaaaacactgatgcagacactgcctccccatccaacggcactcacaacaactcggtgctcccagttacagcatcagccccaacatctctgcttcctaagaacatttccatagagtccagagaagaggagatcaccagcccaggttcgaattgggaaggcacaaacacagacccctcaccttctgggttctcgtcaacaagcggtggagtccacttaacaaccacgttggaggaacacagctygggcactcctgaagcaggcgtggcagctacactgtcgcagtccgctgctgagcctcccacactcatctcccctcaagctccagcctcatcaccctcatccctatcaacctcaccacctgaggtcttttctgcctccgttactaccaaccatagctccactgtgaccagcacccaacccactggagctccaactgcaccagagtccccgacagaggagtccagctctgaccacacacccacttcacatgccacagctgagccagtaccccaggagaaaacacccccaacaactgtgtcaggcaaagtgatgtgtgagctcatagacatggagaccaccaccacctttcccagggtgatcatgcaggaagtagaacatgcattaagttcaggcagcatcgccgccattaccgtgacagtcattgccgtggtgctgctggtgtttggagttgcagcctacctaaaaatcaggcattcctcctatggaagacttttggacgaccatgactacgggtcctggggaaactacaacaaccctctgtacgatgactcctaacaatggaatatggcctgggatgaggattaactgttctttatttataagtgcttatccagtagaattaataagtacctgatgcgcattgaacgacaatcttaagccctgttttgttggtatggttgtttttgttttcctccctctcctctggctgctacaacttcccctttctggtacaagaagaaccattctttaaaggtgagtggaggctgatttgcagctgaagtgggccagccttgcaccagccaggccagaccaccatggtgaaggcttctttccccactgcaggacccactttgagaaggaccgaggargargatttgggttgttttgttaggggttactttcaggggaacatttcatttgtgttatttcttaaacttctatttaggaaattacattaagtattaatgaggggaaaggaaatgagctctacgaggatttcaccctgcatgggagagagcanggttttctcagattcctttttaatctctatttatctggttgtttctgacaggatgctgcctgcttggctctacaagctggaaagcagcttcttagctgcctaattaatgaaagatgaaaataggaagtgccctggagggggccagcaggtcacggggcagaatctctcaggttgctgtgggatctcagtgtgcccctacctgttctcccctccaggccacctgtctctgtaaaggatgtctgctctgttcaaaaggcagctgggatcccagcccacaagtgatcagcagagttgcatttccaaagaaaaaggctatgagatgagctgagttatagagagaaagggagaggcatgtacggtgtggggaagtggaagagaagctggcgggggagaaggaggctaacctgcactgagtacttcattaggacaagtgagaatcagctattgataatggccagagatatccacagcttggaggagcccagagaccgtttgctttatacccacacagcaactggtccactgctttactgtctgttggataatggctgtaaaatgtttaaaaacaaaacaaaacaaaaaagaggcactagtctatctgcaattactcaacgaggcattttcataggaaacagactatgattaatccatttattcttcccacacacttaccttactaagtctttgctttaataaatgagcaaccctgggtatagtcttaaaattctgcacaataaattttgagaaagaaaaaaaaaaaaaaaaaaaaaaaaaaaaaaaagggggggg

SEQ ID NO: 2385 - DNA, 2444 bp, Homo sapiens; identical to SEQ ID NO: 1089
  misc_feature (1655)..(1655): n equals a,t,g, or c

SEQ ID NO: 2386 - DNA, 895 bp, Homo sapiens
ggcacgagttcctatttccctgccatcatctgctatttctgccacttctcttagactccttgtctgcaaagcccaagctagaactcactgtctatggcagaaggacatccagagcccattctggagttttgttttttccttctgccagatgctttgtgtcctgtcttccttcctcctcatatttctgtttctcatttgtgttcagttttgtgcagcattgctagcactgcttttgtgaccagaaaaggccataacatggtccaggatcatcattcttctgactctagatgggacacttgacagtgacttgaaacatttgcatattcaggaatgcatgagatttcaagagagcctacagtatgaaatcattttcacaaaataagcagcttgcttctgaaatgctgtctttcccagtagctactcacctgcctctggtggctgggattcagatgccacaaaactgtcagtatctatagaccaggtctgtgccacctcctctctcctctgtgctcagtgaggaggcagtaaatgaagttacaggctagcacaatacctaactcatgtttcccagtacacctgtagatattactgtacttttatgttctcaagaaataagttgttgcctattcagtgttacagatttctttgtttctttttaattaaaatacaagaagcagctgaggaaagggagacaaggtattttatttctgactgattttagaaaaaacttgtgtacatgtgtttggaactgttgaaatgccaagttttctgtataagtgtttttgtaattaaactttcagattttctttgttttttaagaagttgatgtgcttgtttgacatttgtctcattaaaacttttctacgttgaaaaaaaaaaaaaaaaaaaaaaaaaa

SEQ ID NO: 2387 - DNA, 1320 bp, Homo sapiens
  misc_feature (1024)..(1024): n equals a,t,g, or c
  misc_feature (1309)..(1309): n equals a,t,g, or c
gcagggtttcaccattttgggcaggctggtcttgaactcctgacctcaggtgatctgcctgccttggcctcccaaagtgctgggattagaggcgtaagcaccgcgcccagcccctatcctttttgttttttattataaaagtaatatctgaatacatgattgtttaaataaatgctgtgtaagtgtataaaatgaaaagtaaaaggcccccatgaatggacattaagatacttccgatgtgttttgttttctattgctgcagtatttgttactgtacttgtgatggtacatgtgcatatattgctctaaaacaaatttctagaagttgaattccaaacagtgactgttccagatgtcttattttttaggaccccaagcctcttaaattcaggtctttccgttattcccttaccttctcccttatcccttcaaatctttgcccactgccatcacattaatgccttctttgaccttattttatctgttatagtaatgagctgccctgttctttctatctttaatctccccactccaccttgtccttattatctcagctagtttaattcttaaaagtgagtatattaatccttggaatctttcttttttatatatatatatagtactgatatttttcagttagtagcttctgattataactttcccaaattgaggctttcatttccttagaacaaggaactgccctggctgggcagtttagtcaaaggcttgtcagggtgtttagtagacagttgtgcaagtggagctattcacagggactgtattactatgttcctttgttactaaaaaaaaattcttgcagtccctgtagttcgcaacagatactctgactcatatttctctacataggagaaagagtatggactttggagtgatacatctatagctcggttaggatctagactctgctcccaaactggtagtgtattttggggtgcactgctatgtttctgagccttcatttcttccttataaagagtttattagtttgtagccaggcgcagtngctcgcgcctgtaattccagcactttgggaggctgaggttggtggatcgcctgaggtcaggagttcgagaccagcctggccaacagggtgaaaccccgtttctgctaaggttacaaaagttagccggacgtggtggcacatgtttgtggtcccagctgctcgggaggctgaggtgagggggtcgcttggatccgggaggcggaggttgcagtgggctgaaattgtaccactgcactccagcctgggcgacggagtgagactccgtgtcaaataaaaaaaaaaaanaaaaactcgag

SEQ ID NO: 2388 - DNA, 1227 bp, Homo sapiens
  misc_feature (1164)..(1164): n equals a,t,g, or c
tataaaagtaatatctgaatacatgattgtttaaataaatgctgtgtaagtgtataaaatgaaaagtaaaaggcccccatgaatggacattaagatacttccgatgtgttttgttttctattgctgcagtatttgttactgtacttgtgatggtacatgtgcatatattgctctaaaacaaatttctagaagttgaattccaaacagtgactgttccagatgtcttattttttaggaccccaagcctcttaaattcaggtctttccgttattcccttaccttctcccttatcccttcaaatctttgcccactgccatcacattaatgccttctttgaccttattttatctgttatagtaatgagctgccctgttctttctatctttaatctccccactccaccttgtccttattatctcagctagtttaattcttaaaagtgagtatattaatccttggaatctttcttttttatatatatatatagtactgatatttttcagttagtagcttctgattataactttcccaaattgaggctttcatttccttagaacaaggaactgccctggctgggcagtttagtcaaaggcttgtcagggtgtttagtagacagttgtgcaagtggagctattcacagggactgtattactatgttcctttgttactaaaaaaaaattcttgcagtccctgtagttcgcaacagatactctgactcatatttctctacataggagaaagagtatggactttggagtgatacatctatagctcggttaggatctagactctgctcccaaactggtagtgtattttggggtgcactgctatgtttctgagccttcatttcttccttataaagagtttattagtttgtagccaggcgcagtggctcacacctgtaattccagcactttgggaggctgaggttggtggatcacctgaggtcaggagttcaagaccagcctggccaacagggtgaaaccccgtttctgctggaattacaaaaattagccggacgtagtggcacatgtttgtaatcccaactactcaggaggctgaggtgagagaatcgcttgaatccaggaggcggaggttgcagtgagctgaaattgtaccactgcactccagcctaggcgacagagtgagactccgtgtcaaatnaaaaataaaaaaaaaacaaaaaaaaaaaaaaaaaaaaaaaaaaaaaaaaaaaaaaaactcgag

SEQ ID NO: 2389 - DNA, 1176 bp, Homo sapiens
ggcacgagaagtgattcttaaatattaagtgataaatgcatttaaaatgtgtccggaatgggctttgtgaattccagaaagggaactaaattctgcttaaaaagagaaggcttctcaaagggagtaatgtttgacttgagacccagagaaggagaaaggaaggaagcttgcagaggagccttggtgacaagaggcatgctctattgtggggacagtaggaataggggagaagccttggccttgtcactttctgctttttggtttatgcagttgtctctgcctaagatttttttctacctttgtttctgcctccagttactccccctggaagtgtcactctcttttaaattcagagagccttgtttatggcactgatgtggtgcccagtgcattctgctttgtactaaatatgctgtatctcacctttgtgtcagcaccaaactgtgttctttataattctgcagcttctagtacatttgtgcatagtagcaactcaatgcacatttgttgaatgttgaatgaatgctagtcaaggcaagacaagcaaaattctcaaataagtcaaaataatccctaattatttccagatggaatggtaatcaatttgcttcaggaataaattagccaatggatgtttgataacataaccgaccctaagtaactcgatttagctgctgaagccagcttttaaagatgcagtttatccactggccatgggatatcggccatgattactggagcaagccctagtaatacaatctttatataataaatataatcttactaaatgtcagtgagaattatctttatataataaatacagtctttaaaattgtatttatatttggcatttatgcctctcagcactatgtaatttcttattagaagtacactttaacttgagaattccattagaatcattaaattttctgaatagaaagcttaacagtgtttaaaaataaatttttagtggcttcatgatgtcaaaacaatcacttgaaagctgaaaaatatgttaaacctacttttgtatttatgtcccagtttgcttttttcaattcacaaaaaaagatttgacttgattacaaagaagaaaacacagaaagagcaaaaaagaaaagaaagatgaaaggaaggaagaaagggagacaaaaaaagaaaaaaaaaaaaaaaaaa

SEQ ID NO: 2390 - DNA, 531 bp, Homo sapiens
ggcacgagctgactgtatacagggttactgttggggttattgtggggcagtgtaaggtgatgaagatctcactgacttagtgttgatggcttgagtttgagtcctggtattaccactcgtttgttgataatcttaggtaaataaactggcattgctaagccccagaaaaatgtatttagtggaacagatgaaatatgattcagtggttaggaagttaacttctgaagacagacaaacctaagtttgaatcatggttcaccccttagtggctttgtggccttgggcaagtttctttaattttcttatctatactgtgaacagtacttacatcataggtttggtctgaagattctgtgagataatgcatatcaagtggttagcactttgccaggcacattgttaagtgcccaataaatgtgggccaaatgtgatagctcacccctgtaatgccagagctttgggaggatcctttgagatcaccctgggcaatatagcaaaatcccatctctagcaaaaaaaaaaaaaaaaaaa

SEQ ID NO: 2391 - DNA, 1221 bp, Homo sapiens
ggcacgagcttttctgagctttccgctcctcgtcgcaatgaagactttgtcctcctgctcacctacgtcctcttcttgatggcgctgaccttcctcatgtcctccttcaccttctgtggttccttcacgggctggaagagacatggggcccacatctacctcacgatgctcctctccattgccatctgggtggcctggatcaccctgctcatgcttcctgactttgaccgcagtgggatgacaccatcctcagctccgccttggctgccaatggctgggtgttcctgttggcttatgttagtcccgagttttggctgctcacaaagcaacgaaaccccatggattatcctgttgaggatgctttctgtaaacctcaactcgtgaagaagagctatggtgtggagaacagagcctactctcaagaggaaatcactcaaggtacagatgcagcctggctaggcagagaatcccttgtagaaaggtgggggagaatcataggatattataactgtaaggaacatgcaagattttccagattatacccttgatagaatagataagttccttaaggctcagatcttgcttaaagtcgtccagcctgttagagacaagtagaacacgaagctggcctctggagtctttattgagtactttgtacaattggtgtagactgggagagccctcctcacttcccctttcttgtgctgtaatttcctgtggggcagaacacctcagaggtttctgtgcatcaaaataagatgcagcaaagacatggaaaaaggataacgagacaaattcccagcaataagtagatgaggttgtgttttttataaaagataacgaggcattccttccagaaatgtggagcctttgtagatttcagtgcataaaaccaagccatgatttcctgcagtgatcacagagcagagaagggagaaagcccttttatcacaaaccagcaggaagtctctgtaaaattggtaaggattctggtttagtgtgaagaaccacattttttgtgtatgtttctgggcccatgggaaggaacagatcatatttgacatacaagaatcaaatgattcaggccaggcatggtggctcactcctgtaatcctagccctctgggaggctgaggtgggaggattgcttgagcccagaagtttgagaccagcttgggcaaaatagcaagacttcatctctatttaaaaaaaaaaaaaaaaa

SEQ ID NO: 2392 - DNA, 1293 bp, Homo sapiens
ggcacgagtcagcctcccgagtagctgggactacaggtgcccaccaccacgcctggctagttttttgtatttttagtagagacgcagtttcaccgtgttagccaggatggtctctatctcctgacctcgtgatccgcccgcctcggcctcccaaagtgctgggattacaggcatgagccaccgcgcccagcctacattcacttctaaagtctatgtaatggtggtcattttttcccttttagaatacattaaatggttgatttggggaggaaaacttattctgaatattaacggtggtgaaaaggggacagtttttaccctaaagtgcaaaagtgaacatacaaaataagactaatttttaagagtaactcagtaatttcaaaatacagatttgaatagcagcattagtggtttgagtgtctagcaaaggaaaaattgatgaataaaatgaaggtctggtgtatatgttttaaaatactctcatatagtcacactttaaattaagccttatattaggcccctctattttcaggatataattcttaactatcattatttacctgattttaatcatcagattcgaaattctgtgccatggcatatatgttcaaattcaaaccattttaaaatgtgaagatggacttcatgcaagttggcagtggttctggtactaaaaattgtggttgttttttctgtttacgtaacctgcttagtattgacactctctaccaagagggtcttcctaagaaagtgctgtcattatttcctcttatcaacaacttgtgacatgagattttttaagggctttatgtgaactatgatattgtaatttttctaagcatattcaaaagggtgacaaaattacgtttatgtactaaatctaatcaggaaagtaaggcaggaaaagttgatggtattcattaggttttaactgaatggagcagttccttatataataacaattgtatagtagggataaaacactaacttaatgtgtattcattttaaattgttctgtatttttaaattgccaagaaaaacaactttgtaaatttggagatattttccaacagcttttcgtcttcagtgtcttaatgtggaagttaacccttaccaaaaaaggaagttggcaaaaacagccttctagcacacttttttaaatgaataatggtagcctaaacttaatatttttataaagtattgtaatattgttttgtggataattgaaataaaaagttctcattgaaaaaaaaaaaaaaaaaaaaaaaaaaaaaaaaaaaaaaaaaaaaaaaa

SEQ ID NO: 2393 - DNA, 908 bp, Homo sapiens
aattcggcacgagaaagggggtcgatgaccacttgtaaagaattgtgcccttggaattttgtgtggttcttttttgtttttgacttgttagggagaatgtcaaacatatataaaagtagactaaacagtgagatgaacatccaaatatccattattcaaagattgcttctgtaataaactcacagccaatgcggtttcatctgtacccacacccctttcttcttttcatatattttttttcattttaagcatttgcaataacttatttacctaaccacctattggtagatatttgagtattaaaccattaaaaaatttttgtaattaataccctttcttgctttgtggtcttgtgtgagttttttaaagataaattcctagaaggggtgttgggtcaaaggacatgcattaggcatgttttagtttttgtaaatttcttccaattttgagatgtcatcacattgctttccaacaaacctgtactaatttacgtttttgctgagttctcactttgtctttcacctagaatcactgtttgctttctctctttgtcttttatatatgtgtatatatgtaatatatgtatatataggcatatatatgtatttatatagtcccctgtgaaacatttgaggctctattgcagacattataactcagtactcttaatactttaatgtacatctctaagaataagacattttcctaatgtaattgtgtgatcacaatacagtgaccacacttttaaaacttaaaaaaattccaaatatcagtttgttttattggtaaatattttagtgtgccagacattaagtcctctttgttgttgttgaaacataaacaaaatactgtttttttaatgctttcaaagaggaaggcattgcaaaaaaaaaaaaaaaaaactcgag

SEQ ID NO: 2394 - DNA, 546 bp, Homo sapiens
cggcacgaggtttttttttctttttcatgattcgtctttgagtacctccaggctgaaagactgttgtaccagtaaaaacttaaaggcacaaattctccttgaagaccttctcccttttatgtggccccatattttatgttgctttatctttgaaattttgcatgaaaaggaaatgaatggattcgaatgaaattgtcctttagagcatgattacttgttcccatggacaaatatttttctccccttgctcttcctggcctgaaacacgggaaaccagagtcaaaagttatctccctctccctgtgatgccttgagatttttttctgcgttgtttaatgcctgaaatccaagtcttcctccatgggaaaatactgttataccaaataattctagatgagtaacaaagatctttttaggccttcattttatgttttttcttaactgttatattatgattgtgacatagattatactactactaatttttggatgtttcaaaaggtcaagaagtaaaagatgttagaaagcaaaaaaaaaaaaaaaaaa

SEQ ID NO: 2395 - DNA, 1160 bp, Homo sapiens
ttaagtggtctgcccttccactgaaagtgtagctttttgacagtctcagccatataaacaggatctcagtttcatccttccatccatccattagaggcacaaggtctcatctcttttccttttgggcattaaaaccaaagttcatacattattgagacaggccgactctgctaaggcagcctgtttggcctttaagttttattgcttattttttgagtatgtatttatttttttgattattattatttttttttttgagctttaagccttcaagtttcctttttattcttgacccctagacatttcctttgcttgtggactcgggtatttgtttttaggtaatatttttwttccctatgacacagccctcaggagatcctgagaacatgtgccctcatttttaggtaattttaattaggaagggttttaggttgtctgatctgccttgttgctagaaacagaaattctcctatkgattgatttttcaaaccacttcttagtggcctctacaactactccagtcaggtcaagaatggctctcacattgccaagtcagtgggtatttttagtcttcatcttagatgacctttatgcacatttgtctttgtctaggaacttctgttggaaacatcttctattttaatgttattttaaatttttttgcttttgtaacattatgcttagcatgtgtgtccaactctttgacaatttctttttagttttctggtggcttccctttatccaaatttagtattgaaattcctcgagccgctgcttttctcactccataattctggccagaatttggtacttaaaatattttgtctaaaatattacaatagctacttaagtcatctccctgactccactctgttgtctttcagggcgtcgtccacactgtagccaaagtgatcttataaaaacataattctaatcatggcactcttctgcttaaaaatgttttaatggctttccgttaggttaaaatttaaaagtcctttgtagcctgtgagactctacatgagttgactccctagcttcatctttgagcatcttatttctttacttattataccatcagttagagttgattgttatataatccacagaagtgaattctgtccgatttaagcaaaaaaaaaaaaaaaaaaaaactcgag

SEQ ID NO: 2396 - DNA, 308 bp, Homo sapiens
ggcacgagggaaaataggcagcatgctaggtgtctttcagtgtctgggggctcgtgaggaccacctgttgttggacagtgagaaaggctaatgtttcttgttcttggttgaatcttgtatttaaaaaagtcattcaaaaacaatgtatttttatagttttgatgtaagtctaagaaaagtggaaaaatatgatatggaataggagtcttcttttggccatttactttctgtgtggccttagacaagttacctatttttctgaatctcctttcttgaacctttttgtaaattaaaaaaaaaaaaaaaaa

SEQ ID NO: 2397 - DNA, 236 bp, Homo sapiens
ggcacgagcaacctcaggacctcctcaagaagtggggttgaggcagaagaaaatgttcaaccctctgtctcctcatccagacctgttccttttgagccatctcatatagtgggggctgcatggatatgttttaagtaacagagttcctctgcctttaaaaaaatgtttgaaaactaagccatgagccaccacgtccggcctaaagacacttttataaaaaaaaaaaaaaaaaaaaa

SEQ ID NO: 2398 - DNA, 2024 bp, Homo sapiens
ctcgagttttttttttttttttttgtgttataataggttctttcactttattgcttattgtaaacactttggccatagcaaatgttagtttttaaataaccgtaattcaaaactttcacatcctatactatttttccccaagaagcatcatctatgaaaacaatcagtgaactccaacagtctatactggtaatgtgcacattgatgctattatgacacttaatacaaatagtaaaaatactcatctattgtaggcttatgggtttgtaaaatgccttaagggaggccataaacaactcaaagaagagatggtgtggactgaactggcttctatttggggaaaatttgcagaatataggaggtacgcaataaatgtttattgatggtgaagatgagaaaaccctatttctgctgatctttcctttccgttttccttaaagaatataaggtatatttgtattcagcattctcagaatcatcacagaaaccctggcactttgagagtcttagccacagtgtaattgggtctgaccacacgcagaagaaaaataaattaaagcatatgtactattaaaattgcactgaaaactttatgtaagtcagggagcccctcaccagaacaggctgaaactcttgaatgctttgcatcctcatatataagaaaatcatcagtgcttaaagatcaaggaactcattcaaaacaaattcagcctttggaccttactggcaggtaggttatatttcagtcagatcaatatctttctaatataggtatttgaaagtaatatatgctacttataataatgatatagtaagcttcttatctgcaagtacaggtactataacttacaccttaaaatgctttgtttgattgtttcattcagcaaaattcttggcactgttttgggatttcactgaattttgatgatgatattggattaagcattttagatttaattgtaaaatgacacaaaaatctaatcatctatttccaatgttcaatatacaatttttataaatacatgaaacaattcatataaaaatataaatgttaaggtcactcacagcaaaatatggcacattagaattatttattaaatgctttatacatataaaggtaggcacttcataaaatttgcattttggtaaaaggcaacaatttgatgtcagtatcttaattgtgtcattaacttttttaagagaacagattatcaaaattttacgwagaagaaaaaaataatagttttaagggaaatctacagaagggaatctgaacttcatttcccactttatttttgcgagtctgttgtgtatcttcatggtcaagttctgagatttttgctccctgacctaaaatcctgtgggaataattgatttctcatcttttacttggaagtgaagtgtctgctacctgtggaacttgatacaattttttttttctccccacagttagaataacctttattctgatccactataaagccagatgatttttaggtggcagtagctggcattgaagagttcttggcttcaagcggctgttgagtctttttggtcttgttttaactccctaattaaataaataagatccaactctttctgttgtattcactcctggacatatagaaattcacttcacacccacctaaaatacgagcagaacttctgaggcccaatgaacccatctactatttgattttgttatcccttctggagcgtgtctctaccaagagcttcacaaagcaatctagtcattgctctttcttgtactaaaaccagagtacccrtcctgtaacttccatcaggacctcaaacagtgctaggcacatagtaaactcttaggcactcaaaatacatttattgatgaatgaaagaatgaacaattctagttctgacttttaaagctatatagaataaagttgcttccttgtgtgggccaaatcattctcccatcctacttagatcttctttttttccaggatcaatactgaaactttcttcacctagcccttaaacaacatgat

SEQ ID NO: 2399 - DNA, 1345 bp, Homo sapiens
caggtgctgacctcgtgatctacctgcctcggcctcccaaagtcctgggattacaggtgtgggccactgcgccggccatgtttctcgacttctgctggcaagcatgttccagtatttgcatggctcctagccctcatctccatttctctgcacagatgttaccttccccatgaggtctgccttatacatgaggcctgtattataaactgcaactccgcattccccaaccccgttgtttcttctctccagaacactaggaacccatctgatctcctatgccttttccttattgtcagatactgaactctcagattacagttccccttcctccctccaggtggcgccatggaacgcagggccctcactggccctggggactgggtgacgacaggggggagcctctggtgattggctccctcaccctgcgtaagatcaaagggactaaaggacagccccgacacccggagccattgtggctcaggcaggttgcgcctgccctcgggccctcacggaggcgggggttccagggcacgagtcgaggccagcctggtccacatgggtcggaaaaaaaggacttttttttatcgttcccaatataacgacaaaacataaagggaggacgccttgataggaagaaatgacatcttcctaagtgtttttaaattacttccatgtgtcttttttttttttttttggggaaccgaggcttgctctgttgcccaggctggagtgcagtggtgtgatcttcgctcactgcaacctccgcctcgtcggttcaagggagtctcctatctaagcctcctgagtagctgggattacagtcgcctgccaagagatggggtttcgccatgttgaccaggctggtcttgaacacctggcctcaaatgatccactcgccttggtctcccaaagtggtaggatgacaggcgtgagccaccgcgcccagcctcttctattcttttagagacagggtctcactgtgttgcccaggctggagtgcattgatgtgatgtgtgatcatagctcattgcagccctgaccatccgagctcaagcaatccttctgcctcagcctcctgagtagctggggccgcagatgtgcaccactgcacctggctaatttttaacatttttgtggagccagagtctgtataaaataaagtgtaaatagtaccataaataaagaatacatagtaccattttatagtagtataaaacggacattagaaactctgaacttaaaggttaaaaaaatacacaaaagtagttctcaagttctagagacttggagaatccaggaatcaacaatgtcgtggaactcctacagcctttcataaagaatggcc

SEQ ID NO: 2400 - DNA, 1376 bp, Homo sapiens
cgcacgggcgcgcgcatgttgacgcgcttcttagctggtgcgcgccggagcccaaattccaagtggaaactgcaggcgcacgagggaggaacgcgtggagcatgaaaaggcagggggcctcctctgagcgaaaacgagcgcggataccgtccgggaaggccggagcagcaaatggatttctcatggaagtttgtgttgattcagtggaatcagctgtgaatgcagaaagaggaggtgctgatcggattgaattatgttctggtttatcagaggggggaactacacccagcatgggtgtccttcaagtagtgaagcagagtgttcagatcccagtttttgtgatgattcggccacggggaggtgattttttgtattcagatcgtgaaattgaggtgatgaaggctgacattcgtcttgccaagctttatggtgctgatggtttggtttttggggcattgactgaagatggacacattgacaaagagctgtgtatgtcccttatggctatttgccgccctctgccagtcactttccaccgagcctttgacatggttcatgatccaatggcagctctggagaccctcttaaccttgggatttgaacgcgtgttgaccagtggatgtgacagttcagcattagaagggctacccctaataaagcgactcattgagcaggcaaaaggcaggattgtggtaatgccaggaggtggtataacagacagaaatctacaaaggatccttgagggttcaggtgctacagaattccactgttctgctcggtctactagagactcgggaatgaagtttcgaaattcatctgttgccatgggagcctcactttcttgctcagaatattccctaaaggtaacagatgtgaccaaagtaaggactttgaatgctatcgcaaagaacatcctggtgtagccagacctctctgagagacatggatatcacaggatgaaggtagaactataatctgcaattctctatgacacagctttaaccttcttctctggccaggacagtcgcaatctttgttttaagtttcacatggccatggagaatgtgcccaagaagaaaaagaatttgaaacagagatacagtcacttcctttgcttagtcttaccagtgattgtcatcatggttaaagctggtctgtgcttcttccatagacagaagcttagtctgttttcagtggaattaattgatgaactgggaaaattttaactgcatggtatgaattcagagtgtgacttaagggtcaattcaaagcagtattttgacttttcatttgtaaaataaaaatttccactattacaaaaaaaaaaaaaaaaaaaaaaaaaaaaaaaaaaaaaaaaaaaaaaaaaaaaactcgag

SEQ ID NO: 2401 - DNA, 1485 bp, Homo sapiens
tacgagttttttttttttttttttatatttaagttttatttctttgagaacttatgatatacagtcatgcatcactgaatgacaaagatgtgctctgagaaagacatcattaggcgattttcttttccttgtgctaacataagagtgtgctaagcttatagcttattgctcctaggctacaaacctatacagcatgttactctactactaaatactatatgcagttgtaacacaatggtaagtatttgtgtatataaacatatctaggtagagtaaaaatatgatactaaagtcttacaggaccactgttgtatatgtggtctgttgtttactacatcatcatctggcacctgacattacattcatttagctaaacttaactgataagacatgagtgtttgaagagcaagattcatctgtagactttacatatacaatactcttttggggaaaataagaatataaagaattaaccttgaaattaagaattcttgcatttccctctagtgcctttcttgaacttttaaattcatatttttaattaaaaatttcttgatctaggctaggcatggtggctcacacctgtaatcccagcactttgggaggctgaagtgggcatatcacatcctggctaacagggtgaaaacctgtctgtactaaaaatacaaaaaattggccaggcatggtggcaggcgcctgtagtcccagctactcgggaggctgaggcaggagaatggcgtgaacccgggaggcagagcttgctgtgagccgagatcatgtcactgcactccagcctgggcgacagagcaagactccgtctcaaaaaaaaaaaaaaaatttattgctctgttcaaaaaatggagtcattttttaaacacatggagcagtaacccataatgaggtataatagacctaaccatgaaacacagaaaacttaaccatattctacttctgctttgtatatagtgatcaccagcagcttgcaaaacttatccaggagtcgccaaccgttgaactgaaagacaagttggagtgtgaattggaggcattagtgggaaggatggaagcaaaagccaaccaaataactaaagttcgaaaataccaagcccaggtaactcagttttccttcactcaagtttctaatgattaagaaaaaaaaaaacactttaattcaatattaatgatgacactaagtgtatcatagataaatatctacaggagatacttctttactgaagacatttgttcattgagaattggtaagtggattaagaaagaagacacttttagtcacttagcatattcatctaagaaacatctttcaaatactgaatatatttaatattctttatgaataagctttaacttctttgatgaatttaaatcggagtttatccaagtaagtttttttaaaagcacctgcgaaattctgtttccaaaggaataagtcatacattaaatatgtgaaatatactctgccgaatt

SEQ ID NO: 2402 - DNA, 486 bp, Homo sapiens
ggcacgagcagctgctaactgtgtgaccttgggaacctaacctctttgtgcctcagtttcctaatctgtaaaattaggctgataacagaatcatagtcttgtaataagggttaaagatataatctatgtacagtgcctagtccaatttctagcacacagaaggtactgcataaatgttagctattattacgtttctgaaagctcacttgggtacacataacatggggcaagaccagagggtggagaccagttagatcgtcactgaggtcccttccagaccagtaaatttctgaataaagctttgaaaactagttgctcacttttaagtagctcacttcctgtcttgtttacattaagagacagcagaataatttttccagataatgcaaatgtgtccagaattagttctaatttgaattaataagattttattatacttttaaatacaaatctctcaatattccccatgaaaaaaaaaaaaaaaaa

SEQ ID NO: 2403 - DNA, 2401 bp, Homo sapiens
  misc_feature (1263)..(1263): n equals a,t,g, or c
ggcacgaggctttttataactcttaattattggcaataaaggtgagaaacatgtaaagagccaaataagacaattttatatacttgatatcgttatgacacaaataaaactgggtaatggaaaataaagggccagggtgatgtgttttttgtgtgtgtgatacttcagcaaaggtacttgaagtcatttctgaaaaaagacaaaagaaagctgtgtctatcctgatgctgaaaagaaaaaaaaggcatgtggtgataggtttataaaagtattactggtagcagaaacagtacataccaaactcttatgtagaagaaatcttgatgtgatcctagagaagaaataagtagaataatgtggaatagagaagactaggattgagaccatgaagtaaagtacgtgtaagaattacttttactaaacttaaaaatttttctatatatttgtatttatgtctatatttataaatagatctagaggctttgtatgcctgcatataggcatacagttctaaaaatatgtctttatttaccaaaggttatggtaaaatttamwgacaacaaaaacgagaaaaaaaccccactttactaagaggactccagctacgctgtccagtaaggtagatacacacaaaatgttgcaacttaaattttaattaacagttttaaaaattataaattcaattatttaactacattaactatatttcaatgaatatatagccatatgtgtgtaaagattacttctttggacaatgcaggtatggaacatttaagccacttaagacagttttcttggaaaacactggtgtaaagtcacagccctgaataaatgttaaagaatagattttactcctaaattattttgtttattttgccttgttacgtgatattgagtcagacatgcagttgagagtaatgtttaagaaattgagcaaaatatttccagtcccaagttagatgactaacacagattttaatagatttaatgtgttattccaatagcatatgtcaggtacgaatatactgtaacatctctcaggaaatatttatataacatagatataattaattagtcaataaccattttaattytatttaatacttatcctagttatgtggktttaggttggcagtttaatctataggaatatattaagactgatagaggraaagagaaagawtatgaccctttgataatgacamcagamcatatactattcttcctctttaatatcatattttgkgaaaagyttatgttttncactcagaattttcctcaaagttcaccgattatttcttcaaggaattttcaccttatctaggtttcagtatgaatttagttgattcattatttgagaatagttagggtagaaagcagagaaagatacacagtcaagtatgaaagtattagaatgtttgattttataactcacatagagaaatatctacatttttacattgttttattttgtcccagaaagaatgtcattgacctgttttgtaataagtgtaataagggataattagctcttaagattttatatttttatttgaacatatctattccaggaaaatgtacaaaacatattttaaatatycagctatttttatkgcctycaattattttcatttggaatatcttttttattttaaagttttggtagaagcagaamcaaaataacagaggacatctttaaacaaagcataataaaataatattaaattttattttactaaagatgcaaaggatttccataatttaaaaaataaattttaatttaactctgtaatttataagatatttctaaaatgtgtcctgtttataatttcagttcttgttagtatttctgtcattkggtaggcaataagaacattatttctaatcatgtaatgaatgaatgatatcagggtattagcgtaatttcagttaagaaaataatacttagaatattagtacctagaatattagtaccttgaaactcaatcatacataatacgaagagatgccttctttatttcctttggaggctttatttactaacttcatctttggtggtttccttttaaaataattcaccaaaacagtaaatttactttgtggaaagcataggcctccactctatcctactgtcttttgctatatatcttacacaaattcagtgatgttcacagaataatagagaacaccagcaaatgtactcctctatttcctttaagtaaaatttattttatccttttttatgatcccatcattcattcctttaaacattatgaattcttcattgcatccctgggttatgaawattgtggagttttagaaaattggataacatctctttacaggttataagatggtgaagaatcttaaggattaaatcagtgaactaatttagctcgag

SEQ ID NO: 2404 - DNA, 2970 bp, Homo sapiens
gtggaagcggtcgccatgtccgcggggagcgcgacacatcctggagctggcgggcgccgcagcaaatgggaccaaccagctccagccccacttctcttcctcccgccagcggccccaggtggggaggtcaccagcagtgggggaagtcctgggggcaccacagctgctccttcaggagccttggatgctgctgctgctgtggctgccaagattaatgccatgctcatggcaaaagggaagctgaaaccaactcagaatgcttctgagaagcttcaggctcctggcaaaggcctaactagcaataaaagcaaggatgacctggtggtagctgaagtagaaattaatgatgtgcctctcacatgtaggaacttgctgactcgaggacagactcaagacgagatcagccgacttagtggggctgcagtatcaactcgagggaggttcatgacaactgaggaaaaagccaaagtgggaccaggggatcgtccattatatcttcatgttcagggccagacacgggaattagtggacagagctgtaaaccggatcaaagaaattatcaccaatggagtggtaaaagctgccacaggaacaagtccaacttttaatggtgcaacagtaactgtctatcaccagccagcacccatcgctcagttgtctccagctgttagccagaagcctcccttccagtcagggatgcattatgttcaagataaattatttgtgggtctagaacatgctgtacccacttttaatgtcaaggagaaggtggaaggtccaggctgctcctatttgcagcacattcagattgaaacaggtgccaaagtcttcctgcggggcaaaggttcaggctgcattgagccagcatctggccgagaagcttttgaacctatgtatatttacatcagtcaccccaaaccagaaggcctggctgctgccaagaagctttgtgagaatcttttgcaaacagttcatgctgaatactctagatttgtgaatcagattaatactgctgtacctttaccaggctatacacaaccctctgctataagtagtgtccctcctcaaccaccatattatccatccaatggctatcagtctggttaccctgttgttccccctcctcagcagccagttcaacctccctacggagtaccaagcatagtgccaccagctgtttcattagcacctggagtcttgccggcattacctactggagtcccacctgtgccaacacaatacccgataacacaagtgcagcctccagctagcactggacaggtcccagagtccgatgggtggtccttttattcctgctgctcctgtcaaaactgccttgcctgctggcccccagccccagccccagccccagcccccactcccaagtcagccccaggcacagaagagacgattcacagaggagctaccagatgaacgggaatctggactgcttggataccagcatggacccattcatatgactaatttaggtacaggcttctccagtcagaatgagattgaaggtgcaggatcgaagccagcaagttcctcaggcaaagagagagagagggacaggcagttgatgcctccaccagcctttccagtgactggaataaaaacagagtccgatgaaaggaatgggtctgggaccttaacagggagccatgattatccagccaagaagatgaaaactacagagaagggatttggcttggtggcttatgctgcagattcatctgatgaagaggaggaacatggaggtcataaaaatgcaagtagttttccacagggctggagtttgggataccaatatccttcatcacaaccacgagctaaacaacagatgccattctggatggctccctaggaaacagtggaacagagttttgaccctcagtgactcttcttagcaataatgcatgcatttgatttaacaagactctggggcctgtgctgggaaccatctggacctttgcagaagttagagattcagtgcccccctttcttaaaggggttccttaacaaccacaaaaatccttatttctgcagtggcatagaatctgttaaaatttaattagaatcacaaatttatctcagaagctttttaacagttggtgaaatgtgcttgtccaacaaagcatcctaacagggtcgttcccatacacatttgacctggtcagccttttccaggtgaatagccccagttctgacataaagaaagttttatttgtattttactactgtttggtcaattttgatatataactggttacaaacagagccttactatttattagtggggaaatgattttaagaccgtccttttcagtatttaattctgacagatctgcatccctgttttgttttggattatttctgttttggaaaatgctgtctcatttaaaactgttggatatagctggatcctggataggaaaatgaaattattttttcattgtgttttttaattggggtgatccaaagctggcaccttcaggcacattggtctcatagccattactgtttttattgcccttctaagatcctgtcttcagctgggtcagagaaaacttcttgactaaaactggtcagaactcatcacagaaatgaaatacagtggtctctctctcccagaactggttgcagctaaaacagagagatctgactgctggctataggattttggacttaatgactgaaattgcaaattgtcctttttcttggcattacagattttgccaaaataactttttgtatcaaatattgatgtgtgaaagtgaaggagctagtctgctgaaccaggaatagtttgagatattgaactgtcatttttgcacatttgaatactttgcaggctggctttgtataaacttatcctctggtttcctatatgttgtaaatatttagaccataatttcattataaataaatctataaatattcaaaaaaaaaaaaaaaaaacgggaggtt

SEQ ID NO: 2405 - DNA, 2184 bp, Homo sapiens
gcgcggtgcggacttcgagcacgagccctaaagacgctcagcactcgtcgcttctcctagcagaccctgcccggcttggcgatggagtttccggacctcggcgctcactgttcggagccgagctgtcagcgcttggattttctgccgcttaagtgtgatgcctgctcaggcatcttctgcgcagaccatgtggcctacgcccagcatcactgtggatctgcttaccaaaaggtgagggggcgatcctcagggtgaaagcaggcagatggagaatgcgtgcagaatcccccaaatctgtgtctcacgtttcttctcccttttgtccttctgaggctgtcagtgctgggaaacactgtttttttgcgtgtttgtggtgggtcatatccaagttctttcaggaccagagatttgttggactggagtgggccacagactgacccttgctccttgactacaggatatccaggtacctgtgtgccctctctgtaatgtgcctgtgcctgtggccagaggggagccccctgaccgtgctgtgggagagcacattgacagagactgtcgctctgatccagcacagcaaaaacgtaaggtaaacattgtaggggtcagccacaacccagctgggactacggatgcctggaaacccaaacagctaatcagagtctcagcagagacaaccttctcacttcacctcagatcttcaccaataagtgtgaacgcgctggctgccggcagcgagaaatgatgaaactgacctgtgaacgctgtagccgaaacttctgcatcaagcaccggcatccactggaccatgattgctctggggaggggcacccaaccagccgggcaggacttgctgccatctccagagcacaagctgtggcttctacaagcactgtccccagcccaagtcaaaccatgccttcctgtacctctcccagcagagccacaacccgatctccgtcctggacagcccctccagtgattgctttgcagaatggcctggtgagttgggcagaggttggatggacagaaacaaacacacagagagtgaagtccaaggacgctggtcttctttctccctttgtagagtgaggatgaagctctgcagcgggccctggaaatgtccctggcagaaaccaaaccccaggttccaaggtaccttaccctcttgtgaaagagagcgcaagctgtgggcaagggcttggtctggaggcaggtaggtgggaccactctgacacaatgcaagataatcgctggcaacttggtctcaaaattaagatgaactatatgatctttgacaagttatttaacccatggagccttcatttcctctataaaacggggacaatactaatacccaccttgtagtgttgctatgaagattgagataatcctcagcagtgctcagcaccatgaggcccaacacacacagatcagatgttcaaatttcagatcttaccatcatccaacttaaactgtttctccctcccagttgtcaggaggaagaagacctagctttagcacaagcactgtcagccagtgaggcagaataccagcggcagcaggtatgaggctgggctgaagatatatgctgcagtggaagggaggaagaagtcagggatgggggttcttcctagtggtgcagagttttggaatggtggttatcgtctggttttcagtatgactccagcccatgctgagctctgaaatgagggctgtccctcatttccttgacgttgcactgtgtcttcccctccttcccctctctttgctctaggcccagagccgcagctcgaagccgtccaactgcagcctgtgctagggccctgggcttggggagggaggttcacctgaggaggactgtggccctcacacctctagggtacacagggagaggaggcccggagcaccctggagggcagagacaagcgggagtgatgtggaggtcgccctgggagcctctggaaggccttgctagtgctccagctgcatggaagagagcggctagcaactgttccctggttgggccctcagtggatgctggccaggccctactcttagccccttcatcatgtcatctcccttatgctggagctgccccgatgtggagtgggcaggaaggggcctggaaaaaataaaggatcttggcagttgataaaacgtaaaaaaaaaaaaaaaaaaaaa

SEQ ID NO: 2406 - DNA, 3852 bp, Homo sapiens
  misc_feature (2098)..(2098): n equals a,t,g, or c
  misc_feature (2111)..(2111): n equals a,t,g, or c
ggcacgaggaaaaaccagaggaaaaagcttaataagttacctttagcttttcttttctctgaaatgacacttcatgttagtatctcccaggagggtctattttctagacttgacatgttttgtggcttttcttctgcttgtacaatgcagtgtcctaactgtgtgcccacaggtcactgaggaagagtagggagtacagctctcagaccttttttttttttttttcaagttctttcctcttggatccatctggtccccattttcttcaagttggctttcagggagctgcatcataatcttaggatcaacaacagcttagggtccacggtgaccttctgaacctcgtctgtctgattcatgccttgctagtcagtcgccatcttggatgtgtgcttcacccagctttccttcattggctggcttccaacttattcctggtcagtgtcccgcattgccagtcttcttggattccaggcctgtattttgaggcataagccccttttcccaatgttggtgttctgccaatggatagaacttaatccttatttatgccccctagttactcatggagacactgaggatgtttatctgcctttcacacctcctgggccctgaagggaaaaaactctgggttcttctgaagcttttagtgcgtagttcttcttttcctactaaattgtttccgtatggaacaaccagtgtgggagatgatttcacctcttgtcatctttcctaagtcttccttgaagtgggtaagttccttctggctgttactggttccttggtgctgccacctccactgccccccactcccccttttttatagatccctaaatcacatcaaattgttttatttttcaaatcactaaagttgcctttctgccttagatcgtcagccagctctttgcagttaatgaggatccaattatgaaaggcagctgctcagctcctccatcttctatcccccacccccagaaatgtttaggatgacttctggctggtgaatatcagctgttgtggttgtctcctaggaatggcatggctgagggctttgtggtttatatctgagcagttaggggctcttttgcagggggaggaaagacagggggacttttgcttctacaaaggaaagactagtgccttgtctcctgggtgaggcttgtcattgggatggattcacaggcgagcagaaatggcaaaatttatggggcccgtgctcccagggggtggccgctccttcagggggttccacagtagcagaaaatgcattatattttgggatcatttgttagtgtctcatttctaccatctgtatgagaataaacagaagctgcaaacagagcctatcattcccggaacagaatggggtctggcttccatctcccagagatggaaggcttaggcagggaaatacacagaagcctctggagtgtttttcttggggtctactgtgggaatgaataacttggaggtgaaattacagcctgataacgagcatctaagcttccagagatggattcttacaccatttgctgaattttgctctgctgtgaatttgctgtcatttgttcattcatttattcacttagttattatttcaacaagtattattgatgatgctttctgcgccagaaatgatgtaagcactggggtcacccgggcaacaaccagccctgactgctgcttaccacctggaatcacagcgctgctggccgcgtggccacatggtttgttcccggcacagttttgctacaaggaataggtcttcctgctggccccttccctgttctccttagaggaggccaggggagacgtgcagctcatctacagggccctggagcggcctcctagcgtggcaggctgcagccctctctgcattgcaggttccattccagagggctgagagggagctctcttactgccactaggctccagtccagctcagagtttgggggatcagagaacattgaacacccacatgcgagaggtctcaggggctatttctgtgtctgggctcccatgcaggctaccgtggagttattcagggaacttcctaaacctggatctccatggggggtggagggtcctctgtgcaagncaatgaccctctnctgtgggctggtgtctgaaagcccaccgtgagaaagtcattccttctgctgaaggcgtcgttacctattggaccccagaaagggaaacaaagaaggaagggtgagaaagctttggtctagaaccctgggaccaggagtcgagccctggctccaatcctctccagctgtgtgaccttggggaggccatttagcctctctgagctttagtttcctcctgtcaaaatgaggatgtggtttagatgagcacagggcctccttcagctctaaaactgtaactcaatgtgattgagcctcagatctttttctgatggcccaggggacacggggtgaaggaaggagagaaaggatgtgagtgggaaggagtgctaagaggaccgggtatgggaggcacagtaggtagagcacagttagaggagcctgaggacaccaaataaaaactctggggcaagccagggagctatgggcagaggctttatgacagatgcagcaggcatgctgaggatgaaatggcgggtccacttcccattcccaggcacctcgctttagacaccttgctttagacaaagtgatggccagtggaaacctttgtgcttgagggtgcaagttactcacatgctttttctcttagagaaatagaacttattgggaaatagactctggacttggacagggaaccaaatttcaccttcaaaagtgaaatgtagatggagaatatggcttgcactcttggccaaaacaggttcacaaatgcccctctctggaatgatctagacctgggaagctgaatgggggcaggtggttgtgggtcaccctccaaggccactcctgcaggagacagagagcccaagaaccatgtggccatctgagtacattaactgcccaacggagaagtattgtccgatggacatcagatcttccctcttctgccaaatacatctctctccatgggaagagacaggtaaagatggaaggataggccaaagattttccctcaggagtgctaagccagcgaatattttgattttatggccctgggcagaaaggtgaaaagagggagaaatgatttcctttccaggactagaatctaagagcagttttgtactaacatgctacttaaaaggctgcttcaaagctaagactgcacatctgacctccatattcctagtgcctgctggcctatagtaggtggtcagtaactggatggatgggtaggtaggaggagccctttaagggactggctttattggcagaccagctttcttcactgccatctgtgccttgaaatgaccatttcttacccatgagcttcccccagtaaagggaaggaagaattcccttggtgttgacctgtctaatttacatccttcttccatgtctgaatctgtcttcccttgtacacctttttggttgggcagagctggaatatgtgtttgctctgagaatgaagagaacatggaggtagccgggcgcagtggctcacgcctataatcccagcactttgggaggccaaggtgggcagatcatttgaagccaggagttcaacaccagcctggctaacatgatgaactcctgtctctactaaaaatacaaaaattagctgggcgtggtggcaggtgccctgtaattccagctactcgtgaggctgagacaggagaattgcttgaacccaggaggcggaggttgcagtgagctgagatcgtgccactgcactgccagcctgggcaaaaaaaaaaaaaaaaaa

SEQ ID NO: 2407 - DNA, 2604 bp, Homo sapiens
  misc_feature (1286)..(1286): n equals a,t,g, or c
  misc_feature (1350)..(1350): n equals a,t,g, or c
  misc_feature (1369)..(1369): n equals a,t,g, or c
gagctaatcccctataaatgattaataattctttacattaacatttcctcttcaaattactgtgttctttctgtctcctgactttgactgatactaggacaggaagccgaagaaagaattagtgttctgcatgggaccaagctcacacatgaacatcacttctcatcagcctcctcatcacaattttatgcttcttttagatatcatttttgttctagcatggattttgatgttgcttacaaacatttcctgagtacatattgtgtatttgagaactaatcataacatctaaaagcagtgcaaaatgagcaacacacatacacgtgtatgtgcacacacacacacacacacacgactactcctattgggagttgagacaacaggcttcaacatcaactgtgtccttaactagcactgagaatatcagagagaaagccctctgagcttttctctttgaggcttgatgagataaattgaagatattttctgctcaaaaaatcgataatatttgatttgagtggtgtgaatgtcaaacagcaaaatgttagtgaaacaaaaggacagttttgaaggctagccatggattctggggctggtgagaggcaccgtgagagacatatggagtgaccattgagagcaagaaaagatgttctgggctggaagttgttctccttgtgccaaatgcaaggaaatctatgaaaaccctctcaccacatagaagaagccattcttttctttttttcttttttttttgagacggagtctcgctctgtcacctagggtggagtgcagtggcgcgatcttggctcacggcaacctccgcctcccaggttcatgccattctcctccttcagcctcctgagtagctgggactacaggcacccggcactgcgccaggctacttttttgtattttcagtagagatgggatttcaccatgtgagccagggtggtctcgatctcatgaccttgtgatctgcccgccttggcctcccaaaatgttgggattacaagcatgagccaccatgcctggccagaagaagccattcttaggcaactacataacagacatatttttcaaagcaggaaaagatacacagaaacacgtggaagcaaatgtaaaaccataaatctacatagacatggtagatttttattttaaagtctgaattttgggcatttgcagattgaacaactgggaactttttctattaacagtcctgcattctataataaacagaccaatgggaattaaattaggttagtattcaaaaaaaaggtcagcangtgataaagagccagggcagctgtcaaatgaaaagacttggcgcaggtaactattctggatagntaatgtccttagacctagngactcacttctaacaaagacactgcagcaaaagtgataggctatcatttctgagattaagtttaaaaaggtgttgacttccaccatcgcacacacacactctctctctctcgatcactgtcatgctcattctgatgaagtcagctgctgtgttgtaagctgttgtatgaagggacacgtgtgacaagaaactgagagtagcttctgtccacactcagcaagatttgaggccctcagtctactattatgcagcactgaatcttccttagatccttcttcactcaagccttgagatgagaccacagcctctgccgatatcttgattccaaccttgtgagacaccttgagggacagacaccaaactaagctgtgcccaggttcctgacccacagatactgtgggataacacatttgctgtttaagtaactaagttttgtcacacagcaatagatacataaaagatgctgggtgcagtggctcatgcctgtgatcccagcactttgggaggacgaggtgggcagatcacttcaggccaggagtttgagaccagcctggctgacaaggcaaaaccctgtctctacaaaaatacaaaaattagctgggcatggtggcacatgcctcccagctacttgggaggctaaggcacaagaatcacttgaacctgggagacggaggttgcagtgagccaagattgagccactgcactctagcctgggtggcagagtgaggcactgtctcaaaaataaataaataagtaagcaaataaataaataaagagtatcgttacaccggttttctgtggctgctgtaacaaactaccacaaagttggtgggttaaaaccacagaaatttattttttcatggttatggaggccagatgtccaaaatcagtatcactaggctgaaattacggtgttagcaggaccacactccctctgcaggttccccctgccagctgctgacattccttcgctcgtgataacatcattgtagccttcgtggatggcacttttaaatctctgtctacccccatcttcacatggccccttcctgtgtgtgtgtgtgtgtgtgtgtgtgtgtgtgatctccctctgcctccctctttttttttttttttttttttttggagacggagtctcgctctgtcgcccaggctggagtgctggagtgcagtggcgcgatctcagctcacccaagtccgcctcccagattcacgccattctcctgcctcagcct

SEQ ID NO: 2408 - DNA, 3033 bp, Homo sapiens
ggcacgagttgctttcagcagcatggtcaccattttcaacatcatcaccaccaccaccatactccccacccagctgtcccagtttctccttcctttagtgatcctgcttgccctgtggaaagacctccacaagtacaagcaccttgtggagcaaatagtagttctggtaccagctatcatgaacagcaggcattgccagtggacctgagcaacagtggtatcagaagtcatggaagtggcagttttcatggagcatctgcatttgacccctgctgccctgtttcttcctcccgagctgcaatctttggccatcaggccgctgctgctgccccaagtcaacctttatcatcaatagatggctatggatcaagcatggttgcgcagccccagccccagccccctccacagccctctctctcatcatgtcgacattacatgccacccccttatgcctctttgacaaggccacttcatcatcaagcttctgcctgcccgcattctcatggaaacccccctcctcagactcagcctccgcctcaagtggattatgttattcctcatcctgtacatgctttccattctcaaatatcttctcatgcaacatctcatcctgtggcacccccaccaccaactcacttagccagtacagctgcaccaatccctcagcatcttcctcctacacaccagccaatttcgcaccatattccagccacagcacctccagcacagagactgcatcctcatgaagtgatgcagaggatggaagttcaaaggaggaggatgatgcagcatccaacgcgggcacatgaacgccccccaccccatccacataggatgcacccaaactatggtcatgggcatcatattcatgtgcctcagactatgtcctcacatcctcgacaggctccagagaggtctgcctgggaactgggaattgaagctggagtgactgcagctacttatacacctggtgcattgcatcctcacttggcccattatcacgcacctcctcgacttcatcacttacaattaggagctcttcctttaatggttcctgatatggcaggctatcctcacatccgttacatttcatcaggattggatggaacatcattcagaggtcctttcaggggcaattttgaggaactgattcatttggaagaaagattaggcaatgtcaatcgtggagcatcccaggggacaattgaaagatgtacatatccacataaatacaaaaaggtaacaactgattggttctcacagaggaaactgcactgcaaacaagatggggaagaagggactgaggaagacacagaggaaaaatgtactatctgtttgtctattttagaggaaggtgaagatgtgagacgtcttccatgtatgcaccttttccaccaagtgtgtgttgaccaatggttgattaccaataagaagtgccccatatgcagagtggacattgaggcccagctgccaagtgaaagttgacaccatgtttcagaactcttgccctccctctcattcccatccttcctggtactgcagtcaaccaaagatggcatgacttacctgcgcagatttggaagcattgaacttagagtgctggctctgctatatggtacaactaatgctagacctacagtttatgtatacagttgattttgatgtatttataaaagcttttttttctagatttgacatttttctgtatcattttactgtatttttgcatggttccttgtattgcatttctttgcacatattatgggcttgtgaccctaaacttgcaggcaaggttagctgctttagtaagtagaattttgtggtctttttgttttttacatagtaccaagccttgataattatgaattttttatccattactaacctttaatttaatcaatcatgtactttagtttaatgtataaagatcctctagaaaatgataatattgtgtattaagacattccttaattaggacaaaatggctgctgtatatttactatatggagttctgagttaaataccatccttaatactgggaacagaatacaacccatataaatcagatgcaggtggtagtcacatcaccagagtgatcagtataaattttcttggtgtatccttttcctttcaacacagtgcagataagagttgaatattgatatcatacatttagactgctgttctgattgcatttatctttttcctacatcatttagaattttatttccctgattcagtttttgctgctgtgaaacagctctgatgaacactaaatattaatttcaattagctagattgtacatacttgcagatttaacaaaattttagggaaattgaaaaagacatgtagaatttgttgtcttctgctaagcacgaaaagttaagatatctgcttacattgattttgtagacacattaagtcaagatttggaatttaagtcactggcaggtatctgtgcattcatagaacttataaaggtcccaggatcacttttaagggatttttattagtttaaaggtaaataaagtcagctgaatctacatgtctcttgttttatttctctctaaacttgaaaacagtaaatctgcagatactgtgaggcacaaattatactgtcaacctactgttgctatggttatatactcccacttcatacattaccaagagtcgatcactgatttaaaatttttaatttctatagttaagatttactgcataatatagaatataaagttaagttaacatactaacatttctcctttggaggaagttttaatctacttcaggatgcatattattatcaagatactttcatatacaggatagcctaattttatttgtttaaatatgcttaatatgccccagattgcaaatgcatccagtcagtaatatcactgtctgtatgtggaggacatgttcccatggatcatatgtgaagatgtcaataagcttgcattaagccacctgctttgtaagtggattgattaataaataacttatatttctattgtcaaaaaaaaaaaaaaaaa

SEQ ID NO: 2409 - DNA, 2003 bp, Homo sapiens
ggcacgagaagaaatcgccccgggacatggactcagtggtctttgaggatgtggctgtggacttcaccctggaggagtgggctttgctggattctgctcagagggacctctacagagatgtgatgctggagacctttcagaacctggcctcagtagatgatgaaactcaatttaaggccagtgggtcagtttctcagcaggatatttatggagagaaaatacccaaggaatctaaaatagccacgttcaccagaaatgtttcctgggcctctgttttaggaaaaatttgggacagtcttagcatcgaagatcaaaccacaaaccaggggagaaatctcagaaatcatgggttggagagactctgtgaaagtaatgatcaatgtggagaagccctcagccagattccacatcttaatctgtacaagaaaattccacctggagtaaaacagtatgaatacaacacgtacggaaaagtcttcatgcatcgccgcacatccctcaagagtcccatcacagttcacactggacacaaaccatatcagtgccaggaatgtgggcaggcctacagttgtcgttcacacctaagaatgcatgtgagaacccacaatggagagagaccctatgtgtgtaaattatgtgggaaaacctttcctcgtacttcctccctcaatcggcatgtaaggattcacactgctgagaaaacttacgaatgtaagcaatgtgggaaagcctttattgacttctcaagtcttactagtcatctcagaagtcacaccggagagaagccatataagtgtaaggaatgtgggaaagctttcagttattcctcaacgtttcgaagacacacaataacacacactggcgagaagccatataaatgtaaggaatgtgcggaagcctttagttattcctcaacttttcgaagacatatgatttcacacactggagagaagccacataaatgtaaagaatgtggggaggccttcagttattcttcggcttttcgaagacacatgataacacacactggagagaaaccctacgaatgcaaacaatgtgggaaaaccttcatttatctccagtcctttcgaagacatgaaaggattcacactggagagaaaccctacgaatgcaaacagtgtgggaagaccttcatttatccccagtcctttcgaagacatgaaaggactcatggtggagagaaaccctatgaatgcaaccagtgcgggaaagcattcagtcacccctcctcctttcgaggacacatgagggtgcacactggagagaaaccctatgagtgcaagcaatgtgggaaaactttcaattggcccatatctttacgaaaacatatgagaacacatactagagagaaaccctatgaatgtaagcagtgtgggaaagccttcagcttgtctgcttgctttcgagaacatgtgagaatgcaccctgaagacaaatcctatgaatgcaagctatgtgggaaagctttctattgccacatatccttacaaaaacatatgagaaggcataccgcagagaaactctataaatgcaagcagtgtgggaaagctttcagttggcctgaacttttgcaacaacatgtgagaacgcacactgtagagaagccctatgaatgtaaggaatgtgggaaggtcttcaaatggccatcatctttaccaatacatatgagactgcacactggagagaaaccttatcaatgtaagcattgtgggaaagcattcaattgttcctcatccttaaggcgacatgtgagaatacacactacagaaaaacagtataagtgtaatgtaggacatcctcctgcaaatgaattcatgtgcagtgcttcagaaaagtcacaccaggagagagatctgatcaaagttgtaaatatggtgttgcctttatgagttccttatcctgaaagtggacactcaaggagtgtgtctgtagttcatttgcaaataaacatttagttgaaaaataaaaaaaaaaaaaaaaaa

SEQ ID NO: 2410 - DNA, 1417 bp, Homo sapiens
gaattaatggaactcgcctatcagactttactagaggcaacaaccagtagtgatcaatgtgctgttcaacttttctactcagtgaggaatatcttccatttgttccatgatgttgtaccaacatatcacaaggagaaccttcaaaaacttccccagttggctgctattcatcacaacaactgtatgtacattgctcaccacttgctgaccctcgggcatcagttcagattgcgtcttgcccccattctttgtgatggcactgctacttttgtggatcttgtacckggcttcaggagacttgggacagaatgctttttggcccaaatgcgggcacagaaagtgaacttctggaaagattatcaagtgctaggaacttttcaaatatggacgatgaagagaattattctgcagcaagtaaagcagtccggcaggtactgcaccaactaaagagacttggaattgtgtggcaggatgtcctgccagtgaatatatattgcaaggctatggggactttactcaatacagcaatttctgaggtcattggcaaaattactgccctagaggacatatctactgaagatggtgataggttatattccttatgcaaaacagtgatggatgaaggaccccaagtatttgcacctttatctgaagaaagcaagaacaagaaatatcaagaagaggttccagtctatgtgccaaaatggatgccattcaaggaattgatgatgatgctacaagccagcttgcaagaaattggggatcggtgggcagatggaaaaggacccctggcagctgcgttctcttccagtgaagtaaaagctttaattcgtgccttgtttcagaacacagaaagaagagcagctgcccttgctaaaattaaatagctccatcttcttaagaaagctatgtcttgaatatgtggattcttcccttggcataattactcccttaaagacttctttgaatcgcccattggttttggtgaaccagtacatcttggaagtttgactttacagaagaacgtcttacctcctggcctgtacgaggctttgtttaagaactgtttattaagataaattgtcaagtaaagcacctcaattcattgactttctagccatcttcctttgattagctaacaaactgtcaggcagcattatttcatgctgcttccagagccctctgggagctatatacattgtaaatgcaggccctagctttggaacgaggaattgggagattccaggagtcagggtagagaatttctgagcaaatcggagatattttaggggtgtggaggaggggaagggaggaatgggccaccatatttggccttacaggaattaaggagacttcctgtaatatttctttccaataaatattgctttttacaaaaaaaaaaaaaaaaaactcgagg

SEQ ID NO: 2411 - DNA, 1146 bp, Homo sapiens
  misc_feature (1141)..(1141): n equals a,t,g, or c
gcaggaaatgacctgattcctttctaatacttgctccacggggtctggtcagtcttcacagcaccaggcagacaaagggcctggaagtagaggcaggaggtcccagatctaccgacctgccaagtcacagcctctctgggctgctggagaatctgtaagcaagaccgaattgtaaaagtaaagcacagcacagctttgagacccagaagccgttgctgtgaacttactgtttttgagctgcattctggagaattgcagctccaagtttattttacccattatgtatcaaagaagaccccatatagttaatgttgccatccgcccttggacccgggtctcatgtttagaccctggcatgggctgctgcctggcagtcgtctcgtgccctgggggcttgttagacttgtgggagctcccaatccgtgtgcacactgatgtgtgacagcttgactgtagaggscccagctgtgccctccccacagggcagaggccgacccagascccacactctctggacctcactcctgtactctccamcctgggatttcctgctcaaagggaccaagcctgcttccaggacctgtattggcctcttcccccaagccatggtgccccaaccccaagggatggccaaagagtgactgggggagttggcaaggggctgttgcgggtgtggggtggagcttggacgtgagggcttgaaggtccttgcttgtgtgcacgagactcctcacattgcaggatggagttgtggggagggtggaaagagaagagtacagacactgtcggctacaagcgttctcttttacttgtcctgggtcctaaaattgtcagagtggcctatgcgattttataaaataatttttctaggtctgtgggaatctacaattccactgttaaggtgagagagggataattagaaagttttcttagaggaggggcattggagctgggttttgacagatgcgtaggagttcagtagtagaaacagagggaattaaaactatgtaaacaaaaatatggcagaagggaagtgaggtatttgtgggaaaagatgtgctttttgctacagtctccacagtttgggatcagatcacgagggtcttgaattccagatggggggtttggtgggagggagccntcgag

SEQ ID NO: 2412 - DNA, 1465 bp, Homo sapiens
ggcacgagggcagattgcccattacaaattatagatttcttatttctttggaaaaatgaagtctgaagcaccaagtacattattacttggcaacaaccaactgcagttgggtagcagccttctcctttaaacccgcacccacctggcttcttaatttatgttcatagcctgtcttctgcagtcattatgtatttgactgttctacaatctccgcttctcgctaagggaggacacaatctttctaccaattagaaatatctagctagggcttacaaatttcataattgattttagtcctgtctgctgaactacatttttaaaagatagaggacaagatacacaatatattatagacttcagccacattttcttctttgcatctccactaattcctattattgattttcctttgagcacattggtttgtgcgcctgaattataagtagtgacaggttgaacttcctccactcctgtatgtgtcagagttgcaattaacaatcatgtaggtcagataatagtgatgacaatataaaggaaaaaatacttcctcctaacttagtctcggaggttttctgtagtgaatatgttcctttacctacaaagaatatttgctttcaaaataatttctaataaatgtcatatgtcaactcactttccatgtaactatttctatttctagaaatctgtttaaggtcaagaactaacattagttactcttcttttataagcctctgtcgatggcgttcataaattctacaggtcttactaactttcagaataagttagcaatattttgaaatccattatagataatctgaaagrttaacatgccttacatctgaccataaatttgatactaatataaaattctattcaatctttcaggcccacagtacatttttaacttgtttcagaaaaaaatctggcccaggccagagtatgtgagtcacttgagataccttcctttactgacagcttttaagttatataccctrcaatctctagtacaaacatgcccttcctaattattttccccttgcccctcacatgaacctccttttcccttccaagatatatctcatattacctctttgtgatgttcagacattccctagcatttgtattctcacccctttccagtctattcaaatcctacccaagtttcatggaccttctgaaatgcacgtcctccataaaattattcctgctcactctacctctctgattcaatcatctggcaaatatcatgtgctagattgaaatattatttatcttatcaagtcaatatgktttaatacctttagcaatatgcttacaaaaatgtcctatattccatgkgtttttwaatccaataaattacytttcataagaaaaactcwtaaatattcatcagtggctaacctagttctgagatctaatagcttaaatcaaagatccagtatcatcaaattttctctctctcgag

SEQ ID NO: 2413 - DNA, 1817 bp, Homo sapiens
  misc_feature (1796)..(1797): n equals a,t,g, or c
ggcacgagggattattacatgccgataaggtatgaattggagatgggatccaaaattactgtacttagtgtaatttttaagctaattacagggttggtggtgaatattttacttctgcaaaatgaaaacagcatttcatcagaagttgttttatggtctttcagacattttattgtatatctttggtgctttttgcccatgaagtatctcttttgtgtgtttgtgtgtatgtgtattgatctgctgtaaatttcacagcactcattgtcagggatcagcagaatcaggcctaggcagagagctgagcagtactctcagtacgtctctgtgtccttgttgccacattatctctgttgtttatttataagttggagaactctctgacctgtaacaaaggttggataggtcagagacaattgggagaggaatcctctgctctattgtcacctgtgcctcactccaaaatatgctctgaaatcaatatttaaatattaaatttgtatggtgaatgtatycttttttaawgttaattaaakgattggtcagcccacttaatatttacaatgcaggacttactttgcgtattctctgtcttgtatttttgctttatttaagctaggctagcctccaagctggaagctgaattgmcagttgaaaaataatgmcatgtatmcaaggtatgtttgaaggattgcagatgcaggggcaccatatgctaaaggagtgttggaagctcactgcagaagatgacaaaagcagactgatatgtattatttgctgaaatataagctggaggcacaggtgaagattgccaaacctaatgaacagtttggcaaataagacaggctgtcaggccatggcagttcamcagtgggcgtgctgcctgtgaaccaagtcatttgttccagaggactacacttaaataccacaaataaaatcttccttgtcactgatatcacagtgaaatagatgttgtctttcagatttctggttgaattaccagccattaacatctggtgatttgggttgtaaaattatttttagttttgcctgttcatatttcatccagaaagcccaaacaagatatattttcccacataagaatgtaagcagtataatgccccgtccgggagggaggcggggggcagcccccrccyggccagccgccccktccgggaggtgaggggcgcctctgccyggcygcccctactgggaagtgaggagcccctctgcccggccaccaccccgtctgggaggtgtacccaacagctcattgagaacgggccatgatgacaatggcggttttgtggaatagaaaggggggaaaggtggggaaaagattgagaaatcggatggttgccgtgtctgtgtagaaagaagtagacatgggagacttttcattttgttctgtactaagaaaaattcttctgccttgggatcctgttgatctgtgaccttacccccaaccctgtgctctctgaaacatgtgctgtgtccactcagggttaaatggattaagggcggtgcaagatgtgctttgttaaacagatgcttgaaggcagcatgctcgttaagagtcatcaccactccctaatctcaagtacccagggacacaaacactgcggaaggccgcagggtcctctgcctaggaaaaccagagacctttgttcacttgtttatctgctgaccttccctccactattgtcctatgaccctgccaaatccccctctgcgagaaacacccaagaatgatcaataaaaaaawaaaaaaaaaaaaaaaaaaaaaaaaaaatgtnnaaaaaaaaaaaaaagggggg

SEQ ID NO: 2414 - DNA, 1953 bp, Homo sapiens
  misc_feature (1362)..(1362): n equals a,t,g, or c
tttttttttttttttttttttttttttcaccaatgaaaacatttttttaaaattaacagacatcaactggtataaatacactgtctaaagcatttaatggtctttctttaacacagccaactcccccgggtttgaaacagtgttaaattctctcttgcttgtggcaaaagaagctgtcaagtccaacactgaaaaattggtaccatttcctggccagtaagcacagaacagaggggctaaatattttatggttttattyatttactgtgttctcatgctgtgtttttcttttctctgtctctccctcctgctcgtgtctgcccagggctgattgttgtgacattggccgtatgctggatgcccaaccagattcggaggatcatggctgcggccaaacccaagcacgactggacgaggtcctacttccgggcgtacatgatcctcctccccttctcggagacgtttttctacctcagctcggtcatcaacccgctcctgtacacggtgtcctcgcagcagtttcggcgggtgttcgtgcaggtgctgtgctgccgcctgtcgctgcagcacgccaaccacgagaagcgcctgcgcgtacatgcgcactccaccaccgacagcgcccgctttgtgcagcgcccgttgctcttcgcgtcccggcgccagtcctctgcaaggagaactgagaagattttcttaagcacttttcagagcgaggccgagccccagtctaagtcccagtcattgagtctcgagtcactagagcccaactcaggcgcgaaaccagccaattctgctgcagagaatggttttcaggagcatgaagtttgaatgtcaagcgagggagccttgagtgggaactggccctccagccctaagaaaacgtcactctcactctgcagtctcaaactatgcccccatcagggatggaatggacactggaggctttacaaaaggcagatgcccacctcagtgacttctaaggactgactctgccagcctggccttgactccggttacacagacatgggggtgaactttcactccacctccttccttcaagtacatactgaaaattcagtcargctgaatttattcagaatgctttaccgagctctttcattatttgcacaggaacaaaagagaacacggactcccgctccctacccagaataaaaggacacccagaagaaactcactcagggaggtggggggttgggggcgagggctggaagaacaatgcaggagggggtggcatctccttcagcttcagcagtgtgccgagaagagggctaatttgaggaacaggatggtggtgcggagccctgcctgagggccgaggcagaacttccccttttcttnggccttggcccgttacaaagaggggtgttgcagcagctgatgcaaactgagttcagtttccctggggagcagaaggactggtacccggcagaggcgatgagacaggccgctgatgatgcacaggacttgcggtacatgatcccggcactttgctccatcacttctttctgacacatgtcttgaacgttcaccgtgcaattcacaatgaactcgggggaggagcagtcgttgttcagctggaattcttcacactggtagcactggatttgcagcgcaaagcctggaagcaagaacaatccgcaaaaagttgccgcgatgcctaggacccacattctcccggagtcccggggccgggagagggcaagcgcatcagaggaggcgacagcagcggaggctgccccggctgcagcggctgtggctgccgaggctgctggggcccgcgctgctgccgcggagacgacggtcgtagcttagaggagccgcaggtgccgctcgcggagcctgcatcgcccgcgctcgggctcccggctgcgggtctctgctcctcccgctcgcgctcccgggccgagcaccgcgcctccggagttggcg

SEQ ID NO: 2415 - DNA, 1956 bp, Homo sapiens
  misc_feature (1362)..(1362): n equals a,t,g, or c
tttttttttttttttttttttttttttcaccaatgaaaacatttttttaaaattaacagacatcaactggtataaatacactgtctaaagcatttaatggtctttctttaacacagccaactcccccgggtttgaaacagtgttaaattctctcttgcttgtggcaaaagaagctgtcaagtccaacactgaaaaattggtaccatttcctggccagtaagcacagaacagaggggctaaatattttatggttttattyatttactgtgttctcatgctgtgtttttcttttctctgtctctccctcctgctcgtgtctgcccagggctgattgttgtgacattggccgtatgctggatgcccaaccagattcggaggatcatggctgcggccaaacccaagcacgactggacgaggtcctacttccgggcgtacatgatcctcctccccttctcggagacgtttttctacctcagctcggtcatcaacccgctcctgtacacggtgtcctcgcagcagtttcggcgggtgttcgtgcaggtgctgtgctgccgcctgtcgctgcagcacgccaaccacgagaagcgcctgcgcgtacatgcgcactccaccaccgacagcgcccgctttgtgcagcgcccgttgctcttcgcgtcccggcgccagtcctctgcaaggagaactgagaagattttcttaagcacttttcagagcgaggccgagccccagtctaagtcccagtcattgagtctcgagtcactagagcccaactcaggcgcgaaaccagccaattctgctgcagagaatggttttcaggagcatgaagtttgaatgtcaagcgagggagccttgagtgggaactggccctccagccctaagaaaacgtcactctcactctgcagtctcaaactatgcccccatcagggatggaatggacactggaggctttacaaaaggcagatgcccacctcagtgacttctaaggactgactctgccagcctggccttgactccggttacacagacatgggggtgaactttcactccacctccttccttcaagtacatactgaaaattcagtcargctgaatttattcagaatgctttaccgagctctttcattatttgcacaggaacaaaagagaacacggactcccgctccctacccagaataaaaggacacccagaagaaactcactcagggaggtggggggttgggggcgagggctggaagaacaatgcaggagggggtggcatctccttcagcttcagcagtgtgccgagaagagggctaatttgaggaacaggatggtggtgcggagccctgcctgagggccgaggcagaacttccccttttcttnggccttggcccgttacaaagaggggtgttgcagcagctgatgcaaactgagttcagtttccctggggagcagaaggactggtacccggcagaggcgatgagacaggccgctgatgatgcacaggacttgcggtacatgatcccggcactttgctccatcacttctttctgacacatgtcttgaacgttcaccgtgcaattcacaatgaactcgggggaggagcagtcgttgttcagctggaattcttcacactggtagcactggatttgcagcgcaaagcctggaagcaagaacaatccgcaaaaagttgccgcgatgcctaggacccacattctcccggagtcccggggccgggagagggcaagcgcatcagaggaggcgacagcagcggaggctgccccggctgcagcggctgtggctgccgaggctgctggggcccgcgctgctgccgcggagacgacggtcgtagcttagaggagccgcaggtgccgctcgcggagcctgcatcgcccgcgctcgggctcccggctgcgggtctctgctcctcccgctcgcgctcccgggccgagcaccgcgcctccggacggcacgagc

SEQ ID NO: 2416 - DNA, 4161 bp, Homo sapiens
atagatttttgtctttcaataaaactttttactttttctctatatttcaactaaatgtcttcaatatgccctatttttgtgctattgcaaatgatatcctttatgacacttattgctttggaatagaaattataaattgatcttctattcaccagtgttattcaactagtattaattcttgttgtttttctgttgccatcctcaagtaatggcagtttattactttttccctaatttcttattaatacaatcttgtaccagcaagagtctcatagccaatgctggattatgtagtgatgatgtctgttttgatcctgatttaaaagcaatgtttctgagaactcttctttacatgtatttagccattgattttggatagtctttatcagattcacttttgtttctgtatctcattttctaagactaattatgaataggttttgatttttaaaacaaataaattgaaaatatctattgagatatttttctgctttaatctgctaatgtggtcaattgtgtcgatattcttatctctaaaacattttgtattcattggacaaatcttagtcatgatgtatttttaaaataaatcaatagatacttttgccaaaactggtttaaaatttttgattccatgttcatgcataaaatcatttggtgattattccccatttttcttttctctgagagagtttgtataaagatagaattatatgttttccaaaattttagtagaacatctccagtatctccccttctcgcagaactcttaaccctattttttaaatcctatgtcgtactaagagagtatagatgtgtgcttctggaactaacatttcccttgaaggatatttccactgttttattaatcctttgtttcttctattatatacatctttttttcaaaaccacatatattatcatttctgatagtctgttattatctccactaccttattttgcttaccttgctgtaacagaatacatgagactgtgtatttataaaagaaacaagtttatttggctcatggttgtggaaactgggcagtcttaagagtatggctgtagcctctggtgagggtttgaattacatcataacatggcagaggagaagagaaagcaggcagatgcgaaaggggcaccaatgaggtagttaatccagtcctgagagaatgagaactcactcccaccagaactaacccaatctcctaagagtagcattcattccttgtaaccacctaatcaccttttaaaggccttgtctcccaagcaccaccacaccaatgaccaaatttttaacaccaaggattctgggtaataactcaaaccacagcattcattctgccttccctttattctatcttaagatctaatttgtttggttatttatttattggggggagcaataaagacatttcttaaatatttcccttccatcaaactcatcctaatttcaagtagtgccagaatgtctctgggattgggagaatcaggccaagaggaagttgagttgggtacatgtagtttgggattaataggatacaattaattagcttaaacagtcaatttcatttaagttatgttattgctacacaccctggtgtatgactagccccccagtatactgctaccagtgattgtgcccatctactcatcattgtaagtcaaaggtgcgagttcacaagttattctatgaagtgaatgttcccttcagcaactggcactgggggcatgttagcagtgagagaaaagcaatatttaaaagcacagagcaagaaattgatctgttagaaattattcccatcattaggtaggtaaaattataattaaatgtctttgtttctcctgaatacctaggaaaaaatgaagagttgttttcccagaattatagaagtatatccagtaaagcaattatagatacaccatacttttttactgttgggaattacacaaaatagagttgactaatctctgtgctttagtgcacagatctgtagtgagactagaaagagtcatacatttgcatgagaatatgtgtgttgaatgtaccccaacgtatgagattgtattttagcaagtgacatattttgtcttgttgaagtctaattgtcccgaacagagtggatttctagaatgccacccacatagtaaactggcctaaagataaatgatttctagtgaccaaaatctaatgtataccaattagtgagtcaatgtgaaaaaggagtaacttgattatacaatctgcagttattagaatgtagaagcaatttcaaaatgcacttaaattgcctgtgtatgtgttaatttcaggttaaatttgtatgtgactttttcataattattcatcataccaaaatgcgaatgtaatagaaagccaagaatttactccagaaaagaaaccttgtacctttaaaatatcaaatcattctagtttttcacaatgagtgctagttatccacaacttttgatgctgtaagaaactcaaacttaggtttccattccaagatggctgaataggaccagctccagtctgcagctcccagcgtgatcgatgcagaagacaggtgatttctgcatttacaactgaggtacctggttcatttcactgggactggttggacagtgggtgcagcccacggagggcaagccaaagcagggcggggcattgcctcacctgagaaatgcaaggggtcaagggatttccctttcctagccaagggaagctgtgacagactacctggaagaacgggacactcacgcccaaatactgcacttttcccacagtcttagcaactggcagaccaggagattttctcccatgcctggttcggcaggtccaatgcccacagagccttgctcactgctactgcagaagtctgagatttaccagcaaggctgcagcctgtctaggggaggggcatccaccattgctgaggcttgagtaggtaaacaaagtggccgggaagcttgaactggggcagagcccactgcagctcaacaaggcctactgcctctatagacaccacctctgtgggcagggcatacctgaacaaaaggcagcagaaacttctgcagacttaaacgtccctgtctgacagctctgaagagagcagtggttctcccagcatggtgtctgagctctgagaacagacagactggctcctcaattgggtccctgacccctgtgtagcctaactgggagacacctcccagtaggggccgacagacacctcatacaggtgggtgcccctctgggatgaagcttccagaggaaggatcaggcagcaatatttgctgttctgcaatatttgctgttctgcagccaccactggtgatacccatgcaaacagggtatggagtggacctccagcaaactccaacagatctgcagctgagggactgactattagaaggaaaactacaacagaaaggaatagcatcaacatcaatgaaaaggacatctacaccaaaaccccatctgtaggtcaccagcatcaaagatcaaaggtagataaaaccacaaagatggggagaaaccagagcagaaaagctgaaaattctaaaaaccagagtgcctcttctcctccaaaggatcacagctccttgccagcaaaggaacaaagctagagggagaatgactttgatgagttgacagaagtaggcttcagaaggttggtaataccaaacttctcctagctaaagaagcatgttctaacccattacaaggaagctaaaaaccttgaaaaaaggttagatgaatggctaactagaataaacagtgtagagaagaccttaaatgacctgatggagctgaaaaccatggcaagagaacttcatgatgcatgcacaagcttcaatagctgatttgatcaagtggaagaaagagtatcagtgattgaatatcaaattaatgaaataaagtgagaagacaagtttagaaaaaaaaagggtaaaaagaaacaaacaaagcctccaagaaatatgggactatgtgaaaagacaaaatctacgtttgattggtgtacctgaaagcaatggggagaatggaaccaagttgaaaaacagtcttcaggatatcatccaggggaacttccccaacctagcaaggcaggccaacattcaaattcaggaaacacagagaacaccacgaaggtactc

SEQ ID NO: 2417 - DNA, 1211 bp, Homo sapiens
gaattcggcacgaggtgagctgacaccactccactgcactccagtctgggcgacagagtgagactccatctcaaaaaaataattaatatatgtgtgtatatgcatacatatatacttgtgtgtatatgcatacatatatacttgtgtgtatatgcatacatatatacttgtatgtgtatgtacatatgcatacatatatacttgtatgtgtatgtacatatgcatacatacatatatacacacacgtacacacatgcatatttcttctctcaacttggcaagggcaggatttgcagattataacctagatctcattcatgctgcattttttcactcaccctattgttctagttttcttggattccaacctgggcttatctccaatctgcatttttttttgtttctcctccctagctgaatatatttgtggaaaactcacaaagcaactgggttgccaggtctggtctctatcttcctgtccagtgaaaagaaaatgacatttagaaaacctagtcacaaatgtctgtttaataaattttgtttgttgccctgaaactggattttaatatttctgaatattcagtgcctggaagctagcacaaaatggctatctaaaactgccagaaatttgctttatgtggttcttaatgtgaaactggaaatgcaccttctggatggtgtcacttcttttgagagggatcgctttggtggggtattatggttgtgtctacttatattaagtaactactcactgcccctgaggtgtctcaggacttgggataaataatctaaaagcaaatactttataatggaatatcatgtattctgtttaataatataaaagtgtgtcccaacatattcagtgaggaacatctctgtagaattattttttttctttaacgaagtgtttagtattttctctggcagacctggacacagggtttgagcctagtaggttgagtctgagactgacggatcaaacagatgagagaaaggacttatactggaggataataggctttgaaggttcaaatctttaattagacagtctagtgtttgggatgtatttccaggggtaggggggcctaccattgagacattagttagcttactaatgtccttgggcacgctctatgcacgagtcagccaaattgttgtttgaaatttctgctgtagctctgtagaaaactgaggggcaatgcattttccat

SEQ ID NO: 2418 - DNA, 1703 bp, Homo sapiens
ggcacgaggaaagttaagcaactacaggaaatggctttgggagttccaatatcagtctatcttttattcaacgcaatgacagcactgaccgaagaggcagccgtgactgtaacacctccaatcacagcccagcaaggtaactggacagttaacaaaacagaagctgacaacatagaaggacccatagccttgaagttctcacacctttgcctggaagatcataacagttactgcatcaacggtgcttgtgcattccaccatgagctagagaaagccatctgcaggtgttttactggttatactggagaaaggtgtctaaaattgaaatcgccttacaatgtctgttctggagaaagacgaccactgtgaggcctttgtgaagaattttcatcaaggcatctgtagagatcagtgagcccaaaattaaagttttcagatgaaacaacaaaacttgtcaagctgactagactcgaaaataatgaaagttgggatcacaatgaaatgagaagataaaattcagcgttggcctttagactttgccatccttaaggagtgatggaagccaagtgaacaagcctcagtgacacaagtcaaattcatagtttcactctgggttttttgttgttgtgtggttattattctcactacagaaagactgagtttcatgctcctggctatgtcagatgtgaattttcatgggaataataatcaaccttgcagcaagccaaagcaatgcctcgcttgggttcttcatgttcttactacccagcgttttttaccacctagatgggcctctctaagtctatttgctcaatgaaccttatcccaaacttgttgttttcatggtgtctgaaagaatgtgagtcagcttttagaatgaaatcagtgttaaggtacctccagtgaaccaaacatgtgtttaaattaagccactgaaaacagaagggaatgtccaaggcaaatacaaatcatacacagcttgtaacaacatacagccttttatgtgaaataatggaataaactaaagagtttctgaagactgaagctatctggatatcaagtctggagtaggcaaagcatttccatttctacatggattataaaactttgtgttggactccattggtccctaatgcttttgttcatcacttctccagttatcaatggaattacctggtgaccattcatttggaccgaaatcctggaagtctcctactgaataaaagtctacaattggccctaaaatagaaactgaaaaacaggacatagaattttttcaccagaccacagcatgtggaaactttctttatcatttttgaacacttgttaacagatttgcacatagagggagagaaaaaaaatggagtaacagtcaaaataataataatcagtatccaggccaggcgtggtggttcacgcctgtaatcctagcactttgggaggccgaggcggatggagcacctgaggtcaggagtttgagaccagcctggccaacatggtgaaaccctgtctctactaaaaatacaaaaattagctgggcgtggtggtgcatgcctgtaatcccagctactccagaggctgacacaggacaatcacttgaacccaggaggcagaggttgtagtgagccgagatggcaaccctgcactccaacctgggtgacaagagcgaaactccatctcaaaaaaaaaaaaaaaaaaaaaaa

SEQ ID NO: 2419 - DNA, 3121 bp, Homo sapiens
cggcacgagctcgtgccgcttcaactttcttctgaggaatggatgattctagagttttcccagctgggcttcattggtaagaaaagtgtcacacttacctacttttcataaataactgtgactctcagaatctaaaaccaagtagctacttgtcctaaagatgtctttttttcctatggaaatgggttgttttagagaaaacttaagttaggtaaacctctttgtatgacatgatgaaagtcaacccagaatagaatttggagacttctaagattattgtatttactgtagcgttcttcacaatgccaaccgtggtgctggtgagcatgtttgattttttcttctctggcatttccagctcctttgttaacataagattgcagttcttttaaaaacaataccacaaagagttttctcatataaattcctagtattttcatgcaatgcatgaagtcctaattcagtgattaatttttattcgtttttctcttaactagttggggcactcatttctaaatggtttttggctgatgtttcaaaattagccagcttaagaatatgtttaaagttagccaggcgcagtggctcacgcctgtaatcccagcactttgggaggccgaggcgggtggatcacctgagctcagaagttcaagaccagtctggccaacatggtgaaaccctgtctctactaaaaatacaaaaattagcctggcatggtggcagacgcctgtaatcctagctccccgggaggctgaggcaagataattgcttgaacgggggaggtggaggttgtagtgagctgagatcgcgcccctgcattccagccttggggacgagagtgagactcaatctaaaaaaaaaaaagagtatgtttaaagttgaagaattgaaggaaatttacagggttcaaataatattgagaggttaacatttcatctcctatggtactttttaacactttaagcatttagaggctggacctttgacaatcttgatcatttaactcaaaacttaaaagtcaaaaaccatctttacttgcaaatgctttagtgaaaacaaaattaggagtccttattttttgcatttattgattcagataaaattttttacctaaacctctcaatgttaaatgggaagaatcttagtaagacacgaagggaaaatctctgacttgctttttgaatgctttgggccagtaggtatacgatagattattatagtaacatcgggaatttactatatctgtttacacccaggtgacagctcaagagaaagtttagccgaagcaactttgtttaattttgataatacaagtggggaaattgtttatgatgatttatagttgaaagcgcaagcctcagtgtatgtcgtgggcaagatttcatgaatgtaagccattttggtgcttggtttcttcattgcagctattgactgggaatatcttttcaggtaaaatgtttcaagcgccggatcttactctgattgtagaattcatattcatgttttacaaggagaaacccattgattggctcctggaccatattctctgggtgaaagtctgcaaccctgaaaaagatgcagtaagttaattcctcaccagagtggagggagtttcacttctgtatttcgtgaaagtgacttttagagattttgcaaataaatagttaaataggtaggtgatataaaacttctttcctgagctgataaaaagtttctatattagaagaacttttagatagcagtggaagatcctgtaaagcaggaagctgttacaagatgacgtacattctttaaattgctgataaatgtttctagtgtttgtaagccctggtggtttactaacattggatgtagatgttggtcatatctgttcttggcatgggataccatttcagtttgttttcttcatatttcctgttcactctctttttccttgtatactggggacgatattagaccctaacacatctgtaaatgaggaataaaatagaagtaatattttataccaaaacaatgagacgttaaagtacctttcagcgtgttacaaaaagccagtgttcataataatatgattacctttgggataatagttgcagtcaagtaagtgaataataatttttgctttgatcattcagatagcatgttattaccatagagatcttattgttaagagtaattaggccaggtacagtggttcacgcctgtaatcccagcaccttgggagcccaagactggaggatcacttgagcccagaagttcaggacaagcctgggcaacatatcaagacccatctttacaaaaaaacaatgatttttttttaaaaagagtaattaggtatgttttccttgtccaatttgaattgtgtctctgaaaaaaaactatagcttttaatttatttgatgtaagcataaacaatatgtaaaagtacaaattctttaaaatgtccattttgatgtgtaatgataagtattactgtaagaacatgtcattatagagttgacttaccattcattgtaacaaataagcattagtttgacttcatgaccttctactccctagaatagttggatcctcatacctgctaggttttaggatactaccttctggtgtctgtaggctatcattgcattctgtttaaaaaaaaccacaaaaattttaaaaaaccccaacacattcttagttagaggaaatcatggaatctagcaatggcagagtatctgttttccgacaattagttgaacatataaattgttttaaacaaatcattttttagagatctcagtccttatgcacattttcactgtgacttatagaaatttttattgtaggacacagaaaaagttaacgtcatctttaacctcctacaatacacttgcattccattcgtcctgtgcaattttatttaatatgtggttaggttctaaaatgagcctgtgaggtgaaaacatctatagtagaaattaaaaccacaaaaaccctctaaatcctccataaatttgggtacatgaacttttggacgatttcatccattccttcactcttctgtagtccatgtttttgtgtggcctctaattcttcagttgcttcccctagaatctcgagggggggcccggtacccaat

SEQ ID NO: 2420 - DNA, 1501 bp, Homo sapiens
gcagtcagggctctggccagccctcatggttcaattacataaaacagcaaatggcatttcctgttgtccaaattattacataccgtactaaaaacactaatttttacattatatcttttccactctttagaccccaaccaataattatctcaatcacattttaactaaagaggggaaaaggcacatggttactcatgcagttggtttatgtgttgtggttattaataatcaaagtcaccaaaggcaaagtggaaaaaataacagctatgcaatcaagaacagagaaagaagcaagctcaatatagtttccaataaaccttaaaattgggctttgcaaatattaacaaaatatgagaactaaatgatgtgattgtttgtctcttttttatctaaagtggaccagagaaagttttgtgcagcgcagcaagacttcttcatcctgattgaatacagggtcacacaacccagaactcatttctgtgtatgatttctctttaagtgtcttgccctgtaaccctccctctcccagatattttagttgcaaattgagctcttttctaaaattgacaaaaataaaatattaataaactttcaactactggaactataaagaaaaagcatgacgtgtgatattggtggaaggtagagctcattcctcaggcatccatcatggtgccaggcttttcaacagcctgaatgcagaattcttagatcatttcaaacttacaatcttggcaatgacatgacagctggtgcacgtggcatattaattcagcaaacatcaatgccaactgtgtgccccatggatcaactcaccaccttttcttcaacaaagcagcagctgtctggtttttaaatgcttagttacaggggaaaggggtaatattagacatacttatggaagcataaaatcatgtatataagcacgaattgatgtgaccatcgtgatggaataaatttgcataatcaaatcattccgaacaattatttaactctttactagttaacttttagtccttacagtttgaaaatgtaattataaacaaaatctcctcctaacccrgaaatgttcacaaaagtggaagaaacagaaagctatttttattgcataagcattaaattagaattcaatgcacatcacatgcattttgctaagagattacaaagcagaaagaaatcttaccaagcagaaacaaatcattacatacatgctctcaagacaaactataactagtcctcatgtaagaggacatgatggcacagtttgtcacacrgaattcattctaaattcatttggtaattgggtgaccatcttgttagctaattgactttatccaaaggaaaaataaatttctaatatctttatcacaggaggcagttttgcaacttggagcaaggcatctaccaaagataagcttctcccctcccactgaaactggtagatagggatgctgtcttccttaatgattgcatttcaaagaaatagttcccaggtcctcga

SEQ ID NO: 2421 - DNA, 2203 bp, Homo sapiens
gtttctgcctctccccactagaaggtaagctcaatgaatgcagtgaccttgcctattttgttcacttttgtaagtccagtacctatagtggtgcatggggcagagtggccattcaataaatatttgctaaataaatgaacagtttgagtataaatcctataaagcatatccagctacttgaggaggagatataaagcagtgactgtagagccctccatttaactacaaacaaaagcaaagctactgttcatcaaggatcaattttgaaattcccagccagctttttttttttgtcatatgcaagtgacgataattaatggcttaaagtagggtgctatagcaggaagggaatgaataaaatgtactaaggctcctatacacgatcagattatagctattatggatattaatatatgtatactatacgtactcttagacgagatcgggcgcattcagggtggtatggccgtagacattatatatacttttaaaatgaaaacaaaaagctaataaaataattatggtcccagaatctctttaaaggccaggcctggtggttcatgcctgtaatctcaacactttgggaggccaaggtggaaggatcccctgagcctgggagtttgagaccaggctaggcaacagagtgagcccttgtctttacaaaaaaatttaaaaataagctggttatggtggcatgtgcctgtggtcctagccacttgggaggctgcggtgggagatttccttgagcccaggaggttaaggtgcagtgaactgtgattgcaccactgcacttcagccttagcaatagagatctgtctcaaaggaaaaaaaacataaccctttaaggataagattccatggatataggcagattaattgggacagaaccaataaaattctagattcttactagagtatcataaacctacaagtattccctcaacaacatggcacacatgtaataaatcactattgataatggaaaccgcaaatattttaatttttctgctacactattagtgagttattgctgctttgtccttcacacattaattatctgctggtgtaacactctgaatccagctactatgtaaccttcactcaatgatgtaaaatctcatgattgtttttgtgttttcaggatgtttccctacccagaacacaatttttgtagaagaaagaaaatgatctgcttatttactttaatatggagatagtttggtttacaaagcaagtgataacatacttccccatgatcttttacattttcacaatagttatagtcctttgatttctatttgtatttcacattggtcttgtccccattgttatactataaatgccttaaaaacagagactaacccacttattctttaatttcccaggtcaagtgaaatgtggctggtacaaagtaagcatttaacaaatattttcaaatctgaattaaatatatcattcattcaaaaaacattaaaaagttatggctaggtgtggtggctcagggctgtaatcccagcactttgggaggctgaggcaggaggatcgcttgagcccaggagtttgagaccagactcgccaacatggcaaaaccctgtctctacaaaaaatacaaaaattagccgagcatggtggtgtgcacctgtagtctcagctgctcaggaagctgaggtgggaggatcctcctccgggaggtggaggctacagtgagccaagactataccactgcactccagcctgggtgacaagagtgagaacctgtgtctaagaaaaaaaaagttattattatgctattcatcaaggttatcatcatgaaggttatgagcctggtatttagaaagattatactccagtagggaaaactgatatccatatactaccatgtgttaagggatataatagaaggatgcccatagtatcagtcatgtagccttgatgaattcagcctggaccagagatgacatcaagacccctgtgctgagttttgaggagtcaagagttaatcaggcagagtaaaagaggcagtggatggtgagaaagttctaggataaggaaatatatgtcagaggaggtaatattttaagaactaggagattaactggatgtgggtgaaggaattgggaaaagagtagacaactcctagatttataatttgagcaattaactggtagtagacgatggctattaactaaaaaaaaaaaaaaaa

SEQ ID NO: 2422 - DNA, 2971 bp, Homo sapiens
ggaattcggcacgagctggttatagtttttaataaagaaagatcctcagaatgaaaaatagagttataataaacttatctaaaataatctacctttgggttcctttttgccttggggcctcttgtcttaggtcaagaacctgagagtccccaggctctgtccggggtcctcagagggaccatacctgttcacactgttggactctgcacacagttgtgttaagcagtgaattctgtggctttaagaagtctttgaaaatcactaacctggtgacggcctgtgccactgtcatcatcgaaatcagagtgtgtctcctgtgagctttattgtacatacagcgtacagggccaggcttgagaaagacagatctgctatactcatctcccctgcagaggacaccatggaatccgcattctccaaggccacatgttctgcccagtgcctcctgtcaccatgactgtaaccatctttcctctttttacctgtttgtttgaatgtagatttcatttgtgttgtatatgttcttatgcaggaaatattacctcctggttctcacacaggcttttctggattacatttgccattcattggttttacattcacaacggaaaggtatgtctggatttatcattccccagggagacacttcccctgtggtagatgaacagtcagacaccacagtctgtccctgggggcgggctagtgggtggtgtgtgcgctgggaggccattacttaagggagatggagatgggtttttggtcttaaaatatgcacacctgatgactacaggggataccatagcaaggttgcaggctttttctctacagatatccaggtcgtaaagaattcaggtttcatggcctttgttgtatgttcttctttttacaaccctttaaaaatgttaaaaccattcatgctcgtgatggtgcagaaacaggcctcgggcaggatttctcccagaggccaggggggtgagatttctcccagaggccgtagtttgccaacccctgaccaataggccgccagcattggcagggttagctctgatccagtcggtggccacagcaagcagagcagttgccatgcgcactcagctgagagctggcttccatcagagcactctgctggcttttgtaaggattgtgtgttgtgggcccctgtcccaaatgggcctctttgcaaagttgtgtcgcctgagatggtccacctcgattttaaaaggaaactggggccaagaggagaggggttaggaagaaagagaggtgaaatgagacaatggaagctcccactgtgccacagaatctgattcctggcgtcctctggcagctggaaccacagttgaaaatgtcttgggagggagatatccccatgcttctttttttttttttttttttttggagacggagtctcgctctgtcgcccaggctggagtgcagaggcacgatctcagcttactgcaacttctgcctcccgggttcaagcgattcccctgccgcagcctcctgagtagctgggactacaggcgcccgccaccacgcccgactaattttttttattttagtagagagagggtttcaccatattggccagatggtctcgatctcctgacctcgtgatctccccgcctcggcctcccaaagtgtcaggattacaggcgtgagccaccgcgcccggctgatatccccatacttctgctcgagcttggaagaaatctcttttggtgtgagaggccagggttaaacagcccataagccaaagtggcagctgctgtcttccagcccacaggaggctttctgggtgggcatattgatttaccagcccccagtgcagaggttcttgatctttctaatacatgccagctcaccaaatgcttgtcacacttgcaggtcccaagcccatggctgtagtttggccagataggcctagagctctcctcttgcagatcccgcagggctggagcagcccagcaccctcagaccacctgtgaagaaacactgaccaggtcttctctaaagggggctgggtgccctttatggaactctgcgtaggagctcaaaatttccctgacttcattgtcacataaagagctaagcagaactaagtaactcctaaagcagcccaagaattaagctattaaatgagagccatcctgggcttcagcctgtgcctcggctgtgtgcgtcatcgagtggtctggtccttggtaaggggcttagtgtgctggtcagtgctagaattggtggcttagcctgcaggggaagaagagttgaaagagctgtcctggattgcttggccagttggtggccaaaccaggaagctttcagtggtccatgcgtaccgctgacctgcagacgagctggggctgccccctaagccttgctttacgcaggatccatgccttctggttttgcatttatagttaagtgtgggggatgatttagaaatgccatttcccctcctttgcagaggcgctttctttgaccagcgatggggagggcccttgtcagtgtctccttgaccatctggtcacttgtctaactttggttccataaccataaagtcttatcccaggtgtttttgtttgctgatttaaaaagactatctttcacctcaggaagattgaaaatgctaatgaaatcgctaaattttcagtagatcaaaaaaacctgttgcttggtttcccagctgtttttctgatcgaggctctctgaagagcataatgcagtccaacacattaaccaaagatgaggatgtgcagcgggacctggagcacagcctgcagatggaagcttacgagaggaggattcggaggctggaacaggagaagctggagctgagcaggaagctgcaagagtccacccagaccgtgcagtccctccacggctcatctcgggccctcagcaattcaaaccgagataaagaaatcaaaaaaaaaaaaaaaaaactcgagggggggcccggtacccaatt

SEQ ID NO: 2423 - DNA, 5065 bp, Homo sapiens
  misc_feature (2531)..(2531): n equals a,t,g, or c
  misc_feature (5063)..(5063): n equals a,t,g, or c
tttttttttttttctttttctatgggttattttttattwtttttawttttatttwttattatactttaagttttagggtacatgtgcacaatgtgcaggttagttacatatgtatacatgtgccatgctggtgygctgcacccaytaactcgtcatytagcattaggtatatctccyaatgctatccctcccccctccccccaccccacaacagtccccagwgtgtgatgttccccttcctgtgtccatgtgwtctcattgttcaattcccacctatgagtgagaayatgcggtgtttggttttttgtycttgcgatagtttrctgagaatgatgrtttccaryttcatccatgtccctacaaaggacatgaactcatcattttttatggctgcatagtattccatggtgtatatgtgccacattttcttaatccagtctatcattgttggacatttgggttggttccaagtctttgctattgtgaatartgccgcaataaacatacgtgtgcatgtgtctttatagcagcatgatttatartcctttgggtatatacccagtaatgggatggctgggtcaaatggtatttctagttctagatccctgaggaatcgccacactgacttccacaatggttgaactagtttacagtcccaccaacagtgtaaaagtgttcctatttctccacatcctctccagcacctgttgtttcctgactttttaatgatygccattctaactggtgtgagatggtatctcattgtggttttgatttgcatttctctgatggccagtgatgatgagcattttttcatgtgtyttttggctgcataaatgtcttcttttgagaagtgtctgttcatatccttygcccactttttgatggggttgtttgtttttttcttgtaaatttgtttgagttcwttgtagattctggatattagccctttgtcagatgagtagrttgcaaaaattttctcccattytgtaggttgcctgttcactctgatggtagtttcttttgctgtgcagaagctctttagtttaattagatcccatttgtcaattttggcttttgttgccattgcttttggtgttttagwcatgaagtccttgcccatgcctatgtcctgaatggtattgcctaggttttcttctagggtttttatggttttaggtctaacatttaagtctttaatccatcttgaattaatttttgtataaggtgtaaggaagggatccagtttcagctttctacatatggctagccagttttcccagcaccatttattaaatagggaatcctttccccattkcttgtttttstcaggtttgtcaaagatcagatrgttgtagatrtgyggyrttatttctgagggctctgttctgttccattgrtctatatctctgttttggtaccagtaccatgctgttttggttactgtagccttgtagtatagtttgaagtcaggtagyrtgatgcctccagctttgttcttttggcttaggattgacttggcratgcgggctcttttttggttccatatgaactttaaagtagttttttccaattctgtgaagaaagtcattggtagcttgatggggatggcattgaatctataaattaccttgggcagtatggccattttcacgatattgattcttcctacccatgagcatggaatgttcttccatttgtttgtatcctcttttatttcmttgagcagtggtttgtagttctccttgaagaggtccttcacatcccttgtaagttggattcctaggtattttattctctttgaagcaattgtgaatgggagttcactcatgatttggctctctgtttgtctgttrttggtgtataagaatgcttgtgatttttgcacattgattttgtatcctgagactttgctgaagttgcttatcagcttaaggagattttgggctgagacratggggttttctagatatacaatcatgtcrtctgcaaacagggacaatttgacttcctcttttcctaattgaataccctttatttccttctcctgcctrattgccctggccagaacttccaacactatgttgaataggagtggtgagagagggcatccctgtcttgtgccagttttcaaagggaatgcttccagtttttgcccattcagtatgatattggctgtgggtttgtcatagatagctcttattattttgagatacgtcccatcaatacctaatttattgagagtttttagcatgaagggttgttgaattttgtcaaaggccttttctgcatctattgagataatcatgtggtttttgtctttggttctgtttatatgctggattacatttattgatttgcgtatrttgaaccagccttgcatcccagggatgaagcccacttgatcatggtggataagctttttgatgtgctgctggattcggtttgccagtattttattgaggatttttgcatcaatgttcatcaaggatattggtctaaaattctcttttttkgttgtgtctctgccnggctttggtatcaggatgatgctggcctcataaaatgagttagggaggattccctctttttctattgattggaatagtttcagaaggaatggtaccagytcctccttgtacctctggtagaattcggctgtgaatccatctggtcctggactytttttggttggtaagctattrattattgccwcaatttcagakcctgttattggtctattcagagattcaacttcttcctggtttagtcttgggagrgtgtatgtgtcgaggaatttatccatttcttctagattttctagtttatttgcrtagaggtgtttgtagtattctctgatggtagtttgtatttctgtgggatcggtggtgatatcccctttatcattttttattgcgtctatttgattcttctctcttttyttctttattagtcttgctagcggtctatcaattttgttgatcytttcaaaaaaccagctcctggattcattrattttttgaagggttttttgtgtctctatttccttcagttctgctctgattttagttatttcttgccttctgctagcttttgaatgtgtttgctcttgcttttctagttcttttaattgtgatgttagggtgtcaattttggatctttcctgctttctcttgtgggcatttagtgctataaatttccctctacacactgctttgaatgygtcccagagattctggtatgttgtgtctttgttctcgttggtttcaaagaacatctttatttctgccttcatttcgttatgtacccagtagtcattcaggagcaggttgttcagtttccatgtagttgagcggttttgagtgagwttcttaatcctgagttctagtttgattgcactgtggtctgagagayagtttgttataatttctgttcttttacatttgctgaggagagctttacttccaastatgtggtcaattttggaataggtgtggtgtggtgctgaaaaaaatgtatattctgttgatttggggtggagagttctgtagatgtctattaggtccgcttggtgcagagctgagttcaattcctgggtatccttgttractttctgtctcgttgatctgtctaatgttgacagtggggtgttaaagtctcccattattawtgtgtgggagtctaagtctctttgtaggtcactcaggacttgctttatgaatctgggtgctcctgtattgggtgcatatatatttaggatagttagctcttcttgttgaattgatccctttaccattatgtaatggccttctttgtctcttttgatctttgttggtttaaagtctgttttatcagagactaggattgcaacccctgcctttttttgttttccatttgcttggtagatcttcctccatccytttattttgagcctatgtgtgtctctgcacgtgagatgggtttcctgaatacagcacactgatgggtcttgactctttatccaatttgccagtctgtgtcttttaattggagcatttagyccatttacatttaaagttaatattgttatgtgtgaatttgatcctgtcattatgatgttagctggttattttgctcgttagttgatgcagtttcttcctagyctcgatggtctttacawtttggcatgwttttgcagyggctggtaccggttgttcctttccatgtttagygcttccttcaggagctcttttagggcaggcctggtggtgacaaaatctctcagcatttgcttgtctgtaaagkattttatttctccttcacttatgaagcttagtttggctggatatgaaattctgggttgaaaattcttttctttaagaatgttgaatattggcccccactctcttctggcttgtagrgtttctgccgagagatccgctgttagtctgatgggcttccctttgwgggtaacccgacctttctctctggctgcccttaacattttttccttcatttcaactttggtgaatctgacaattatgtgtcttggagttgctcttctcgaggagtatctttgtggcgttctctgtatttcctgaatctgaaygttggcctgccttgctagattggggaagttctcctggataatatcctgcagagtgttttccaacttggttccattctccccrtcactttcaggtacaccaatcagacgtagatttggtcttttcacatagtcccatatttcttggaggctttgytcatttctttttattcttttttctctaaacttcccttctcgcttcatttcattcatttcatcttccatygctgataccctttcttccagttgatcgcatcggctcctgaggcttctgcattcttcacgtagttctcgagggggggcccggtacccaattcgccctatagtgagtcgtattacaattcactggccgtcgttttacaacgtcgtgactgggaaaaccctggcgttacccaacttaatcgccttgcagcacatccccctttcgccagctggcgtaatagcgaagaggcccgcaccgatcgcccttcccaaaaancc

SEQ ID NO: 2424 - DNA, 1592 bp, Homo sapiens
taaaaataaaaataaaacactttaattagaatctatttttacctattttctaaatttatttaaatgcttagcaggaagcataaggaaaagccatcggcctccaatacccatgatgacagagggagcacttgagccttgccttccctcctcttaaatcagggtgtgttccgagattacagaacatcacaccttggcgtgatgaaatcatgccaagattctgactctccctttccggtgatactgctcatgatttctcctaatacgcttcaagcaactgttaccacaaaaaatacagtttccgcagggctttaaaggattgagtttagcatgtatatcatgcgttattaaagttcacgtgattcatgtgaaattaactgtcctttttgctagtgccaaaacagtgccttctctgcacactttacttgtttataaagttctcccacatgtccttaaatatcaagggggaaagtatggatattcgcgtagcaataatgccagcaaaggtcattttcattttttagtcatatagatatgaaaataagttcatatagatatgaaattgcttgactttattgttttggggagattttttttccttacatgattatattaaacactttaaaatagccttccggtttctggattttgagaagcctgatctgttattgttgtggttgttggtgtttgtaatattcattattgtttgtatatacacggtttagtcttactgatttcaaatgcattttgttattgctcaacccaactggtaacactgtttgctgggagcattatacttaactttgattcaccatggttgatgccactgccatgatcgctgggtcttaaagagctttccctagccactgacagccccgtggagatcataatcagggccccaggctggttccaggatcaggcagcctatagagtgtgagcatctatgtgtagctacccttgttgggtgggctcttagactgatggggtaggatatgaagtgaaagacttcaaatgcaagtaaggtagtttgggctccttaattccaaacatcccatgagtatatcaagatgaataaggaccaagggacctctgtgactcatagaagggctggctgaatcctgaagtagcatagtgggacctggtctacaatttatgcacatgcactgacagccttgctgtgccacgtgtctcaccaagacccagttgggaaagagcgtcatattgccaacaggttgggtttctctggcctacacctgattaatgggccctttatctttggtgtcccctaggagtgtccagttgttttattgctgtattttgttattgcagtacttaataaaaattgttgatagggcccaaaaccctacagaaattctatgtctgtaaaaaccaacaaaggcattggacttgtgtgaatgtacagggtttttttagtagtaattttaaatttaaatgttttaagtgatcatcagtgttcctttttacttataaagttggattcttttttagaatttgtaataaataaaaactgctgctttaccactgtaaaatatgctttctgatgtggtgtatttttaaaataaattttaatatgt

SEQ ID NO: 2425 - DNA, 270 bp, Homo sapiens
ggcacgagcatacgctggacgagtcggaccgaggctaggacgtggccggcgctctccagccctgcagcagaagaacttcccgtgcgcgcggatcctcgctcgttgcacgggcgccttaagttattggactatctaatatctatgtatttatttcgctggttctttgtagtcacatattttatagtcttaatatcttgtttttgcatcactgtgcccattgcaaataaatcacttggccagtttgcttttctaaaaaaaaaaaaaaaaaaa

SEQ ID NO: 2426 - DNA, 1045 bp, Homo sapiens
ggcacgagccttggttgcattagacctctagcaatcgaaggccagttccagcctggaccaaggcctgcctctggttctgcacaatggcaagtcctattaggaggactaggagctttgtccttgaagtaaagacctgcatggtaactggtttcagttaggttggctcactgggatttgaagctgggatgaatggattccacactgacctttatcccatgggcctgttggactggctcttggggaactcataactgtaccatgtgtttgagcttcagtgagctcaaatgcagagtcaagtgggaagagatgcaagattgctaagtaggtggtcagctatctgccaggggtcttctcctaatggtagaccagctagcctgtcaatctgaagtctgcttttgtaaagctttgtgctgggggctatgatggatagtaataaaatgacattgtcctctcagagcttaggatctgccaaattaggaagcgtgttcaaagaaacccctagagagcctgagatgagttaagggtgaggttctaaccaaaccaggtgtagctttagcggtacaacctctgtaaatcactcaacttgtctgtaagtcagtttgctcatgtgtgaaatgatctcaaaaattccctctgcctctggctttataatctaggtggaaagatgaagcataaacacagtccatttgtagtttcccgggcctctgataacatctccaatctgagttacttaagctttagagccacctgttagcagcattcaaagcaagattgttgaggttggtgacaggtgcactgcacagttgtgccctgtgggtgctctgtggccatgaggtgagccagaaagacaaactgcacatgagtaggccaaccgctctgcagaacgtgcagaaaggttcattgttcatggtcagaaaataacattttgtattgtggtaaaaagagaaataacattctgtctcctattgtcacaatttataatgtaagattttaaagatgtaataaaaagttatgcacatcaataatgaaaaaaaaaaaaaaaaaa

SEQ ID NO: 2427 - DNA, 838 bp, Homo sapiens
ggcacgacttagccttagtgaagaattgaaaatgcattatccagatttccctgatgtgagttctggggtttatgtatgtaaagtggttgaaggaacagctgctcaaagctctggattgagagatcacgatgtaattgtcaacataaatgggaaacctattactactacaactgatgttgttaaagctcttgacagtgattccctttccatggctgttcttcggggaaaagataatttgctcctgacagtcatacctgaaacaatcaattaaatatcttgttttaaagtgggattatctaaaaaaaaaaaaaccagttatatcacgtggtttgtattggagatgtgccaaacatggcaagaagtttttggatctttttcttacaaagaaaaatggatggttatcaacccaaatgcccatcaatgacagactggataaagcaaatgtggtacatatacaccatggaatactatgcagccataaaagcaacagtcctctgcagggacatggatggagctggaaaccattatcctcagcaaactaacgcaggaacagaaaaccaaatactgcatgttctcacttataagtgggagctgaacaatgagaacacatgaacatagggaggggaacaacacacactggggcctggcagtgggtagggtagagggagggagagcattagcaaaatagctaatgcatgctgggcttaacacccaggtgatgggttgattgataggtgcagcaaaccatcatggcacacatttacctatgaaacaaacctgcacatcctgcatatgtacctcagaacttaaaaataaaaataaaaaaaaaaaaaaaaaa

SEQ ID NO: 2428 - DNA, 1367 bp, Homo sapiens
gcattgacctacatggttcagagaacaccccacgggctgtttgtccacgacccaggctggacgaatgcctggtcagagggtgacctgaaccagagctggagtgaggatcaaacaggcccaggagcctgaggaaatacccagtcagtcctcccagccgcgatggagaggggcctttgcaggcgttcggaatctcggctgaattcaggacctgggaatacagggttcagagaggagaggaggaagatggtgacatgatttggttagaagcacaagcaaactgatcagcctcccagacctgccagcagatgctgtgtgagggtgatggagcacggggtcacacccctgccccaagggccactggtctccctgggcttgcagtgcagaggcctcagggtgtctgggattgctggggaggcctgtgctgccccctggtggcgcttcctggcgctgcgccctgtccacagtcaccttaggtccctttggaaacattccatttgacttttccctgttgtttgaaatcccatgtttccctaaacctctagcctgattgttctttccctaattcattgcacaagctcctttgcttttagtgttaccgctcattgcctctctaatcctgcctgattgtgtttacagaagcttctgatttgcattgaacatgctctaactggcctgtgctacttattaccgggcttgtaatagcggttcttgtctccatagcctgttgagtgttcccagatgtgactcacctttctgctgccctcttcatgcaggcctactgactcataattcacttgtcccaaaagccaccccacaagcctgagccaacctgctgcctgacgccacagtcattggcagaggtctgggcattattaatttataaaaatccatgctttacacctggacagtagacagggacttcagagattgcacgtttgaatacattctcccaagactgaggttgttyggttttaattcctgtagtccaatcacacaatttcttatggaaaaccttttgtgtttctggtatttaataacttgaagggatagcaaaatatactgtgtattcagagggcctctctgcagctgctagctcagacaccaaaggggtaaggcccaggacattcatatctttaaaagctgcaaacctggtaacctttaaacttttaaaacaaatgtcatatggggtaacactgaccttttataatttgatgtctcaaatgtagagattatctaaaaatcgtaacttgaataccttgtaatttttctcttaaaaaagaagacttgtgtaagtctctgcatcaacgccaataaacatgttgcttaataataaaaaaaaaaaaaaaaaaaaaaaaaaaaaaaaaaaa

SEQ ID NO: 2429 - DNA, 915 bp, Homo sapiens
ggcacgaggctgttcaacggtcagaggcccagcgacgggtccagcccagacaggccagagaagagagccacgtcctaccagatgcccttggtccagtgtgcctcctcttcgccgagggcagaggacctcgcagaagacagtggaagcagcctgtatggccgggcccctgggaggcacacctggtccctgctgctggctgcacttgcctgtcttgtccctctgctgcattggaacatccgcagatagaagttttagaaagttctatttttccaaaccaggattccttactattgacagattttctttaccaaaagaaaagacatttattcttttgatgcacttgaatgccagagaactgtccttctttttctcctctccctccctcccagcccctgagtcatgaacagcaaggagtgtttgaagtttctgctttgaactccgtccagcctgatccctggcctgagcaacttcacaacagtaattgcactttaagacagcctagagttctggacgagcgtgtttggtagcagggatgaaagctaccaaatttttttctcttaattattattatatttctgagttaaacttagaagaaacaactatcaagctacaacttttcctgccattttcctgtggttgcagcctgtcttcctttgaaattgttttactctctgagttttatatgctggaatccaatgcagagttggtttgggactgtgatcaagacaccttttattaataaagaagagacacaggtgtagatatgtatatacaaaaagatgtacggtctggccaaaccaccttcccagcctttatgcaaaaaaaggggagaatcaaagctttcatttcagaaatgttgcatggaaaagtatctgtaattaaagtttcgaagtaatttaaaaaaaaaaaaaaaaa

SEQ ID NO: 2430 - DNA, 2509 bp, Homo sapiens
gttccgctgcagcctactccgccccgtttgcggtaccaccagcgtggtatccttcgtgcgctaatgggagctgctgtggcaggtgcccccagagtgaacgggagcccctgctgtgggaactttgtgaatcctggagcatctcagacttgaacacacagcatatttggaagagaaaacatgcctttctttgttgaatcacattagtatgatgagtgagtcatccctgcccatctgctgagcttctcacatctctcagtcacacgtggacccagtggtcaatcctgcagagaattcggcggaggttaggtttgggagtggagctagcgtgctaaagccagagccttcacgtgaaggtggcaggcactggggcggaagccaacactcaacagatgcaagcagtgtgggtgtgcagcagaacagtgatcttgggggaggaagaggatgttactrgagtcagatgatttgctgtattctcctgaaaggtcgtaggctgacaggcgctcacattccttggctgcctcggttctgagggcagctaaggagctgtttattcctcaagtcatgctccccgatctccttcctctaccactctgtcaccaggagtttaattacaggcttgaggagaagaaaggaagaaaagatatcttgatgctttgaaaactgtgttggcagtgtggcatgactgtttaaagtagataaaaccttgtcattttaccccatccctgcatgactgtgaagctggcgaggaaggaggaagaagggcaagttcagatgcaggctgggtggctgggacaggttggctaagggactactctggagggctcttctgcctggcattgcccacttcggcccagccacgtgtttgcagcgaccagagtccctgcaaaggtgtggctggctgtggtcagggtgctactagcaccatcagcgcactcccgccattggctcagctcctctctgccagtccaactaagagtgctttgtcctgggtgggacataggggctgagagagatggggggagacataacacccaggaatgaaaatacagatttagagaaggaaccagtaagtaggagacagatgtgaaggaaatggaaatgaggcaagaggacrttggaagagagaagtttgctgtccaggagccaggtctggagcatcagtgtgagggagttcaggtaggctgggcctgtgcctctaggtagggacaagggaggctgggtagccagggctggtgcttaaaacccctgaggccatgagctcattggctgcctttgtagcatcctgtcttcttctgtgctgcctggtttgayctcatctcacctggattcaaagggtaaggtgggcatgggtcttgggcctgacacccaccaaggatgacctgtggactgccatcggatgctgaacagggagatgaaaggaggtcctcttaccatacccctctgccaaccccccagtaggccactgttctgactttgtttccagaatatccagaaatccaaaggggctgttgctgaacagtctgcaggaccagtgacagcacctacctgttgtcccaaggcatacaaaggaggcctcaacgctcatgcttctctaatcaagccctaccaagacagacagaaagacagacagaaaaaaggaaggggtagaggagaaggttgaagctgtggagctagactctgcttcacttcctgaagcttcaacttcatgtcgaagattcactgggacccaattcctgcattgttaatatttgtgaggaaaagtgaaacaagtgatctggttttagcccagatgatgaaagtggatatggcacattttcacacacgtgagataattacagcttgccccacaacactgggtgttggagaaagggagagatagtcataagtggaagaaaaagccaagcatagtgagtgggaaagagagtgagagcctgtgcaggctgctgacgagccccaggcagcccacaagtttctcgtggggagatggaggcagagcccagggtaggggacagagctgctggggcctttccttgcctgggaatctgtcccaggaagagcttccccactcccatcccccaaattggaaaaaccgtacattcaagcctgtttggccctgaaattcttaagaatctggttaagaattaactcactaatgtcaaaagtcaaaacctcctaggggttgtcctgggagtcaggttcacgggtacagaagatgaatctcagatgtcactcaacctgagccgtcattctctgtggcagggctgccctgggtttctcttactcaatccctggagtgtaagcatttggattgtgtcacagattacctttttaccttttctttctttttttttctttttttcaatatcagtgcccacaccttactgagtattgagttttagagctttcgcttgatgtgcttgaccaagagacttcttttgtatccttttcttgtcctatgatgtaaataaaagcctcgatttatgtaaaaaaaaaaaaaaaaaaactcgag

SEQ ID NO: 2431 - DNA, 921 bp, Homo sapiens
ggcacgagctgtaccagggctggcctccagagcgggtgaggacagagcagctgtgggcttttcattctgaggtcttggcccccctggccaccgcaagggactctttgcttgtcagggcttgcaaaaaccaaccttcgagaaagaaaagggaactcttcacgttgaatgttgactttgtgtgtatgcgtgtgtgtgtgtgtgtgcacgcgcgcgtgtgcgtgtttacttcatggaattttgttttgtgaaattcccctccaatcgtgtcagaatttacctccatgccccagtcacactgttggttctgcgctctgaacctgggtgtagctcatttgaaggactctcttctgcgtttcctaacagttatttggtggtctcaagagttgaggttgtggagggttgggagaaactgaagttctatacatttccatagagtttacatcctgcagttaaaaggcagggagggctcagcccgggccccacagctccaggccatcccctacgggctgcccacagtgcccccttttctctagccgaatctttttcgaacagcccgggaaaggaaaacggattcacttgctgattttgttcacggcggaagcaccatgttccgttcctttttcaggttcagtttgttgtgtaaatggcggttttttctggtgtgagctttggtgatggtggcagaagagatggttccacctcgtggtctgaagaacaaaccagagaagagtctggtttgccagaggccccctccggcccacgtcaccctgagtacacccctctgattgctctgctgtcaagaagcacgtttccaccagctgtattcaacactacaatgcattttttaaactatatttgcatccaagacaataaagacaccttattttttttgaaaagccaagaaaaaaaaaaaaaaaaaaa

SEQ ID NO: 2432 - DNA, 1723 bp, Homo sapiens
gcttaagcttccaaggctaaagttggaggtaatgcttgaagataatgtttgcttgcccagcaatggcaaattatatacaaaggtaatcaactgggtgcagcgtagcatctgggagaatggagacagtctggwwgwgctgatggaagaggttcaaaccttgtactactcagctgatcacaagctgcttgatgggaacctactagatggacaggctgaggtgtttggcagtgatgatgaccacattcagtttgtgcagaaaaagccaccacgtgagaatggccataagcagataagtagcagttcaactggatgtctctcttctccaaatgctacagtacaaagccctaagcatgagtggaaaatcgttgcttcagaaaagacttcaaataacacttacttgtgcctggctgtgctggatggtatattctgtgtcatttttcttcatgggagaaacagcccacagagctcaccaacaagtactccaaaactaagtaagagtttaagctttgagatgcaacaagatgagctaatcgaaaagcccatgtctcctatgcagtacgcacgatctggtctgggaacagcagagatgaatggcaaactcatagctgcaggtggctataacagagaggaatgtcttcgaacagtcgaatgctataatccacatacagatcactggtcctttcttgctcccatgagaacaccaagagcccgatttcaaatggctgtactcatgggccagctctatgtggtaggtggatcaaatggccactcagatgacctgagttgtggagagatgtatgattcaaacatagatgactggattcctgttccagaattgagaactaaccgttgtaatgcaggagtgtgtgctctgaatggaaagttatacatcgttggtggctctgatccatatggtcaaaaaggactgaaaaattgtgatgtatttgatcctgtaacaaagttgtggacaagctgtgcccctcttaacattcggagacaccagtctgcagtctgtgagcttggtggttatttgtacataatcggaggtgcagaatcttggaattgtctgaacacagtagaacgatacaatcctgaaaataatacctggactttaattgcacccatgaatgtggctaggcgaggagctggagtggctgttcttaatggaaaactgtttgtatgtggtggctttgatggttctcatgccatcagttgtgtggaaatgtatgatccaactagaaatgaatggaagatgatgggaaatatgacttcaccaaggagcaatgctgggattgcaactgtagggaacaccatttatgcagtgggaggattcgatggcaatgaatttctgaatacggtggaagtctataaccttgagtcaaatgaatggagcccctatacaaagattttccagttttaacaaatttaagaccctctcaaactaacaggcttagtgatgtaattatggttagyagaggtacacttgtgaataaagagggtgggtgggtatagatgttgctaacagcaacacaaagcttttgcatattgcatactattaaacatgctgtacatactttttgggtttatttggaaaggaatgcaaagatgaaggtctgttttgtgtacttttaagactttggttattttactttttggaaaagaataaaccaagaattgattgggcacatcaaaaaaaaaaaaaaaaaaaaaaaaaaaaaaaaaa

SEQ ID NO: 2433 - DNA, 2310 bp, Homo sapiens
ggcacgagattgagtggggtccatctcggacataggctccaaatggaaaagaagctgatgcttggcgactcctctctggccctggtctggctgggcctctgcctgcctccctggggcaagcctgggactccactccttcctgcgctgccccggcccctttctcttgggggttggtagcatctgctgtcctgggtagaggtccttaaggacactgcttgcgtgctggttttcaacccccaagctgtctttgtgggtcacacagtatcactcaaataataggttacttgagaagttcggtactcccttttaattgttgtcgatacgtatttacttaagatatgtaaaatattttcttattttcttttaggagcttactccacgggaacagcctctagataatctgagttgttgaaaatacgaagcctgttactcgtgaacagtggctgacaacagtgttgttgtgagcctggctgtctgcttggacccagaggtttcgtctgccagggtttttggttgtatttaggatttcagggaaaagtgtccaagctttcagtgttggagcaggtaaggtatcaacactgttagtagcaacaaaattttaacttaataagtctgtatttgctatttataaagtggcatttgtaaagaaactgatagtagaatgtagtattcgtattcatttgaaatacattcagccatttgtatcagcagtctctatagcagcagattctgcatctgtggattcaaccagctgcagattggaaatatttgggggacaaacaataaataataatctgacaataaaaaataataaaaatgttataaaacagtgtagtacagcaactgtttctatgatgttatctaaaatgatctaaatatttgagaggttttgcataggtcatgtgcaaataacctgttctctctttaatgaaaacccagttttataaactaaaactcttcctgtagaaagctaccagcatggatgcgcagcccttttcagctgggttggagcttcataggcccccagaggcagaggcgactgcaactttgtgcccttctgggcaaaggctagtgcgagcccctcagactacatctttactagaaactccaagtgttgcatgaaaacgagagcttgaccctcttttgagatgacagtcatatttcttgcaaatattttggcttgcacaacgaaaacttcttctaaatgtaaaatttccaatgagaacgaataaaccattttaactgatgtggtttaataattgctctaccatatatatttgttaagcagcattctctgctttgccttaatcttgaagtcagcatggctccggatcagagcggttccttgtgacttgctgggtcactggctggtgaaggaagcccccctttctgtttaccacgtctctagtgcccccctcacacagcagctccagagtttgcaccctgattgagttgagctgtgtcctttaacaatgggtcacttcaggtgagcatagaagtgatgtgtcccttatctccaaggcttccgtggagtgccctggggggtgtgggtcatgtttacagagcgtggaggccacggccaggcagcatctttagctggacaggaaaatgagaagtgacagcatttagagggaagcaaaaagaacaacacaggttacaggttgcaagtaattttccattttgtattttcgttctttttcttttttttgagactgagtcttgctcgcccaggctggagtgcagtggtgcgatctcggcttactgcaacctccacctcctggattcaagcaattctcctgcctcagcctcccaagtatctgggattacaggcgcctgccaccatgcccagctaatttttgtatttttaatagagatggggtttcaccatgttggccaggctggtctcgaactcctaacctcaagtggtctgcctgcctcggcctcccgaagtgctgggattatgggcttgagccaccaggcccggccccattttgtatattttttaaggctttcattttatgccagtccttcccccaggatggaacatggcataaaatcagagtcatcattagcattgaaatgtaattaaagcttggacagcttggaaaagaattctcaaagtatctactgtctttttcagatttttgtcatttcaacaagagtaaaagtttcataaataagattctttagtaatgtattagaatgaaagtgaaaaataatacagaaaaaaaaatatactggcctggcacagtggctaactccagcctggggacagagtcaagatccgtctcaaaaaaaaaaaaaaaaaaa

SEQ ID NO: 2434 - DNA, 1541 bp, Homo sapiens
gaattcggcacgagctgccttgagcttgccgccattctagcttaggctggatcacccacccccggcacagagaggagctgccttcaagacggattttcctgcatgatggaaagtggagtttgcacaataaaagagagagtccccattctcccatcaccaagagcagctcttcccatcttcacgtggtttattttggtcttttccagattggcattcatttaggattggctatgatgcatggggctggggagaattactgcttattgtaaaaaattcactcggtgctagtgacctgatgcccagcatcctcagtgggttttccctgtaaaaattccagtatgtgtcgctaaaatacaaatctttttaaaagcgtaaccacaataccatactgtttgatatgtaaaaatgaacggtaattgcttaatatctcaaagtgtccagtcagagttatatttccagttgtctcatgtacatcataatgttttgttgctcacttgaacaggattcaaataagttttgcacaatttcatttttaaattttttctttttcttttgccattaaatactctcctatccaaacacatgtattttaatctgtagcttcccccatttttattttttcccttgcagtttgttgaagaaacaagtcatttgcatctgtgtggcgttgttgaacatggtcctctctcctggccactacatcacattcagagttgattctcccctccctgttcagagactggtggtgggtgttctttatccggcatctctctgtgacagcagcagcatttgtggccataattggcctaaattcatgaactcattagagagtgcagaaaggtcacagcctgatacattcatgagatgcaattcattaaagagcaacttctccccagcaacttttgggttgactcgtggtatcatctgtaaaagaaaagtaggataaatgcttctttccccttttcatgccatttttgaaaaccacacattggttctccattctcttccaatgatgattaattcattaaaaaagttattacccttcctcacaccatacacaaaagctcactccagggccaggcgcggtggctcacatctgtaatcgcagcactttgggaggctgaggcgagtggatcacctgaggtcgggagttcgagaccagcccggccaacgtgacgaaaccctgtctctactaaaaatacaaaatttatggctgggcgtggtggctcacgcctgtaatcccagcactttggaaggccgargcaggcggatcacctgagatcaggagttcgagacccgcctgaccaacatggcgaaaccctgtctctactgaaaatacaggtgtgtttttagctaggtgtggtggtgcatgcctgtactcccagctactcaggaggcaggagaataacttgaacctgggaggcggaggttgcagtgagccgagatccacactattgcactccagcctgggcaacaagagcgaaacgccatctcaaaaaaaaaaaaaaaaaaactcgagggggggcccgtacccaatcgcc

SEQ ID NO: 2435 - DNA, 2074 bp, Homo sapiens
  misc_feature (2019)..(2019): n equals a,t,g, or c
  misc_feature (2043)..(2043): n equals a,t,g, or c
  misc_feature (2048)..(2048): n equals a,t,g, or c
  misc_feature (2061)..(2061): n equals a,t,g, or c
cttccgacatgcctccagcctccattttctcccttcccagttattccttagcccagccatctctgtctttagctcctacaattttcttaggatattctgggaaagatgagcggagactgcccgccttgtcaaatctagtgtctttttttcagtcctcacactgcttgacctatgtataacctcctatacttccctctttgcatactcctctgggttttctgtggtagtcaagattcctccctgagatttatttcccatgagtcttgacccctcccctcagttggtgctatttccccctacccgccctccgatgatcttatcagagcccacaggttcagttttctttcatgctacctgaatgtcctgataaactggctcrctctcttctttaccttccataatggcattaccatttaccacgccacccaagatacttactaggaacctcaaagtattgtattctttttctccatcacactcatacttaatcatcaagyccttttgagcttgtctcctcttgaatatgtcccttcttaattcctgctgccttcttagtaaaggcyttcattcttttttccctagtaataatcttttccatatgttccagttaaaataccatgttctccctattccttattacatagctagcattccttgaaaaaaaacaattctctcaggcctccatacctttagcatgttacccactctgcctctgctcttctggaactagaacactcatccttgaaggctgggcttctgtatgaaggttggtcctgcctccttacttgaggtgaagctttgtacatgcctgtattacggacatcctcttatttaagtgtttgtctctttcgtcattgggactccagcacccagcatagtccctagtatactagttggtgccgaataaatagtagctattattagaaaaggaagggtgaaattgacatgggagttagtaaaatgtatatggaaatgatttttaaagggaaaggtaatgattttctggcaggaaaagcagcaatgacaagattacttaagtcttgtgaaataacacttctcttccttgacctgctgcttcccttttttaccacacacacacgcacacataccacagccctttgagactgaaagcagctctattgagaatagtagtgtcaactgtattatgtagaaattctaaagtttttgggattatttcatagccctgaccttgctacttctctccactttatgtggcaggtttaatctcaggtctccctcatacacttctcagcctcagcacctaaccctcacacaacactccagtattgatgcagtcaatcttgtataacattttttgaatgtccaatgtgcaaagcacgatgttggaaattatacagaggtgaataagacaaaaactcttgctctcaaagatgtcagtctttttctttgcaaggataacacatgtagagtaaaatgcataaaggggactaattttaaatgtacagcttaattaatttttatgtatgttaacacccatgtcaccaccatgtttaggacatttccagcacccctgaaatttccttcatgccccttcccagtctgtacctacacctctaaatctattttcaatcttaatggccttttaaataactgggcttctcacaaccatagtgaacagaaacagctgggttgtcaacgtctaacctaatacttcaggaaaactcatgatggtttccatgttaagagagacatggagcagggcactggcatggyggatggatcacgcctgtaatcccagcactttgggaggccgaggtagggggattgcttgagcccaggagttcaagactagcctgggtaatataaggaaaacctgtctctgcaaaaaaaaaaaaaaaaagaggatacaaccaaatggaagaacattccatgctcatgggtaggaagaatcaatatcgtgaaaatggccatactgcccaaggtaatttacagattcagtgccatccccatcaagctaccatgcctttcttcacagantgggaaaaactactttaaagttcnatggnaccaaaagagccntatcgccagtcat

SEQ ID NO: 2436 - DNA, 2288 bp, Homo sapiens
  misc_feature (603)..(603): n equals a,t,g, or c
  misc_feature (2113)..(2113): n equals a,t,g, or c
  misc_feature (2158)..(2158): n equals a,t,g, or c
  misc_feature (2279)..(2280): n equals a,t,g, or c
tgtgcacagataaaattagaataaatgcagagatgctataacaagatgtcttagaaaaaagaaaaacaaagaataaatgcagagagaaagagaaatgtataaaaggtagagagataaacataccacaagttcatagaaaagaaaggttgtgtgtttatctgtggctgggatgatcaagaaatgcttcatggataaagagcctttgagccagacattgaaagaaaggtaatgttggacttgaggtcttggagtatcctcgttgaaggaaacatgagcaaaggcataggtagggatgggaaatgccggggtgcagagtgggcaggawtcgatttgtagttgctgggcaatgatgtgtgtaaaccactaaaggagaagwtcaggtagcaaaggtccttggaggccagaacccagagggccttgaatggcaygtgactaaatgatttaaacttaagttactggggagcawtggaagaatttgagtggctagagtccccatcctgaagaggccttgcggggatcagcatgtgggtgcctctggactgtgaaatagccagagctgggaagccttttagagctgctgttgtggtccaggagggaggtggngagggcctgggtgaggggaaggccactagatggagaaattgaatttatgagatgggatttaggaactgcctagataataggggttggccgatgggaagcaaaaatgcccccagagctttgaacccaggtgccattcattatttctatgccatctgccaggcattgcatagctattatctcatttaatctcctcctaatcttgtgggttggtattttcatccttatatcagagacgagaaaactaagggtcagagaaaattagcaattggtctaaaattgtacagttgtaacaggatctagaacagggacttcagtacaggcctccctgacccccaagcctgtgttctttctactgtactaggcttggaagacagcgtacgtgagagcaaagacaagctctgtccactctgtgcatattcagtgtaggtgctggtgagattcccgccttcaggtgtccagcaagtggttggagacatggagccgaatctcaaggacattgggaggattgaaggtcaaggcttaagaaccatctgcatcctcatttatttattcagcagctatttgttgtgtcttcgtggaccagcttggcagcatgaatgctgtgaccamcaagagaggtgtgtccttcacggagctgccaggctgggagggagccctgatggcgtggcttgagtgtaaggcaggaggtgtgcagattggctgtgggaacttactggcctaaccttgtcaggtcagggaagctctctagaggcagttgtggttctcaacatgagactcaaatgatgaggacccagataaaaagtgggaaaacagcataccccaggccgtggaagtagcgcgtactcaggcagagcaagataagaacacagtgtctttaaaccaaaaaccacgtgtggctggaatggagggaagagcaaggagataagacaggtgagcaggaaccagaacaagaaatgccctggaagctgtgagacgcttggaattcacctgtgaagaaaagagtagcctcatctgaattccttgcctcgattatggtctccaatagaagattaaatggctgtggagtctagaggttttttccttcggtgtgggcatcaccccttctgaaaggatggtgtartggctaattgtatgtatcagcttggcgaggccacagtacccagatacttggtcaagcaccagtctagatgtcgctgtgcaggtatttttttagatgaggtttaacatttatatcagtagaaggagtgaagcagattatcctttgtaatgtatgtaggcctcatatatcatcagttgaaggccttaagagaaaaagattgaagtccctaaagaagaaggaactctgtctccagtctcccttcagactcaagactgcaacatcggcctggcacggtgctcacgcctgtaatcccagcactttgggaggctgagatgggtggatcgcttgagatcaggagttcaagaccagcctggccaacatggcaaaaacctgtctctatttaaaaacacnaaaattagttgggcatggtggcaggcgcctgtagtcccagctacntgggaggctgcggcatgagaatcacttgaacccaggaggcagaggttgcagtgagctgagatcatgtaactgcactctagcctgggcgacagagtgagactctgtctcaaaaaaaaaaaannaaaaactc

SEQ ID NO: 2437 - DNA, 1156 bp, Homo sapiens
ggcacgagggagaaactcctcctcataccttctgcaaagttgacaaaaacttaaattgtggaatgtggggttccagcgtgtttctgtgttataagaagtctgtacctgcttcaaatgcaatagcatataaggctggtttaatttttagatatccagaagaggactatgagtcatttccactctcagaatcagatgtacctcttttctgccttcctatgggagctactattgagtgctgggatcctgaaaccaaatatccacttccagttttttcaacttttgtcttgacaggttcttcagccaaaaaggtatgtttttgtctcattgattaaacacattttgtccatgtttttatttcataaaaaggttaatacaagttttatttgaatgttaggattatttggacatgatacattttggtttaaatttacactgtcatccccaaggtgagaaatcaacatgaaaattgctatcaggatattgatacctctggaacttctacagaagcaaagataaagtctctctggatagacaccttcaaaacccaggtgtcaagatgagatgattatgacagatcaaggacataggtaccatagaaagaatcgacagacacaattaaaaagcagggttagaccctcaagacattgaaatgacagaatgacaatataaaggatgttataaattaaaatatcattgagatgacctaagaactaatggaggggctcaaaatatcaaggaaggaacaggatattttgaaaaatgaatagattgggaaaagaatcaagtgtttagaaatgaaaaatatggtccttaaaattaaaaattcagtgaatgggttaaacagcagagataaggccaggtgcggtggctcacgcctgcaattccagcactttgggaggctgagacaggtggatcacttcaggccaggagttcaaggccagcctgggcaacatagcacaactccgtctctactgaaaatacaaaaaattagccaggcttggtggtacacgcctgtaatcctggctactcgggagggtgaggcatgagaattgcttgaacccgggagacagaggttgcaatgagctgagactgcaccattgcactccagcctgggctacagagcgatactctttctaaaaaaaaaaaaaaaaaaaaa

SEQ ID NO: 2438 - DNA, 2488 bp, Homo sapiens
gaattcggcacgaggaagactcccatcgttttcgaaccaaggttcttccctaaagtgagttttaggtctccttttatttttccatatgtaaataatgcagaaggttactacattaagacacatagagaattgtctagctggcaaatgttaatagtggcttttactttaacattttttataaaggatctggaagcagttttcagttcaacactgaatttttctgtattatgaaatgccatgcttagaataacctatgtaagtgaaaaaaattggaaatagaatctggaattgggaggttattcaattgtcaatacggaaaaaaaggaggctcttcatatagcctttgaagacatgtggccatatattactgtattcagacaggactataggtaaacagaaggtatccccatagtgactggcgtcacagtttcgatataaatattgaattaaatgcatgagttatggaagggtttcatagactgtaatgatattaatgttgatacaccttgggtatatcaagctaaacaagtcttagagaataatgaaaatgatccagcagrtacaatagcatgtcataagagaattagctgtctttatttttatttgagaaggattagcataatatagaaagactatgtatatgagttccttaagacatggcaggacccttgccttttaatacatatttgaaaattataaccatgttgttcaaatcccaaaatactctgggaggagataggggccaaaaaaagaaaataaatcctttttcatggatggtagaattaggatgtttccagaaccagcactgtgcccatcgtagtaggcactgaatttttttttgtaaaagaacattaggatagctcctcaagagaggatgttgttttccataatgaacttcttctggtgctgctgtgagacctccaactccagtaggccactgatgtgtttgagctgttctgaatattctcttctccccagggagcagggggctcttttagcattgacagtgaggagtatgaagcgatgcctgtggaggtgaaactgctccccaggaagctgcagttcttctgtgatcctaggaagagagaacagatgctcacaagccccacccagtgagcagcagaagacaagcactctgagaccacactttaggccaccggtgggaccaaaagggaacaggtgcctcagccatcccaacagtgtcgtcagagggtccccagggcattttcatggcaagtacccctctgcccccactccagcagtgcttcccaaagtgtgctctgtcacctgctttgcaatcggcttccattagcgcatgttttattttggtgtgacggttggccctcctaaacacggactttcctcaggctggttcaagacggaaaaggactttcttctgttttcttccaaagtgcaaccacagtggagagcccacggtgggcttagcctgcctaggcccttccatttctcttctttgaccgtgctaggaattccaggaaagtgcattcctgccctggtgaccttttcctatgtctaggctcctccacaggtgctgctattttgtgagctccggctcctgtttagcttttatttcagttctaacctcagtccagaaacatatgtgaggttgtttccctcttcagccacggctacaataccggaaaatgctagtttttatttatttttttaagtagtgcttcctaaatggtttgcatgagagccacctggggtacatgttgaaaacttatttggggtctaccccaaacctaataacccaaatttggggatggggcccaggaatatgcatttttaaaaagtcatctgcccttcccaggtgattctgtaagttgtccctcaactgtacttggagaaatcgtgttttaaagcagtagtccacaaagtattctgctcatgtgcccccaaaagtattttgaaaaatcatgtataccctcacccatctaagttgatatctaaaattttatctaagttggtatctaaaatttttcatgggaagttaaatagttgacaaagtatgtatttgctggtgtcgtgtaaatattggtattttaaaataaaaactgttacatcactattttaaacatatccagtacaatttaaatatcacaacaatttgacacccttcattcatttataaaaataaatgagctagttctttagtagttaaacatttcaaattggcttttctccttctgtatttccataccacttttcagccaagaatcctatcataatgtaatctattatgcccgacatcttttaatcattcaccccattacttcttgtcaacaaaaaatataaatggaaattttttttttagctcttgctttaagtgtttgtttgttatctcagtccagaaccaatattatcgtaattaattattggtatataatgaaaacggtattaattcttggatgattaaaagtttttttattagaatgttaaaaaaaaaaaaaaaaaaaaaactcga

SEQ ID NO: 2439 - DNA, 1640 bp, Homo sapiens
ggtcagagtgtgtgagctccctagtaggtgcagtagtaatagtaggcaccctttgctgttattgttatgaaaactgtcagctccaggatggtgctggaggtgacgatgatgttgatgacagggttgttaggaatggagttagtggcaagtggagctacagatgggcccacgggtatgagagctactaacaggaactttgactcaatttggcagaatcgtatttcaaatctaaattctctttccaccagctccttttgctataagggaaagccaagtggaaacgtagaggcatgtgcacccagatctcctgaaaagggcaataggagagggtagcagggaggagacaatcctctactgagctgaactggaaacgcctgattgtcatttcttccctgctttgccactgacgcccgcagcagctgatcaggaaggtatcagatgccttcactagctgtcactaacacctgcctcctgaatcctgatcggggagatggtgtcatcgggccctccacataaaatatttagtggcacttgcttcccaaagaggcaagcgtggcctctccttggcatcaggaacgctccgagttacatgtgctgggagactctcttgttcaggcgagagtcctggagcagcatacctggtttgagacttggagtaggagagagggaaactggtagaacagagactaggcaagttttggctcttgagaatgcatgtgacaagtgacttcatgcactaaacagagagggatgtgacagaaagaagaaagcatcattattaagagaaaactcctgaggttgacactagcagaaaattggggataggaggaagtcacactgggtatgcaaagtcaaatgcatgtttgtttaccagtgtctaccaaactgaggatgggaaattcattctaagacagatgatgggatggatggaggtgaggagctggaaataatgacaaataaattgctaataacaaaggctaatgtatcttaaacacttaagatggccatgaactgttctaagtgcttttatatgtattaactgatttcattgttataatcctatgacgtagctactagtactaaacctattttatatagatagttagataacatcatagaatggctaagtaccttgaccaagtgtacacagctataggctccatttgcgtccaggcacctaagttcagagctcatgcatttaattgttatatcgcactgcctctcaccagaggcacaaaggtgggctccatcctcccttactcagaatgtggataggagtcctgatctttgcccactgggctctgcttggaacagccacttagtcacatcaatttggcatagaaagatgaaggctctcaacgtgcccttgaagtcagctgtcttcatgaaggccacactcccaaggtggggtgcaaacctcccctcactgcaggagactgtgcctcctcttgactccagtgtccaatgacagctgctcccaggcgggcagtccctgagtcctgtgagatgaattcacttggctggttatcaggagtggcctgtcccaaagcaaatgctgcatgagggtgagaggaaaacagcccagctggagtggtctgtttagaactactggcctgaaaaaaaaaaaaaaaaaaaaaaaa

SEQ ID NO: 2440 - DNA, 1996 bp, Homo sapiens
  misc_feature (2)..(3): n equals a,t,g, or c
  misc_feature (7)..(7): n equals a,t,g, or c
  misc_feature (75)..(75): n equals a,t,g, or c
  misc_feature (78)..(78): n equals a,t,g, or c
  misc_feature (906)..(906): n equals a,t,g, or c
  misc_feature (1973)..(1973): n equals a,t,g, or c
  misc_feature (1988)..(1988): n equals a,t,g, or c
  misc_feature (1992)..(1992): n equals a,t,g, or c
annaganttctcacacattcttatggttcctctatgtttgctccaactgacacttcagatatggaagcagtattnttnggaggcaaaaccggaagaccttatggattcaaaacttagatgtgtgtttgaattgccagcagagaatgataaaccacatgatgtagaaataaataaaattatatccacaactgcatcaaagacagaaacaccaatagtgtctaagtctctgagttcttctttggatgacaccgaagttaagaaggttatggaagaatgtaagaggctgcaaggtgaagttcagaggctacgggaggagaacaagcagttcaaggaagaagatggactgcggatgaggaagacagtgcagagcaacagccccatttcagcattagccccaactgggaaggaagaaggccttagcacccggctcttggctctggtggttttgttctttatcgttggtgtaattattgggaagattgccttgtagaggtagcatgcacaggatggtaaattggattggtggatccaccatatcatgggatttaaatttatcataaccatgtgtaaaaagaaattaatgtatgatgacatctcacaggtcttgcctttaaattacccctccctgcacacacatacacagatacacacacacaaatataatgtaacgatcttttagaaagttaaaaatgtatagtaactgattgagggggaaaagaatgatctttattaatgacaagggaaaccatgagtaatgccacaatggcatattgtaaatgtcattttaaacattggtaggccttggtacatgatgctggattacctctcttaaaatgacacccttcctcgcctgttggtgctggcccttggggagctggagcccagcatgctggggagtgcggtcanctccacacagtagtccccacgtggcccactcccggcccaggctgctttccgtgtcttcagttctgtccaagccatcagctccttgggactgatgaacagagtcagaagcccaaaggaattgcactgtggcagcatcagacgtactcgtcataagtgagaggcgtgtgttgactgattgacccagcgctttggaaataaatggcagtgctttgttcacttaaagggaccaagctaaatttgtattggttcatgtagtgaagtcaaactgttattcagagatgtttaatgcatatttaacttatttaatgtatttcatctcatgttttcttattgtcacaagagtacagttaatgctgcgtgctgctgaactctgttgggtgaactggtattgctgctggagggctgtgggctcctctgtctctggagagtctggtcatgtggaggtggggtttattgggatgctggagaagagctgccaggaagtgttttttctgggtcagtaaataacaactgtcatagggagggaaattctcagtagtgacagtcaactctaggttaccttttttaatgaagagtagtcagtcttctagattgttcttataccacctctcaaccattactcacacttccagcgcccaggtccaagtctgagcctgacctccccttggggacctagcctggagtcaggacaaatggatcgggctgcagagggttagaagcgagggcaccagcagttgtgggtggggagcaagggaagagagaaactcttcagcgaatccttctagtactagttgagagtttgactgtgaattaattttatgccataaaagaccaacccagttctgtttgactatgtagcatcttgaaaagaaaaattataataaagccccaaaattaagaattcttttgtcattttgtcacatttgctctatggggggaattattattttatcatttttattattttgccattggaaggttaactttaaaatgagccctatcactgagaaatacgtgtttcatgatttaactctgtgtgtgtgtgtgtgtgtgtgtgtgtgtgtgtntattttttttttggntgtnttca

SEQ ID NO: 2441 - DNA, 2067 bp, Homo sapiens
cgcccccgcctcttagaacctagtgggttccccccgggcctccaggattcggccgaggctcagcctgctttgagcctcagtgagaagtccttccgacaggagctgactcatgtcaggatggcaggcctggtatcttgctcgggccctggctgttggggttctcatgggttgcactgaccatactgcttacgtcttagccattccgtcctgctccccagctcgctctctgaagcacacatcattggctttcctatttttctgttcattttttaattgagcaaatgtctattgaacacttaaaattaattagaatgtggtaatggacatattactgagcctctccatttggaacccagtggagttgggatttctagaccctctttctgtttggatggtgtatgtgtatatgcatggggaaaggcacctggggcctgggggaggctataggatataagcattagggaccctgaggctttaagtggtttctatttcttcttagttattatgtgccaccttcttagttattatgtgccacctcccctatgagtgacgtgtttgatcactagcagaatagcaagcagagtatcattcatgctggggccagaatgatggccggttgccagatataactgctttggagcaaatctcttctgtttagagagatagaagttatgacatatgtaatacacatctgtgtacacagaaaccggcacctgccagacagagctggttctaagatttaatacagtgctttttttcctctttgaaatattttactttaataccagtgccttttcttgttgaacttcttggaaaagccaccaattctagatcttgatttgaattaatacacacaatatctgagacacttacacttttcaaaagatttgtgtatgcattgcctaattagagtagggggagaagggcaactattattatccctattttacaaaactgaggcttagtgaggttcagccacatgcctagacttatatactagttagtggtgcagccagggagaggactcagatttcctggaggcaaagtctatctctgaaactccatgaagacttttgcagccagttcccaccaatatgccccagacgtgagacaaacaaggacttttttttttatatagagccatccataaaatcctaagcccttttattaacgtataaccaggagaacatctgtgccaacggttggactttttatggctgagattcgggaggaagtgtgacaccaagcaggagaggaagaatgattttctttgtacttaggttttctaaggacattgttttaatctgtatcgtgccaaagttgtatcactgttaaacttctgaagacataaccagttgagtcttatttcaagatatgttctcaagccaattgtgtgcttctcttgtttctgtgattgctttctagccaaagcgaagcttgtacaggttgagtatcccttatccaaaatgcttggaaccagaagtgtttcaaattttagattattttcagattttggaatgtttgcatatacataatgagatattttgggaataggacccgagcctaaacacaaaattcattgatgtgtcagttacaccttatccacatagcctgagggtaattttatacgatattttaaatagttgtgtacatgaagcatggtttgtggtaacttatgtgaggggttttcccatttgttgtcttgttggtgctcaaaaagttttggattttggagcatttcggattttggatttttggattagggttgctcaacccatattattggctgtacatcctggtcacttctgacttctgtttttactaatggaagctttgcaaattgaattctcagtgagttgtatatttatacacctggcttgaagccttaattgtatataatgatgctttttaaaaaatgctatttggaagactatttatttctcgtgtatataatgtatataaaaaaatatggttagtgtttacctaaggttaaccaatttcaagattaaaatttttaaatagtaaaataataaaaaattataaagttaaaaaaaaaaaaaaaaaaaa

SEQ ID NO: 2442 - DNA, 2226 bp, Homo sapiens
ggttagctgtacgcctgcaggaccggtccggaattcccgggtcgacccacgcgtccgggggcggcccggccsggcccggaagctacagcagcggcgcggagactgcggggcgggccatggcggcgaacctgagccggaacgggccagcgctgcaagaggcctacgtgcgggtggtcaccgagaagtccccgaccgactgggctctctttacctatgaaggcaacagcaatgacatccgcgtggctggcacaggggagggtggcctggaggagatggtggaggagctcaacagcgggaaggtgatgtacgccttctgcagagtgaaggaccccaactctggactgcccaaatttgtcctcatcaactggacaggcgagggcgtgaacgatgtgcggaagggagcctgtgccagccacgtcagcaccatggccagcttcctgaagggggcccatgtgaccatcaacgcacgggccgaggaggatgtggagcctgagtgcatcatggagaaggtggccaaggcttcaggtgccaactacagctttcacaaggagagtggccgcttccaggacgtgggaccccaggccccagtgggctctgtgtaccagaagaccaatgccgtgtctgagattaaaagggttggtaaagacagcttctgggccaaagcagagaaggaggaggagaaccgtcggctggaggaaaagcggcgggccgaggaggcacagcggcagctggagcaggagcgccgggagcgtgagctgcgtgaggctgcacgccgggagcagcgctatcaggagcagggtggcgaggccagcccccagaggacgtgggagcagcagcaagaagtggtttcaaggaaccgaaatgagcaggagtctgccgtgcacccgagggagattttcaagcagaaggagagggccatgtccaccacctccatctccagtcctcagcctggcaagctgaggagccccttcctgcagaagcagctcacccaaccagagacccactttggcagagagccagctgctgccatctcaaggcccagggcagatctccctgctgaggagccggcgcccagcactcctccatgtctggtgcaggcagaagaggaggctgtgtatgaggaacctccagagcaggagaccttctacgagcagcccccactggtgcagcagcaaggtgctggctctgagcacattgaccaccacattcagggccaggggctcagtgggcaagggctctgtgcccgtgccctgtacgactaccaggcagccgacgacacagagatctcctttgaccccgagaacctcatcacgggcatcgaggtgatcgacgaaggctggtggcgtggctatgggccggatggccattttggcatgttccctgccaactacgtggagctcattgagtgaggctgagggcacatcttgcccttcccctctcagacatggcttccttattgctggaagaggaggcctgggagttgacattcagcactcttccaggaataggacccccagtgaggatgaggcctcagggctccctccggcttggcagactcagcctgtcaccccaaatgcagcaatggcctggtgattcccacacatccttcctgcatcccccgaccctcccagacagcttggctcttgcccctgacaggatactgagccaagccctgcctgtggccaagccctgagtggccactgccaagctgcggggaagggtcctgagcaggggcatctgggaggctctggctgccttctgcatttatttgccttttttctttttctcttgcttctaaggggtggtggccaccactgtttagaatgacccttgggaacagtgaacgtagagaattgtttttagcagagtttgtgaccaaagtcagagtggatcatggtggtttggcagcagggaatttgtcttgttggagcctgctctgtgctccccactccatttctctgtccctctgcctgggctatgggaagtggggatgcagatggccaagctcccaccctgggtattcaaaaacggcagacacaacatgttcctccacgcggctcactcgatgcctgcaggccccagtgtgtgcctcaactgattctgacttcaggaaaagtaacacagagtggccttggcctgttgtcttcccctattttctgtcccagctcatccgtgtctctgaagaacaaatatgcttttggaccacgaaaaaaaaaaaaaaaaaaa

SEQ ID NO: 2443 - DNA, 1758 bp, Homo sapiens
  misc_feature (26)..(27): n equals a,t,g, or c
ggtcgacccacgcgtccgcttttttnnttttttttttttttttttttttttaagtctataagctttattgatactttgcttttacagttcacaatgcattccacagatttagttcagtacagcttaaaccacaatggtataaatcttcattttgtaattaataatttcttgcataacaatgtttgatatttgcaaacaaacaacatttttggaagcattagattcagtccatagattctgtgacaaaattaactacagtcagtctgtgcaatgaaattgatgttggagttctatgtgtgtggcatttcatgttgaaaacagatggtagtgctcctagaaatatttcttcttctagcttatgtgctttggaactacacatgtataaccaatgactgactctgaaatatcaagcactgtggggtggctggaaggtaaaggtctaagctttgtgaaacactatacatatataatctatatttacttatattggcaattaatataacagtaaaagtcacaatacacctagaacataccagaaaagcaagctttgtcattcctgctttaccggtatgatctcgtctaaacaaacatttcatttcagaaaatctgcatcaatctacacggaccatacacagtgcacaaactgaaaagggcttttttttttttttttctagctccaccatctctgcaacttgccaagatgcggcaagactatctgcaacaaagtaaaatatacaggttttttattccaccagtgcctcagataggaaaaagatatgattacggtttaaatccatacatagcagcttacaatacttaagatgatgaacacatggcagtcaagacaggtaatttttcctcacaacagtgcatggctaaaaataaagatctaacaacgatctgtgaaactgcactgcaacgtcaaggttcgttcttccctgaccctcccccgtataatcaaatgaatatcccctttaaagatgaactcctactaattattttgggcgttttcattcagctttgcgcttcaatccagggatttttgcttggattttagccatagcatctttaacattcttatttgcaagtcctagataatgatctatctgtgcctgatgccgttcataaataacaggaacactgaagagtgaaatgagagccaaaatcagtagtgtcagaccattaaacaaggcaccaacataggtaaatacccacatcaacactgcaaacttcagagaatcaactaaatcatcaactaagaagaggcgcctgagttcctttatcgtgcagttcacatgaccaagagcagaattactgtacttctgaaccaactcctcagatatagcaacttcagattccagatatgccctgaatgggtggccttcatctgatttctggatagcttggatcacacccttgtatatcctaaagctgatggtcacagagagcagggccaaggcaatgtaggctgttacgctcacaatgctgaatactgtcaatgaaagcagcaggaataggctggcaccaaacaccactccagtcttcttaatgtctctccagtacaggaggtcaacaactgcagaggagcgtatcacaggctcagatgcagcaggaagagcaaaaagggtctcatccactgagcccgaggagcccctgcgcttgggcgcggccggggtggaggggggcgcggcgggagccggggctggcggggtccacacgggctctgcctgggggctcacgctggccggggctcgtgcc

SEQ ID NO: 2444 - DNA, 1575 bp, Homo sapiens
ggcacgagaaagtgttgaatatctcatatagtttattgaatacctgcatccaaaagatgctggcaacacagcacactttagagcattggttgtttactctcttgatggtatggctgcccagcatcaagagttatcatactgcaaatcgatagcccaggaaaagagcaaaattcaaagttcaaagtagagtttttactgaatgcttgcttttgcaccgtcgtaaagttgaaaagaatttaaattgaaccatcataagctgcagactgtgcattttatattgaaaagttaatatttttaatttttaatgcagagaagtacccaaagcataagaacacaacacattttcacaaagcaaacacagccatggaaccagcacccatatcaactaacaaaatactagtttgggcttttttgtactttatacaaatggactcatataatgttcatcttttgggtctgcctgctttcattcaatattaggtttgtgggttcatctctgctgtgtgtagttctttcctgttctttatacagtgttccaaagtatagtatattacagtttacccattctactcttgatagtaaatgttttcacatttgggctattacaaatagtgctgcagtgaacattcacatacacatcttttggtgaacatgtgttacatttccaagtacaattgctgggtgatgagtatgcatactcttaaaacatggttgtaccaatttacacctctacgacagtggttccatacccttgccaacttcattttgttcattgtaggcattctcttgggcgtatagtgttattgcattttggttttaatttgcatttccctaatgactaatgcagttgaacacctttccaaatgataattggccatttggacatcatctttcgtgaagatcaagtcttgctcatttttccaatgggtcgtttgctatttttcttactgattcccaggaatcctttctatattctgaataccagtcctttgtattacaaatatgttgtactctgtgacttgttttatttttcaattttccagtttatgttgttgattgttttacttcatcccagaccaacagattctaaagcttaattaagctttttgatcagaaaaaaacccaacttggatacatcggagtaaaaactgcttctctcacctgctctacttatttcccttcagcatttctagtgagtcttactacatgcacaagtaagaaatacttttatgctgtttaatgttcaggttctgactaataagaagacgaccttctttggtggcaattctatctctatgattgattacctcatctggccctggtttgaacggctggaagcaatgaagttaaatgagtgtgtagaccacactccaaaactgaaactgtggatggcagccatgaaggaagatcccacagtctcagccctgcttactagtgagaaagactggcaaggtttcctagagctctacttacagaacagccctgaggcctgtgactatgggctctgaaaggggcaggagtcagcaataaagctatgtctgatattttccttcactaaaaaaaaaaaaaaaaaaa

SEQ ID NO: 2445 - DNA, 549 bp, Homo sapiens
ctacatagcgaacaagatcttttcagagtggtgtttctaaaagagcatgtacaaaagtggcctgtggacatttaggcctgggtgatgcatttgctcttcctgtttgtgccaatgtatcaatgtagagttgctctgttttcttcaactgtatttattgctgcatttctcagcataaacttatcccattgtattttttataaataaatattttttttaaatgttctctacagaagatttaaatcaacaaaaagatataaaattgcaaaggttgctcagtcaaaaccatgattatcaaggaagcaaagcttctggttccaaatttggtaatctgctacccatgttaagtttccagtttttatctggttgcccttcagtttagggaccactggcccagaacacacattactggcttagataccggcctgacataggaaagagagtggtagggtgaagagagtcattctctgcaggctcagagatgtgtaggcacaagggactcccgctatgtagggaatcgatatcaagccttatcgataccgtcgacctcga

SEQ ID NO: 2446 - DNA, 1397 bp, Homo sapiens
aaccaatcgagtacacggcggtcttgccaccagatagacggcgaaaccagcaaataatggcggaatcgttcggggcaggtgaacagggaatagaggccgtacaaggcgccgaacgaatggccgaagacggcttggttttgggtatcgatgcggtatttgctgttgagcagggcggagagttcgtcatcgagaaagcggctgaagcggtcggcttggccktattgtttgcgttcggattcgggcgcgttgtctggcagtggcggcgtgtagtcgagggcgcgttggcttaagtcgcggatggtgctgccggtgtagccgatgccgacaatcaggcaggcggcatggcttttggtgatggggttgatgagcagggattgcgccatattgaggatggcggggaaaaaggcatcaccgtcaaggatatacagcacgggatagccgcctgtcggacgctcgccgagtgccgcggcttgaatgcggtargtgcggccggtgtkggcggaagtaagggcggtttcttcggcttgcagcagagtggcggcttgccagttggggcggatgggcatgatggggtgctttaatcaatgggttgtttaagtaaaagggaaaaaggccgtctgaaaataggtttcagacggccttattgtaccgattcttgtctttttaacaatacgcgcgattagcgtacgtcaacgtaggagctgctgtgcagttcgcgcaggargttggtggtcgcctgttgcgctttttgttgggacaggtattggcggacggcgttttgttgacgctcttcaggcgtacctgcttcgcggacgtcgttcagcttgatgatgtgccagccgaattgggtgcggacaggggtgctgatttggccgggtttgagtttgtggacggcttcttcaaatggggcaaccatcatgccgtcggcaaaccagcccaaatcgccgccattgccggcgctgctgtcttgcgaagtattggcgtgccaaaccgccgaaatctgcgccgctgcgggcttgtgartagattttgcggatggtgctttctgcsccgacggcggcattgtcgttgtcggctttaatgaaggatgtgttgggcatggtattggcgcacagggtctgcttcaggcagggtgacgccttgttgtttggcctgctcgatgtagcgtgccacttcggagtsctcacgcggctgttttgcatgatggcttgttggcgcactttttcaacaataatgctgtcggcgatgtcttgacggacggcggcagacgggtttttgatgttggggttgtgcgcgataayggcttcgatttcgctatcggtcgcttggatgttgcggcgtttgcctgcttggaggatcagggattggttgaattcgatatcaagcttatcgatacc

SEQ ID NO: 2447 - DNA, 1285 bp, Homo sapiens
  misc_feature (315)..(315): n equals a,t,g, or c
cttgatacatttgttgaaaatgaattgatcatatatgtgagtgtttatttctacattctctattatattccattggtctatatgtccatccttgtgtcctagagaccacattgtgtcagtaccacattgttttgattactgcagctttgtaaaagttttgaaaatggcaggcctgagtcttccaactttgttctttttcaatatgattttagattgtttggggccctgggaaaattccatttacattttaaaatcagtttttacatttctgcaaataaaaaggcccttgggattttgataagggttgcattgaanctgtagatcactgggtaatatcgccaacttaacaatatttaatcttccaatctgtgaacacaggatgtatagttctatttatttaagtcttctttaatttttgtcaacagtgttttgtagtctttagtgcagaagtctttcaccttcttgttttaatttattcctagctattttactctttttgaygctatygtaagtggaattttaaaaattgacttccttcttgggctgttcattcctggtatatagaggcacaaatgattttcttaaaataaatgttgaacatgtaccctgcaattttgctggacttgtttattagctctactagtttgtggattctttgattttctagatagaagatgtcattattgaataaagagttttactgcttcctttccaatttggatgctattcatttacctgtttgtttatttatctgcctaattgtcatggttaaaactttcagtacattgttcaatagcactgggtaaagcatacagccatatcttactctttgttatgggagaaatttttcagttttttttctcattaagtatattagttgtggatttttcacaaatcctctttaacacattttgaaagttccatgtttttatcctgaaaggttgtagaattttgtcaaatgcttgttctgagtgaattgaaatgattgcatggattttttatccttcattgtattaatgtggtgtattacattgattgatactcttgkactgaaccacccttgkattcttgagataaattccatgtggtcatgatatataatcctttttaatatgctgctgaatttggcttactagtactttgktaaataaaagattttagtatctagtttgtcttttcttgtggtatatttgtctggctttggaatccatgtaatactggcctcatagaatgtattgcaaagttttttctcctctgttttttggaagagtttgagagggattgg

SEQ ID NO: 2448 - DNA, 985 bp, Homo sapiens
  misc_feature (372)..(372): n equals a,t,g, or c
  misc_feature (386)..(386): n equals a,t,g, or c
  misc_feature (391)..(391): n equals a,t,g, or c
aaccaatcctaatccctcctaaccccactcatagtccagagaagataaaaagttcagggacatggtgtactgctctccagatcctttcccagctgaaactctatacccatttagcactaatttcccattttccctagcccaagataaccaaccaccattctactttctctttgaatttgactcctaggtacctcacatatatattcctatttagtggaattgtagactatttatccttttgtgactggcttatttcacttagcactgttttctaggttcatccatgttgtagcttctgtcataatttccttcccttttaaggctgaataattttccatgtgtatatgtaccatatttgttcatccattcatncatgatagatactngagtngctctaccttttggcaattgtgagtgatgctggttatgaacatgggtgtacaaatgtctgttttgagtcctkgtttkgctttcgtgcattctattaaaaatgttaaggttcttkgctttttacttttttttctcttttatccaccttttgactttattcttaaagtttwatcttggtataataatttatggtatgttgcagaattaggagcaaagtcccgtgtgtccttcactcagtttcccccaatggtaacatttttcataattacagcacaatgtcaagaccgggaaattgacattgatacagtccatatacaggtgtcccttggtatctgtgggggattggttccagaaccctcgatgataccaaaatccatggatgcttgagtttattagataaaatggcatagtgttttcacataacctacacacatcttcctgtatactttaaatcatctttcgattacttataacacctaatataatataaatgccgtgtaaatagttatattgtattgattttatttgtattttttttattgttgttatttttcattgtgttttttccctgaatattttctatctgtgattggtt

SEQ ID NO: 2449 - DNA, 961 bp, Homo sapiens
  misc_feature (539)..(539): n equals a,t,g, or c
gcattgtgttaccatagattagttttgactgtttttaaattttgtgtaaatgaaatttggcaatccatacttttctatgccttgtttctttcaatcaacaaaatactactgcatattatgtttttgtatgtatcagtagtcttcctcattttattattgaatagtagtcaattgtgtaaatacaccgcaatttatctatacacctacttttgaatgttgcttttttcccaagttttttcatattatgtataactaccatgaatattcattacaagtctttgtgtggacttaattttttaggagtaaaatcggtgaataatatagtaggtgaatgtttaatttttcagggaattgcaaaattatttttatagttgttataccattttatatctccaagagcaatgtttcatacttccgtttgctctctatttttgaaaaccattgatgttgktagtatttatawttawttttgccatyctatgagtatctttctcaatatggctttaatttggatttkgagagtctatagtctttgctgntttatgtgcttattggtcctttttatatttttctttgtgaaatatatttgtgaaatatttactgttaattaacctatatctaagcttttaacttaatatctttatacatatgtttgtatttataggcataatgcagtgctagattttcttaattataaatcatgtamgagtacaaattgtaagcatttgtagccaaaatattaggagtattttgtggtctactgtaataaaatactgttctgaaagtcactactgttattttccaacttaaaaaaatggcaattgtgctatttctgagaccaaaaaatttttgagttcagatggctctatgctgaccaacagatggatcaggaaatagcagatggttttatgagcagttctgtcatctcagcatctgaaatgctttacatgccaatgctata

SEQ ID NO: 2450 - DNA, 1017 bp, Homo sapiens
tgacacattaatcaaagaaaatgtccatcccacatctttggtgtcatttttttaccttcttacttccttgcattaagaggcaaaagatccatatcaaattatgccatgtcttttgataaatacatttatgtgaaaacatataactcataactcttgatttttttcaccaaagaaagtagctgataataaaaaatgttccatttttcgtagcacaagctctatcaatttgagcttgttgatgcatttaagtgtgatgacattaattacactggcaaacactccaaaagcgcactttcttttatagcaaaatgccttttaaataaaatgttttcaaatctggcgaagaaagtttagaagggagataagcctcattattacttgtgattattataaatattaaacccttttatgtcataaattatagaaccttaaaaaagaattatcagcttcaagctaaatgctaaaataatttttcttcatagcaatatatctcaaagcaatgtgtgcataattataacttctgatatgttattagagctaaattttgatatgagaaatttttaaaactttatattttaatacaatttaagatttttccaatttttttaaatattgcatatttgatcaaagtggttgtgatttaagatgtaaaaattccccatttttggtaaacaaagtcttgtcaaaggatgagtagaaactacgtagctatgaaaaggttaattcatatattaggaacagttttactgcagaaaatttaaatcggcttaaaatgtttataccctcccactttctactgcaccaactctataatgaggtaggtcaattgagctttttacctgctttcaaaaatagcacaaaaatagttcttaagaattacgttgagtgagaatcagagattgaaaattatctgcaagaatatgtataacttccttctcccggcaccatcaaacgtgtttctctcctttattccccagattggttgaattcgatatcaagcttatcgataccgtcgac

SEQ ID NO: 2451 - DNA, 822 bp, Homo sapiens
  misc_feature (47)..(47): n equals a,t,g, or c
  misc_feature (799)..(799): n equals a,t,g, or c
  misc_feature (809)..(809): n equals a,t,g, or c
  misc_feature (815)..(815): n equals a,t,g, or c
  misc_feature (819)..(819): n equals a,t,g, or c
acccatggatttccgcccaaggctcggaaattaccccttcacttaangggaaccaaaagctggagcttcacgcggtggcggccgctctagaactagtggatcccccgggctgcaggaattctcggtcataggatatgcatattcggtttagtaaatactgccagtttttgaaagtgattgtactagttttacattcccagcaatagttgtataagatttcccttgttttgcatttttaccaatacttaaaatggcctgccttgagttgttgatacttgtgtcatttttgacatctgtcatccagactcaacctcctagggagcttgacccttcccttttttcagttttctctctagcctaggttcagtcagcaagacctatcagatttttcttttatattgcctttgtccttcctccattgccacagctcaaatattagtcatatatggagtaaatatcaggtgatttggatatcaggattatgacagtagtctgccagttggtgcatcttctagtatttctgcttttccaataaatcctgcacagccaagaaaatgcttcatgaaacaccgcaccattgctctgctcaaaagccgtcaacaacccttcattgcccattggatatcagccttcctccccctcttccttttccacctgtacctctcttccttcctcccttcttccgttctttttttttaattaaagtgtaatatatatgaagtgcactatgaccgagaattcgatatcaagcttatcgataccgtcgacctcgagggggggcccggtacccaattcgccntgggttccanagaagntcantag

SEQ ID NO: 2452 - DNA, 822 bp, Homo sapiens; identical to SEQ ID NO: 2451
  misc_feature (47)..(47): n equals a,t,g, or c
  misc_feature (799)..(799): n equals a,t,g, or c
  misc_feature (809)..(809): n equals a,t,g, or c
  misc_feature (815)..(815): n equals a,t,g, or c
  misc_feature (819)..(819): n equals a,t,g, or c

SEQ ID NO: 2453 - DNA, 1087 bp, Homo sapiens
tatagcattgaaaatcaaataatctaaaagaaaaaaaacaaacaaaaaaataattaactgaggagaaaagacaactactatcagagaacaggtcataacaagatacttcttttccccaaagccattgctagctagtatatatatattcccttcccctgtagtttgttccaaatttcaagtgtgatgatagtttatttgcacaaacgagacagacaaaagttattctaactagaatgcatgctctctgagagcaagactaatacctctgattcttttagagagcctaggtcatgtattttgggtgtgggaggccagattgtgccacccccaaatatgaagtattactgagctaaagacaattaagggaagcaaatgcaggaaagctctctactcttcctctctttgtcttaaagcaggacatagatttataaggacaaaaggcatcccacccctctttctccaagtagaacaaaggttaaccactaaagacaacttttgaccctgattgtctagagatggtactggaagaattttcatgcataagtttcactaaccagcctttatctgccattgttttgccttctcacaacttgctgctcctgggagactcaaagttcttttcctttgtcttgtcacttctctaaaatgtacggttctttgttgaagatgttgttgggacaactaagcttctcctcaaagactcaacctcctggtcataagttgcaaaagttgtaaatcaaccctacccactttcttccccaccttcttcttttcacaaatcacatgtttaccttatttggaaaagtttaagtctcagccaatcaggatcagcttagattgtgtggtccaaccccagccaataggcaaaggacacagaaacaggaactgcactagggttaaaagctccttcctcctttgttcagtgtgctcttgtgattgcatcaggtgcaagtagtacccttctgcagaagtaaagttgccttgctgagaaattttctgtctgaatgcgggtttcttttggctacactgagcacttgtttccaacaatgctatagaattcgatatcaagcttatcgataccgtcgac

SEQ ID NO: 2454 - DNA, 1220 bp, Homo sapiens
  misc_feature (958)..(958): n equals a,t,g, or c
aaccaatcaactatcaagcagtagtaatctatctttaaatttctactcggtcatgcaagtaaaaatgccatcacgccttcaatcccaaaattcccaaattcccaaatgtaaaaaagtccatgcaacaaaatgagaaataagaaccgttacaactgagattactggagtctcttccggaagacaaattatcactgtaatatgtaatatgaacatgtgaaggtctggctcatgttttatgatacacaggcttcaaaagttgtatgagctcagatagagactgttgtttgcaatttgttctttcactaattagctatgtgatttagttaaaaagttcaaaagattgtagtaacgattaaacaaatgtgtggaagtttgacctagcagtgtctgacccactcatgatatatatccaaccaatactagttagttctgattaccttaaaactggctgctcaacttacaaatcttaggtcaaatcacaggccctctaacgactacatataagaaaaacctatcaccaacgatcataaggtgccatatcaccaaggatcttctatgccatgcagacccaatcaatacaaggcagaattgatttaatacagtgtttctctaagtatgaataggcaggtatcctaatcattaagaaaaggtgctttggaagcagaaaggctgcgttcaaattctggctctatcacttaccatctacctaaatttaggcagttcttttattctctgagcctacttaacttatctgtattattcctataccccactgagttattgtgaggattaaataagtacagagaaagtgtgtggaaaagtgcttcaataagaatgttagctattgccactgctattattatgctccctaaagaatattccatgacccaataaacaggaaacactgctagagagtcacatgtgttattgcatttgacatcctgaggaaaaaaaaaanccctatttaatcaaataattcttaaatttatttaactctggcatccttttctcaaataacattaactactgtggtagtaatgtgccgaagaatactcttaagtgcaatgaacactataaattttctataaagctgtatatctaaacataccactgtaccacatagcctatttctagtccattccagatgcaatcaaaatttccctggcctcaaaaattagaagactaaaactttcattacctcttgttcagaaggattggtt

SEQ ID NO: 2455 - DNA, 951 bp, Homo sapiens
ttctatagcattgcatttcttaagtaactacatacacacataaatatatcactatcaaaaaacatttctgtcacctgagggagtttcgaattttctatgtctcttcctagtctctttccccaaacctctactaaccatagttaattttgtctgaggattttatataagtgaaattatacagtaagtgtaaagtttttgagatctattcttgatgtactttatctgtaatttgttgcttttacttggacatatatatgtgtatatatggatgtctgtctatatatatatgtataagtaaaaactttagaaattttagaaagaaagcttttagaaatagagctactatgatcactctcgaaccaggtagtctttctttgttcatatgctttcttttctcttaagaaagtattaaggagtggaattgctgagtcatagcaaaaaaaatgtatgtttaacattttaagtagcttctaaatcatttttcaaagtgattgtgtcatttcacactcccctcatcagtatatgagagttttcacttaatttccagcatttaagattgtcagtctttcattttaatcatcttcttttgatgcttctttttgtctctgttctctaattaatgaaaaacattgggatcacatcaagagatataaaaaaaattatgcctttccaaggattaacctttgtgaaatttcagtgtgtcttgttttctcactataaatcaacaggtctgctgcacgagagtcagaacatcactacaaaatgaaaaacctgcaccaggagagaagcgagaaggcactgctaagggacactcgatttactcaagatggaataagtacaaagttacgtagtcaggagaactagtacgaaaaaggaatcaggtctgtgtcagagtaaaaattgcatctagcaaatttaaacaggcaaaaaagagttattcaaggccaatgc

SEQ ID NO: 2456 - DNA, 1071 bp, Homo sapiens
aaactccgtctccaaaaaacaaaaaaaacaatataacacgaacatgctaaaatgttcacatttagggaacctgggtaaaggaatacaggagttctttaaattactttcctggcccttccacaagtctgaaattggaaattatttcaaaataaaattaaaaaaaaaaaggatccttgcaccagcttcgataattaaatgatcatcaagctctctaaacaagctaatgacactgggaaatgaaggactttgtggtgactgggaaaaggaaccccgattgtgtgttctcactacagggatgtcctcaacgttcttattctctttggctcttgctgtgggtcattggagacaatgtcctgaagaaagttctatttttctgccttttaaaaaacagaatacttaaagtaatttcacaaaaaaaatggccatctgtgaaaggtctatttccaatgtgctctgcctaaccactctggaatacatttcttgtgttaacattatagattaatttctccctctctaataaccatttaagtacagtgaatgattctggcttgcctatgaactaactattctgctccttggtgccaacggctagaactaaaaaaagaaaaatcaattaaccttatgctcctggtatttgtataaactgctactgattacaagcaggatgagtggaaatttgaaggctgttcttggccatttcattcacattaattctaaatcagaataaaaagctacaaaattcaaagtgacggtggatcagaatcctggagcttttatttttctggcaaagccgaaagtgctttccttccctcggtgagccttctggttgctgggccaagctgctggctgtaccctcctccccacagtgcctccacgctcacctgacgctgggaggtagggtggacatccactgctccttcagtcactgaagattaccctttccagaggcgacatctgttttaaacttaaaatttctccttacctagactcttctgaacattccggtttttttttttttttttttttgagacggagtttgaattcgatatcaagcttatcgataccgtcgac

SEQ ID NO: 2457 - DNA, 563 bp, Homo sapiens
ctacatagcgatagtatggtttgataatacagtttttctcctctagctgcctcctgttcttgaggtaatgctcagtgattaactagataggactagataatttatttcaccttggcaggtcttgcctccaagttggcctattcctatggtatttccttttctttcttttgcttcttcctgcacactaagtatggtattttctgacagtatttttcttaattctttatttatttttcttggtaatttcttgctgtagagctggtacccattagacataatgactttccttgacttgcttcttgctcataaatttctgtaagacaatcaggaagtttttagaaacaaacagtggaaccaattaggctgttaagtgagacacgcctaaattaagctatgaggaaataaatacagctccagcaaaaatagaaataattttcagattatccatgcttttgtttccctggttttcttcgaacctcatttcctcaagctatgaagtgaaatgaagtggtaagtacaccgctatgtaggaattcgatatcaagcttatcgataccgtcgac

SEQ ID NO: 2458 - DNA, 2930 bp, Homo sapiens
  misc_feature (1911)..(1911): n equals a,t,g, or c
  misc_feature (2687)..(2687): n equals a,t,g, or c
  misc_feature (2700)..(2700): n equals a,t,g, or c
  misc_feature (2775)..(2775): n equals a,t,g, or c
  misc_feature (2888)..(2888): n equals a,t,g, or c
  misc_feature (2897)..(2897): n equals a,t,g, or c
  misc_feature (2907)..(2907): n equals a,t,g, or c
  misc_feature (2917)..(2918): n equals a,t,g, or c
cggcacgaggtcactaataaccttttcaagtgattttggctattctctaatgaagatatggtccatttgtttttcttcctgcaatgtggtgtgcagagatgctgcatatcctttttatgggattgcgtgtgaatttgaaccatgagacattcctaataatttgttgtgagatataccaagcatggatgataagtgtgtttttagtggtgtgttgtttttttaaagaggtgattcaagtaccgttgctaagctgtcaacataccaagctgttgaaaaaattgaccatttctttcagaagtaattctcagcctgtggaataatagcaggtgaagacttcatagaaggcgacagattgatagggaggctattgaagcagtttttctgaagcctgcattttgagttagtttatagtgctaatagattctatataactgtgagagtttggtagtaaaccagtagggattgttttctctcctaaaaatttgcacactacttcattgtctaccaactttttacatattggaaaatagaaattgcaaatacatacatgtatggaaacatattcagattgggaaaaacaatggacattagtttttaaaaagttacgtggaagcaagatttctatatttgtttttttaaaggaagcagtcattctttctactaaatccatttcaagctagttctctgaaaattttgccatttatctacagaaatttgattataaatatgttcctttttcaaagaaactttattctagaacaaaatagtctatatggtacttgatctacatttaagtggaaaaattagcagtatttgaaagctcagtttatgtcattgtcttaacttcagatacaaataactgaacagaaagttttaacctttaatatctcatgttctgttttttattcagtattttcctttatgttaattcaattatatacttctgaatggcaccttactttttggaaacaaatcttctgttatttacaaaataataatttttaaaaaacatttaaaaaaatccaaagctgctctcgataatagtcaacatttgcatatatatggaatttcttactttttttctcccaaactctatttaataaacttattttaatgtttgtgtatttcatgtataattgtgatctcaattataaaagtttaattcagcatgtctttgagccaatataattactgcacacccactaaattgggatcagccattataaataatgtagttttagaataataaaacatgacacatatatatatatatatatatatatagtatatattggcacatcggtgaaagtttatatgtgcagaagtttttttctttctcaagttaaaaattattttttgccatatgtaattttgtgttgcaggctgtcgagagataaaaatgattttaaatctgtgtactgatgattctttcggtgttaagaaacacagggttgtgtacttccctttttatgggcttatggattctatttatattaagacctgtttataattgttttctgccaaagggaattgtctaacttcagatttctacattgggttcatacttactgttttatatcagaaataaaaaaatagcttctgctttttcatatgaaatcttggtacatcagaaagaattcctgaaaatttataatagaatgaattttattaatgcagaaaaataccccagggtgttaaaatatatgaagtgtgggatatattcttatagtttgtaaaatgtagtcaaccaatactgtcttctaatttggtaatttatttataaaattacttaaacattaggtaattatatttgttaggatttgaaattatttgtagttaaatgtcatgctgtttgaaataattgatactggtcttacgtaatacattttactgtatgttttgaagatggtnataatttcactttcaaaatttaaaaaatcaatttttaaatgttttaaaaacatatagcttagggatttttttaaaaaaggttttcttagtaaaaacataaatttaaaagcccctgagttctaggagagggcttattgaattgctataagaaagctggagttactttgataagtaataaattataaatagcactgatctataatgctttatttctatcggaaggtactttttcttctttcatcatcagttttagccagttagtaaatgggaatactcagttttagggatttgatttttgtttggtttaattttctttcaaaaattaaaagtatatttctaaaagttttccccagaggccagatacagtggctcatgcctataatcccagcactttgggagcctgagataggagtattgcttgaggctaggagtttgagaccaacctggcaacatggcaagaccctatctctacaaaaattttaaaacttagccaggtgtggtagtgcacctgtagtcccagctagtcagtaggctgaggtgggagtattgcttgaggctgcagtgaggtgtgatcacgccactgcactccggcctgacagaatgagatcctgtctcaaaaagaaaattccccagaagaagaattctaattttatcaagctgaattaaagtttgagagtcttttttttaaaatcttactgtgtcaaaagaggcattatgttgcttgtgtgatatagtgaatagtgtccctccaaatttcatgtacacctggaatgtcncaatgtgacttancagtacccacccctcacccccgcccttatctgtggtggatacatttgcaagatccccagtggatgcctgaaaccncagatagtactgaaccttatatatactgtttgttttcctatgcatacatatccctatgataaagtttatgaatttggcacttaacagcagaactaataagatgaaaaagttgnaacaatatnctctaataanagttatttannatgtaaaaaaaa

SEQ ID NO: 2459 - DNA, 932 bp, Homo sapiens
cgaagacttcgagtttgcactagacatgacgagggatgaatacaacgccctgcccgcctggaagcaggtgaacctgaagaaagcaaaaggcctgttctgagtggggagacgccagaggagcctcacggtcacgtccaacaacaccactgcaccagggaaatggatatatatttttggactggtgtttttcacaaagtatttttcaatcagagttttcagaacctgacattgttaaagatactgcttgtcccggagttgtgtattttgtaaatgttcaagggaactgtttggaaacttctttccaccatttcaggaggttatcagaattaataaaagtatctgttatgtgcacttaagccgcagctgctatagatagcactgccttcttgttccagctaggcaatgccttttttttttttttttgaagcagttctctttataaagtgttattttgatagtttgtggattctaaaatatatatatatttatataaacaccatataagtcaaatatgtatttaacaaagcaatatgtattcattcactttcaagatttgttttggtgtcaaaataacatgaaaaggtagatggagttgcttctgttgaattagctctgccaccaatatgtatcttcatacacgtttggaaatgtttcctgcagcattaggtatgacttgttctgagtactgcttccggtgctaaaatgaacaaagaatttgtacttaatggcatggactctggagaatctatgcgaatcaacctttctaccttaatatctccccaaaaatgtatagtgccttgtttttatgtacagtttatatacagaaaagtttgctctgcatttttgatgatggtttggaacattatctacaattttactctcaaatagtcaaaataaaaacatctcaatttctaaaaaaaaaaaaaaaaaaa

SEQ ID NO: 2460 - DNA, 2904 bp, Homo sapiens
  misc_feature (2899)..(2899): n equals a,t,g, or c
ggcgtcttgtgatagagaaatttcagaaagcaccttttgaagaaatagcagcacagtgtgaatccaaagcaaatttgcttcatgatagacttgcccaaatattggaactcaccatacgtcctcctcccagtccatcaggaacactgaccattacttctgggcatgcccaataccaatctgtcccagtctatgagatgaagtttccagatctgtgtgtgtactgatcggcgcatgaagacctcagcatatgatttgtaaagcctaaaaattaaggccaagctgagctttcagggtttacttaatgtgtattaacatacttcttgaaaataatgatggaacatatctttaaccaaatgtttggcataccatattagaagttttggagctatatataatttcgagtactttcaaagatagatttatgccatgttaatttgctttgaggttcctgttgcctttttaagttgaacatgttttggtttcactttattccactgttaagtagtatgttttaaacttttcacaaatgtaatgttttttaaaaagtaagccttcagaggattgaaactgtataaattgtttatctcttaaacatctacacagccgcttagatgtagaatttttgttgttgttttctgcaaaggcagatacatttaaatatattcctagtcctggggctgcaaaactgttcggtggctttttgtccccatgctttagataagctgggataggcaccttgctattcagttactataataatatgtgataggcattcctcatcttcttcacaataataggacatctgttgaatagcattcctcgaatataaccctaaaaacgccatactttaaattgtctggttcttgtaatattgtgtttcctgccaagagtttgaccattctgcttgagaagtgtagagcttactcttggagtaccaaactgtgcaatatttttacatcataagatgtattagtttacaggctgtgctttgaaattatagtagtattttgctgtggctccattaattaaatgagatatatatttagtgcagaaaaaagacatttaaaacagctattagttcacctgtgaagagtctgtacattttgatttctattaagagcacatttatttacatttgtatattattttaaatcctcatagtcaaaaaattctccagatggacttttaatttgtaagatttgaactgtgacttgtatacatctgtttagaatcaattatatttgaaaagctgcctgtgttttaacagtcaagtgtgctaaagtttgtcaatttaagctgcttttgatttcagctaccaagatcacaggtgcactctacacataacactgacagacccataacattacatacatcttagtgaattctatcacatggtaaaatgaacagctttctttgtaactcataaaattctcttaggacatttttataaagtcacctgtttatagttctatcttttcagattccatttctttttacataaaacagcatacatatcaaaaactgtagcctagaatacagtttaatttttggcttttgtttttgtttaaaaaattgcagtgaagaatgggatgtttgtgtttatggctatttgggcacctttagtagaaacagacaaaagtaaggaaacgataataggacaagcatacttgaaaatttctgaatacttaaacaaaagcgcaacatcttgaaaaccagtctagtcattgaaacctatgaaatgacactgaaagatcctgggctgcttcttaaataagtagatcagcaagacttgtttcagagtgacagtggagtcgttaccgctggaggactaaagggccctgtggcagctgtcactggaactttgcctcttgatcaggaaaaatgcttcaccagtccgtaaagccaagttgtatttttttwattgcccttttttccttctgtatttttaaagaaggatgttaatttttgactatatattttaaaaaaatctaagcagggggacatgcaaaaacaatcatcatccacttggatgtcattttatagattaacactgtgtgcttttgtatggaaaaaatatatataatttaatagtataaaaaataaaatatatattcatttgcacttacgtgaaacacaaactttgctctacaaaatttcgtgtttcttagtgattttaaaatgcatgtattgcatgtaaaggaaaaccattacaattaatgtttatcacacctttatcttggtctttgttgatttgggttttgttggggtttttgttactgtttttaaattacagtaggcttctatatatcctggatttctgaactggtcttgttgacaaggattcccaagaaatggatcttttcactggctgactctcccatatctgcaagagattctgcaggaactgggtgtgcacacggtgttgtagccagttcaggtactgaatatttaggatttggtgaagttcactgtattgctatatttttgtagataaataaaactcaataaattgttaatcattctctttttgctgtatagaattgcttatatcactctttctttcatgacattggttaacatttaaatgttcctcctgtacttgtgttgtctgtgaccgcttatagagttttattgttattggtgtttacctgaatacctatgcgtacacacacacatatttccttaatacttctgaactcattatcttttagaataataatactactacactttaccagcaattaacttctccctacccaaaatgtttttcttcctgtctgaaaatggaactaatttgtcttattcgtgcttatatctgtattaaatgcaataaagttagtttttgaaatgtaaaaaaaaaaaaaaaaaaaaaaaaaaaaaaaaaaaaaaaagggggggnccccc

SEQ ID NO: 2461 - DNA, 1959 bp, Homo sapiens
cggcacgaggtggaacataggcaggattttggattaatagagaaattttgataagaatggagacgctacgacagatgtaggaagtcatctacctttgatattagccatagaacttgaacactaactatatcctatgcatagtatgcagaacacttttctaagtttactttgagcctacttgcaagtggaagatatatatattctcacatggtttttacatttttctctatcgtgttagaagctctaataatgctagtggagcagttgacatccagggttttttttcctgcctgtcatacttgctaaacaagagcacagcgggcctgtcagatgaagtcaggagccatacgtgaccgctcgtagaacacagtaaccaaacacatacatggattttgccaagtgctgccagtagccaaaacaaagtctttttagggcaatagaggaaattattttgtgtctcaggtgtcagtcttaggaatggaagtttaataacaaatgggccaaactcgcaggacattccttctatgagcgcttcagaattttgctgtgaacagtcctcttggacacaggttggggtgcccttgtttgggtttgttttggtggaaaacatcacaaacctggcacaccatttgaatatccctaatatcattccagtcgctttcctcatcagttgcctttctatttcagttcattcacagatctcacttctgaatgtgccacttccagtagacatgctggtcaaagagcagtcatcattggggtgaagtgttcttgacagtttaatatgattcacttttctccaaagacatgtaaaaggctgttacgaaagcttggcttctgtcatggagacggaaatgggcaagcttccttccgtagcctcttgttaatccttaaacattaaatatttcgggggtaatagagccactggtgagtaaaaacctatataaaaaccaaaattataggattttttcttttttagtaaaaacctgtatcaaaaccaaaattataggatttttttcttttttagtaaaaacctatataaaaaccaaaattataggattttttcttttttagtaaaaacctatatgaaaaccaaaattataggatttttttcttttttagtaaaaacctgtataaaaaccaaaattataggttttttttctttttttttagagagagagattagaaaacgacattaggaatttcactttaaaatgcgcattacaaacttcttaggtgttccaggaattatcaagtgactttaaaatgacttttccaacctgctttgtttttaaaaattatattccagttttaatcattgtaaaaaaagcacctggagtttcaaaacatgtgaatactaccaagtttctgtccccaaagtcaggcatcactgctagtcttttgggacagatgggacagatgttcactttaatgttttacttgaagttttactgctctttgccatgtggtaaaaagaggctgagacatatttaagaattccaagaggatattatgtgtcagaatttcagacactgatgagaagtttttaattgttcttttttatttgattttggaattcaggtgcactctattcaagtgcaaggatatcagaagtttttttttatttaaaaaatttttttttcgagatggagtttcactcggttgcccaggctggagtgcaatggcagcttactgcaacctccacctcctggttcaagcgattctcctgcctcagcctcccaagtagctgggattacaggcacgcgccaccacacctggctaattctatttagtagaaatggagtctcaccatgttggtcaggctggtctcgaactcctgacctcaggtgatccacccaccttggcctcccagcgtgctgggattataggcatgagccaccaggccggccccaggattttatattaagccttcttgctctcaaaaaaaaaaaaaaaaaa

SEQ ID NO: 2462 - DNA, 1139 bp, Homo sapiens
ggcacgagcaggcatgagccaccacggcccgccaaaaggctttaacccatgaacaaatgttggatcctgacattttgtttaagagtgatttgttcaataattgaactgagttaacattcttggtaaaccaggtaattgaatgaagaaaggtcactaaagggagaaatgacatgttttctattttctttttcatgaaaacactgtttttccccctaataaagcatattttactttggtgcttatttttcctccttgcagtctaataaaaaaatctggacaatcaaaccttaaaatagctacactctgccctctgtaatgtagcattcataaaaatttggaagtatttacatcctctttcaagatgagcttatatgacacaattattatttgctgatacatgaaaatactgcactttaagtttctcaagactctgaaatatgtaaaattcaatatttttatattcccagaaattgtttcttacaggttgaaagtcttttaagggcatcacaaattaacatttactcctaatgcacgcctagaatgtattttaaatacttactaagaagaatgaaaattctttggttgttttatatataaataaggcatatataatgacactgtgttctgtgagggagcaggccctgtgagaatcaattcaggacagtatttttttttgtcctttctccatccttgatcagagataaactattaaaactttaaaaaatactcaaaaatatgtaagttttttggttgaacctttagatttgctcataatgtttaacataacaacatttatttcaaatcactgaattcatggagatgtggacacgcttggtttgctctatttttgtttatgtgtgatagtggttctgtcatcatcattcatgttttttaaggcctggtcataaaactttaaattttactagtgttacttaatgtatattctaaaaagagaatgcagtaactaatgccctaaatgtttgatctctgtttgtcattactttttcaaaattatttttttctgtaaagtataatatataaaacttcttgcttaaattgaatttctatattagtggttaattgcagtttattaaagggatcattatcagtaaaaaaaacaaaaaaaaaaaaaaaaaaaa

SEQ ID NO: 2463 - DNA, 2455 bp, Homo sapiens
  misc_feature (2454)..(2455): n equals a,t,g, or c
ggcacgagcttgaaagcatgaagaccagttatatagggaacaggtttctctcagtggcacattttgctttttctgagccccaaatacattgcctgggcatgaacattgttaccgtaaattgcacatggtcatggactgaattatgtgactttaaaggatgtaactgcccaacatttgcagattctgggtggtctatgtgaccatttgtctcgtatccaaaaaccccggggctattggaacccttccaacactttttcctttgtcatagacaagtttatatataacttaccaagatgttggctgtcctggtgtattgccagacagctctcttttggttcccattccaaatgtgctgctgtccttctttgcatttcacaatatcaaagaaaccaccacccttcttcctaacagcattttatgccttttattccacattaaatgggaattgtgcctacttaggagtgcccctccaattaattacatgtgtccaagaataatccaagctagagacacaaggtgggaaaacatttcaaaaaaaaaaagtcctcttaaggccagtaatttatctgaaaaggtattttatcacaccttgacaccttatatatgagcctattaggagctgcaggtggtttcatagggtaaaatccaagaaaagagaaggatgtgtggggtttctattagaagataattttgttctcattttaccttttcttttatgatccttctctgctagaacaggttaattctccaaatttgttttgttttgttttgttattttttagggaactcttttgcaaaagcaatggtcggatgtaaataacatttaaagtatagtgcacataacttccccggactgttccaatctgataatttgtaaatgctttagagtttttttaattaacacttgtgttgctaaattctatttatgtaagtctgctaaagttttttagcccacttaaaacttaagacaaccatttaaaataatggatgggttactatgagcaatttcgctttcagaacccccttgttttagtatatgaaaaagcctaatgcgcattaatgaggttgaagagactatgagaaatatgtatagtgtatattttaaaacagctttgcttgtattgtgaagatttaaaaacaaacttgagatttttaacgtaactattaacacagttttaacataagttatcccactgggtttaagagcatcttgaatgtataatcctttttgtaacccaggttggtttctacttttaccagtcacccaaacatatttatgtttttagttttatgtactcatttccctttgttttcctcaaacagcatgatttttttgcacatgtagaaattttttaaaagaaagaaattagtacatcattttctctggattttcttcacttccctcttcctttctactaactccttccttaaaggccatatcactccatttgcattatttgtgcaaatgccagggttggtttttatttttatttttgctatttacctaaaaaaagaaaatgcttcagtcaattgcttttttatttaaaaaaaaagaaaagaaaaaaagctgtaaccttatcatttctgagtagaccattgagcgatgaatgcacacctgtagtagcccaggaccagctgtggtggctaaagggaatatgttaattaagcaagaggttcttttctaaaagtggtatctgttatccacaatgtattttagttattcccacaagtcaggggtccagataaaatgagggttatcagctaactgatatgctatcattgaggttcatcaatgaatttgtacatttctagttccctttggtgaagggaaaaatgatgattttgcaagacctagattttggcttggtttcttgcctccttttttggcagccttcatcttctcatctcccaaaccccctgagcccgtagkttttcatagtggacaaagaacttgtggtcttttaaaactgggactgatacttttttgagagagtatcgtgtcgaaagtgtgatgttctaccactttaccaataactaattttaaatacacattgtcctctcgatttttggaccaaacagacgctcacagtggaggcttatcaagggttgcattggggaagaagcctctccctctctgtcagcaccagctggtaaaggtgactgtacagatgtgcattttccttttggtataaatggtccacagcactaactggtaaggcttattgtacagtatattgtcagtattcttctggttcagcataccttatagttcatatataacctgtattaattgtatagattgtgcattaaaagctgttaccaagttgtcagaacataagagcgaaaacaaggtcatatgtaatattttgtttgtaagtatcctttgtatcatagcaaaggaaatgtttaaaaaaatcaactgtaataaagtaattttagtacaaaaaaaaaaann

SEQ ID NO: 2464 - DNA, 772 bp, Homo sapiens
ggcacagcggagggtgcagtgagctgagatcgcaccactgcactccagcctggcggcagggcaagactctgtctcaaaaaaaaaaaagaaaaagaaaagtgtgctctttcatttccaagtatttaaaatactcctgttatcatgttgttatttttagtttcacatttggcctgagcacaagctcgtttaatttcaaaacatttatatttgttgaagtttgttttggggccataaacaaaaagcccataaacaacatgcttgtggagtattccgtaggtacttgtaaaaaggatgtatatyctggtgttgtttggtaaaatattctgtgtttatggatcctgttgattaatgatgttattcagactttctatattttcctcattttttgtctaatattttgctaaaagaaggatgttaaagtccccaacagtaattgtggaattttttatttcttctttcagttctatcactttttgcttcatatatttgaatgttctcttgtttggtgtatatgcatttatgattattatatcttcttcatgtattgtccctcttatcattatgaaactttcctctttgtccatgttcattttctgagctctgaagtatactttgtcttacactaatacaaggtataattgctgcatttttaaaagttaatgtttgcatggcttatctttgtccatttcttttattttcaacctgcctacatcattatatttgaagtaaattttatgtagacaacaaaaaaaaaaaaaaaaaaaaactcgag

SEQ ID NO: 2465 - DNA, 1481 bp, Homo sapiens
ggcacgaggtcaagggcagctttgctcatatttcccatgatttcatgtactgcattatttgagaagctgctcaacttgcaaaatcagttttcctctcaataaaattatagctctaatgtttgcatataagggaagtagttatcatgttagtaatacctctaatagtataaaccccaccccaaaattagccagtaatcctgtaggaaggtactgtatgatcaaatgtttaatcatataaatagaatgtaaatgtctcactgagcactgttttctagtgtatcaaaatgctcttatttcatcattcacttcactgtgctgttgttatgatgtgcttaacagggaacgtgattagtgaaaggaagataaacgtgggatgttactccaaaacttcgtttaatgaatgcttaaagaattcaaattttatctgcctctcttgtaatttggatctcttcttaatgtacatagtgctaacatgaagacctttttctgcactatatgcaaacagggtaactaactaaaacaaagccactttcaatcttcaatccttgaaggtatatctaggtttatgacagtaattgtgtttacattttatggtgcctagtattgacaaaatgttatttccctacattaaacatgactccatagaccttttcatttgtgggtttttatttcctatgatgtatactgccactaaccttccaaaaattacttagtattgcaaagtcaggaatcatcaggaacgtttagctgacaaaatacttgtctgttttaaaaacctgttcaagtctaccaacctgttcaagtctaccaattataagggcaaattggagaaaaagaaaaaatatatactcaagagtggtatcttgcagtatcggcactgtacaaaaaaatcttccaatttagttgttgtagagaaaacatgcagaacaaatgaagacaaaacatacattttgtaccaaccatccaattagcttatgttaactgacaagctccatttaaacagatgtccatcagatgacaagaaaggctgctgtactgaagtaaaacaaacaatacctgaatgctctgtagcctaaactccaaacatcctcttccatatggatccactggctggacaaactgcaccagttgctgcttcaatttatacctcaattttcactgtgtccaggtggtactttggctcgttggctagattaaccttctctgtccgagtgtgccacacgagaacctgaaggggaaggaaatagcttgggtagcgcactcttcatggtgacactcgaggtcgggcagcacaagtgtaatgaataccttagtgcagttatttgctttcggttccagttcttcgactgttgttatctgtttgagaaagtcagattcttgcatccctggctgggatccacgacgcttaaatacagcttttggattggacaaaatgacttgaagacttacagcaaatcctttgtgaaaaataaaaaaaaaaa

SEQ ID NO: 2466 - DNA, 1377 bp, Homo sapiens
ggaaattgtactttattttatataatgtcatgtaaaactttgcttaagatggtctggttttttttttgtttttgtttggttttttttttccatgaaaacaaatgactgttcctttttatttaatttgggaggcagggggaatcagaaggcccttctttataatgagctattcatattgcaggagtcagaatgaattgatacaggtgaatttttagttacaggctaaattgcataaaagctttgtcagcttccagcatcaggggagtcatttaatagcctttttccttatttgctagtatggttaaatgagaaaatagtaaaatagatacaaagtcatctatatagtgtgagaacgtgggtgactttttcaaagtttataatttaaaaagctccaaataactggctttttcaagagacttatactcatgctcttggctatactgtgaattactgaaatgttgaacaaacctgtgaaagacatacattagccctttaagatggccaggagctaagcttgagtctcctttactgaatttcgttcttagtgcaggttacttgtagattctagtcttcacaggctccctggggctcttaactagtcacactgggagtcatgaatgtctttccaataattcagggaattctagagatcctcaaactgtaaggtctattcatactcaacacaaggaaaaaacctcattaaaattaatgactaatcaggaggcaacgtaaccaaaagcacagtgaatgaaagttttcatggtaggttcaacatgggtttattgctagaaagatccaggggatagctttaggtttaacttcggctcaccaacgtaactttctaatcatttatttcagtaatagctagaagtgggtctgaatgttttcccagagtctgatacgtgtttttttttgccagaagagaggtcttcaggagacttcatttaaattctgattattaaactgaggctttaattgatgttaatgccttatgtcaaatgtaaagttagaatttgctagggctgggatagggagtgatatttctaggacttagacattgaaaactaattcagcctgtagtaacctggatggttttcaatggcatggttagtcaaattcatggttttaaacttagaagcagctttcgggggagagggtaggttggagcatttattacatattttactgtttaatgtcttaaccgtgggccttttaatttgtaaacactgaaatgattgttgggctgtggaaaacatttacctatttaccttggaagttttaaaagacagtccactttttagcatgtgtgttgtgtccagcctgtggtcgtcttaactaataaatgtgatttttctccccaaaaaaaaaaaaaaaaaa

SEQ ID NO: 2467 - DNA, 1173 bp, Homo sapiens
gaactagtggatcccccgggctgcaggaattcggcacgagccgatctgctccggccgtagtaatccgtgaagaggccgtcagggttgagcaggtagatggcaatggagtggtccacgatgtagtcctggtcctcatccttggggcctgcattgtagtacacgcggtaactgtgactagcctgggcaacctgtttggtggagccggtcagacccaacagtcttgggtggaagtcctggacgtagcgggccatggcttcaacgtcgtcccgctcggggtccacagtgatgaagacaggctgcactggaggcaaaccaggctctgcttccagctgccgcaccacctgcaccagcttctccagctcgtctgggcagatgtcagggcagtgagtgaagccaaagtacatcagcacccactggccccggaagtcagccttgcagcgagcccggcctctgtgatccagcaggtggaagtcgccctggcccacagctgcctggcgcagggcttctgttcgcttttgctgctgcagcctctccttctcagccctcagggccagccaggccccaccgagtccagccccgaacaggcctgtgatcagcagccgggttcgaagcccagggccctggggctggccctgcccacctgtctctgcagggccctgccttgacaaaagccaggacctcagatgcagggcctggcctcccagggtcccagggaggacccgaggcttgagctgagagagcctgtgccaagctgtggggctccgagtcagcagcagcatggatctgatgctcctggaaacaagcacaggcgtcaggagccagaagggaaggcccaggacagtgcctgggctgcccctgcgacttgagaccagccacccatctgaaggacccagcccacgttcaggcttaacaggcatttgcagctgctcacctgagctcagaactccacctccaccaaacatccacacctgggcaaccacacctgtcactcctgtcctctacctgggatcaccagcctgtcaccgcaccctgccctgcacctgcacctcagcaaggtgaacctcttgctgacggaaagcattccaagtgcatgccttgcctgaactaaccacgttatctatttgcaataaacccatttcttaaaaaaaaaaaaaaaaaaaaaaaaaaaaaaaa

SEQ ID NO: 2468 - DNA, 1098 bp, Homo sapiens
gcgagccccaggaggcccctgattccactgctgcaggaggctcagcctcgaagcggatggcgctggtgctggaacgggtgtgcagcactctcctgggcctggaggaacacctgaatgccctggaccgggctgctggtgacggcgactgtggcaccacccacagccgtgcggccagagcaatccaggagtggctgaaggagggcccaccccctgccagccctgcccagctgctctccaagttgtctgttctgctcctggagaagatgggaggctcatctggggcgctctatggcctgttcctgactgcggctgcacagcccctgaaggccaagaccagcctcccagcctggtctgctgccatggatgccggcctggaagccatgcagaagtatggcaaggctgctccaggggacaggactatgctggattctctgtgggcagcggggcaggagctccaagcctggaagagcccaggagctgatctgttacaagtcctgaccaaagcagtcaagagtgccgaagctgcagccgaggccaccaagaatatggaagctggagccggaagagccagttatatcagctcagcacggctggagcagccagaccccggggcggtggcagctgctgccatcctccgggccatcttggaggtcttgcagagctagggtgtgtgactgcctcccttggcctcagctcctctcactgctgtgctgaggtggcctttgtcacttccttctgccttccaaccctcaccttcccccggcctggccccattggcccaccctctaagttgagcaggaaatcctccaccaagcttccagaactacagacagcacccagagtgagctggagtgggtccccatgcctctccagcatgccctttccctttgcaggagggtggagtccctgggtcatgccctcccctgccagctctgggcttcagagataaggcattttccttgtgcagcctttacctggcaatcctaatttggttttaagactccctgtgaaatgctttccgaaccttaaccccagtgagcgtgaaaaagaaagttaataaactataatacatggaagcaaaaaaaaaaaaaaaaaaaa

SEQ ID NO: 2469 - DNA, 692 bp, Homo sapiens
tgcaggaattcggcacgagtgagcttcacggggctgagtgatgagctgctgcacctcctgctgcccagcctgtgggcgctgccccgcctcacccagctcctgctcaacggcaaccgactgacgcgggccactgcccgcaagctcactgatgccatcaaggacaccaccaagttccctgctttggcttgggtggacctgggcaacaacgtggatgtggcttccctgccccagcccctgctggtcggcctgcgccggcggctgagccagcgcacctcactccccaccatctacgagggcctggaccttgagcctgagggcagtgcggccggggccaccacccctgcctccacctgggactccacagctgctgggctgggacccgagccccaggcctgctgtgccaggtgacccaccacccacctggctcattgctactgacttgtgatgctctcaagcacatgatagtgggcgatgaaggtcaaggaggactcacaggcccccagaaatccagtgtaaatgctcagcctgagattaaggggacagaagaatggactcataggtggccaggtggccagccctggctagaggctcagccttccctcagtgggaggggccccagcacccacagtgtggaccccgcaataaagagtgacacccgcctctgcttttctgcaaaaaaaaaaaaaaaaaac

SEQ ID NO: 2470 - DNA, 658 bp, Homo sapiens
tcccttgcttgatgcaacactgttccaaaagagggtggagagtcctgcatcatagccaccaaatagtgaggaccggggctgaggccacacagataggggcctgatggaggagaggatagaagttgaatgtcctgatggccatgagcagttgagtggcacagcctggcaccaggagcaggtccttgtaatggagttagtgtccagtcagctgagctccaccctgatgccagtggtgagtgttcatcggcctgttaccgttagtacctgtgttccctcaccaggccatcctgtcaaacgagcccattttctccaaagtggaatctgaccaagcatgagagagatctgtctatgggaccagtggcttggattctgccacacccataaatccttgtgtgttaacttctagctgcctggggctggccctgctcagacaaatctgctccctgggcatctttggccaggcttctgccctctgcagctgggacccctcacttgcctgccatgctctgctcggcttcagtctccaggagacagtggtcacctctccctgccaatactttttttaatttgcattttttttcatttggggccaaaagtccagtgaaattgtaagcttcaaaaaaaaaaaaaaaaaaaaaaaaaaaaaaaaaaaaaaaaa

SEQ ID NO: 2471 - DNA, 1134 bp, Homo sapiens
ggcacgagtttttttatggaaactgtgtgtatgtatacatacattttccaaaaagaaaaattaaatgattatagagattatgtttttcagactactcacgtatctgcttttcttactccccacctctgctgataattcctagttcattggtttttcccccacactggaattacctggggagcttaaaaaaccctgatgcctgggtcccaccctcagagatgattgaaccagcctggccagcatggcaaaaccctgtctctactatgatatgaatgcagcctggggcactggggaaatttaaaaactccccagataattctgtgcagccaaggttgagacctcctagttctagagctttgctatacacagggtggtccacaagccaggagcatcagcatcacttggcagcgccttagagattcagaccccagacccactgaattctgaccctgcattttcactagaccccaggtgatcagctgcactagactcaacctcttaaaccaagaccctcccaccctcacagtctatgatcctttagtgaccctcagctgagtcctgtgctgaactgtgtttggttctccttgagcacatgcccgctgaccagggacagactggatgagcaagcaacctgctggctatggagaagagccaggctgggtaaatgtttgctgtgactaagccaggatcaaagaactgcctgttgcttgcactggctggcactgagcttgccactctgtgaactgtgcttccttcccctgcatggacctgtgcctcagtcactattatccgcaggccttctccaagggcagccctctccttgtttatccctcttaagcctgcgtgcaggaaggcacattaaccctgtggccccctgcaggcaggagggtgttgggtgcccttacctaccttgccctttttcttgtaccgtaggctgtgccgtttatgagtaagtgatgtgtgtctgtgtgtgtgtctagaagtgctgcactcaccttgtgttattggaggttgtgtaaccccctagctttgagcctggtctcagatgttccttttccgttctctgtccagccgttaccgcccccagtctgtaataaaagcctatcagccgtgcaaaaaaaaaaaaaaaaaaaa

SEQ ID NO: 2472 - DNA, 1175 bp, Homo sapiens
ggcacgaggacgagcctgcccacaactattccagttccatttggcacagccaggggcagggacagaagggccctgcaggactccgcctccccacctctgcacagatcctctctcctttcccctaatactcccatcatcctccttttagcttcttagaggaatcagcagctcagcttagcttagatttagctgatcaatcccaaagaaggatgtggctcatcctcttggccatccctggagtcgcagcacacgcttggctggtgtgggtccacagaggttctcatgggtgggcccagcagaggggcccctcaggagagggattctagggagctagactgagacaagcctggccctgactgtcgcctcctgccttctggtcctggccatcctgcccctttctctctccagagcttgggaggagtcagaacattgctctagccgctggtgatctctcctggttgccaaccctcctggccatgactgatctccccactgagatgctcaggtgattaaacgagagcccagttgtggcccgtgacactgtcactggcaagggtaggggtggggacaggggcaggaaaataagttctgagcagcccggaaataatgagtggtgactgcttctcggggctttgcctgccacagcaccactgtgctctcctggtcatggtgcacggagggccagcaggtgtggggccctgccacaccggaacagcaggccacagcagccatgctgtccctcatacgcacacgccctctatgggctgcagagtgttaccatagcatctcgtaagcctcacttcccaccggtagtaggatattgtcactcatttaacaggtttgaaagccaagctgcccagggaagggacttctcaaaggtcgcgagtccagtgagtggcagaagggggatgtaaagcccagcccctctgatggagtgtccagcgctcgtcccgtgccctccacgcccctgtgtacccagctacttgtttattcatttggtttatacgtttggtcgttcattcatttggtcagtgcacattcttttatggccacacacctgctagggcagtgaataaacggatatggaggcaaatccactggaaaaaaaaaaaaaaaaaaaaaaaaaaaaaaaaaaaaaaaaaaaaaaaaaaaaaaaaaaaaaaaaaaaaaaaaaa

SEQ ID NO: 2473 - DNA, 553 bp, Homo sapiens
ggcacgagcggatctggtggtcatcgagggcatgggccgtgctgtccacacaaactaccacgcagccctgcgctgcgagagcctcaagctggccgtcatcaagaacgcgtggctggccgagcggctgggcggccggctcttcagcgtcatcttcaagtacgaggtcccagccgagtgaggcgctgcagctgccggactcttctgcttgtcacttgtcaggaatgtgtttttaccaccacagggaaactgcgttcaaatcaacgtatttatatggtactgctgtgacgcggcacatacaccccagccgcacagatgcgtgtgacccagaggcgagacgcagctttgtcctgggagacgttcatattggaatctatttaactgctaaagaaccttttatatatatatatatataaatagagagatctatacaggtatgtctgacgggacgcagcaccgtgggcacgcaccaaatagagtttttaaaagagaaaaaaaaaaaaaaaaaaaaaaaaaaaaaaaaaaaaaaaaaaaaaaaaaaaaaaaaaaaaaaaaa

SEQ ID NO: 2474 - DNA, 1463 bp, Homo sapiens
gggggagcccgcggctgctgggagctgcggcgctggccctggggggagccctggggctgtaccacacggcgcggtggcacctgcgcgcccaggacctccacgcagagcgctcagccgcgcagctctccctgtccagccgcctgcagctgaccctgtaccagtacaagacgtgtcccttctgcagcaaggtccgagccttcctcgacttccatgccctgccctaccaggtggtggaggtgaaccctgtgcgcagggctgagatcaagttctcctcctacagaaaggtgcccatcctggtggcccaggaaggagaaagctcgcaacaactaaatgactcctctgtcatcatcagcgccctcaagacctacctggtgtcggggcagcccctggaagagatcatcacctactacccagccatgaaggctgtgaacgagcagggcaaggaggtgaccgagttcggcaataagtactggctcatgctcaacgagaaggaggcccagcaagtgtatggtgggaaggaggccaggacggaggagatgaagtggcggcagtgggcggacgactggctggtgcacctgatctcccccaatgtgtaccgcacgcccaccgaggctctggcgtcctttgactacattgtccgcgagggcaagttcggagccgtggagggtgccgtggccaagtacatgggtgcagcggccatgtacctcatcagcaagcgactcaagagcaggcaccgcctccaggacaacgtgcgcgaggacctctatgaggctgctgacaagtgggtggctgctgtgggcaaggaccggcccttcatggggggccagaagccgaatctcgctgatttggcggtgtatggcgtgctgcgtgtgatggaggggctggatgcattcgatgacctgatgcagcacacgcacatccagccctggtacctgcggktggagagggccatcaccgaggcctccccagcgcactgaatgtccccgcgcagagcagagggaaggcagcggaagacgccagctgccagggcctggggccactgggccagcgcctggcgatactggttgggggcaggatcattctgccccttgtccacgcacccccaccagccctctcgcttctaacacagggcacctgctggggctcagggatgttagggacgagttccagccctgccactgccctggggcgacccctccctgtccctgcctccctgctctgccgcccctcttcctggaccctcagtggctgtcccatggctacatcctgtgggtgggggccctcgacaggacagcaggacggtttgttttcagtggaatcccatccctgggttcccctggttcccactcttcccaagcctcccgggactgggacatgtttgcaataaaggaaaggtttgtggcgcctgtcatggcaggcatctcatggaaaaaaaaaaaaaaaaaaaaaaaaaaaaaaaaaaa

SEQ ID NO: 2475 - DNA, 475 bp, Homo sapiens
ggcacgagctgacgcagcctatcgtggtcaccgtgccgcggccgccccccaggccgcccaagagtgtccccggccgtgcagtgcgccctgagcctcccgcgccggcccccgcggccctggaacccgcgccggtggtggcgctggtgttggcagccttcgtgctgggcgccgcgctggccgccgggctgggtctcgtctgtgcgcactcagcgccccacgcccctggcccgcccgcgagagcctcgcccagcggtccccagcccaggaggtcccagtgaggaagggatggtgcgcccccaacatggtccggagatacacccagctaccaattcgggaccaggaccaacaggaccggacccgcctccctggacctcggacctgatgaggccacgacccctgcgcttctctcctccccctgtccctcccacctgtgctcaaaataaacctctggactgacaaaaaaaaaaaaaaaaaa

SEQ ID NO: 2476 - DNA, 636 bp, Homo sapiens
  misc_feature (622)..(622): n equals a,t,g, or c
ggacgctggcactgagggcctgctgcttctgcagagactcaagaacaggctcctcccacccgcgtctccctagtccctggaggcctccccaggaccaccctcgccgacagcaaggcaggcggctgagcagcggcctggagcagcagagccaggctttgtagcgaggccaggtcttcggccgcatccggtacggagagtgcagatgcaggaaggcccggcctgccgctatttatagtgcagccagtcygctaaaaatacactgggcctgggcactgcccgccgggacatggcagcctggacgtggggctggggctgtgggcgctgctggcggggttgactcttccagtgagggcagaaccaggctggcaggaggggaggacggtgtacctgctgctcagagcccccaaggctctcctctgagagccaccaagcaggacagagcagctcttgtcccaggtccctcgggctgagcgccgtgtcaccaggagaatagtgctcacagcccaggcagggtgtgtggctcctggatgggctcgtggggcgggatgggacagggcacgggctctcagaaaataaactgctttattggaawwaaaaaaaaaaaaaaaaaaattactgcggnccgcaagggaattc

SEQ ID NO: 2477 - DNA, 520 bp, Homo sapiens
ggcacgagcggagtttgagccccggaggcagagcggctgccatggccaagtacctggcccagatcattgtgatgggcgtgcaggtggtgggcagggcctttgcacgggccttgcggcaggagtttgcagccagccgggccgcagctgatgcccgaggacgcgctggacaccggtctgcagccgcttccaacctctccggcctcagcctccaggaggcacagcagattctcaacgtgtccaagctgagccctgaggaggtccagaagaactatgaacacttatttaaggtgaatgataaatccgtgggtggctccttctacctgcagtcaaaggtggtccgcgcaaaggagcgcctggatgaggaactcaaaatccaggcccaggaggacagagaaaaagggcagatgccccatacgtgactgctcggctccccccgcccaccccgccgcctctaatttatagcttggtaataaatttcttttctgcaaaaaaaaaaaaaaaaaaaaaaaaaaaaaaaaaa

SEQ ID NO: 2478 - DNA, 1506 bp, Homo sapiens
  misc_feature (1359)..(1359): n equals a,t,g, or c
  misc_feature (1410)..(1410): n equals a,t,g, or c
  misc_feature (1446)..(1446): n equals a,t,g, or c
gtaaagaaagtggcaactaaatacatctctttctgtgtgaaaaaaggagagatcttaggactattgggtccaaatggtgctggcaaaagcacaattattaatattctggttggtgatattgaaccaacttcaggccaggtatttttaggagattattcttcagagacaagtgaagatgatgattcactgaagtgtatgggttactgtcctcagataaaccctttgtggccagatactacattgcaggaacattttgaaatttatggagctgtcaaaggaatgagtgcaagtgacatgaaagaagtcataagtcgaataacacatgcacttgatttaaaagaacatcttcagaagactgtaaagaaactacctgcaggaatcaaacgaaagttgtgttttgctctaagtatgctagggaatcctcagattactttgctagatgaaccatctacaggtatggatcccaaagccaaacagcacatgtgatgtatcggaacagtacaacatctaaagagtaaatttggaaaaggctactttttggaaattaaattgaaggactggatagaaaacctagaagtagaccgccttcaaagagaaattcagtatattttcccaaatgcaagccgtcaggaaagtttttcttctattttggcttataaaattcctaaggaagatgttcagtccctttcacaatctttttttaagctggaagaagctaaacatgcttttgccattgaagaatatagcttttctcaagcaacattggaacaggtttttgtagaactcactaaagaacaagaggaggaagataatagttgtggaactttaaacagcacactttggtgggaacgaacacaagaagatagagtagtattttgaatttgtattgttcggtctgcttactgggacttctttctttttcacttaattttaactttggtttaaaaagttttttattggaatggtaactggagaaccaagaacgcacttgaaatttttctaagctccttaattgaaatgctgtggttgtgtgttttgcttttctttaaataaaacgtatgtataattaagtgaagctgcatgtttgtattgaagtatattgaactatatagtttgtatgtcatctttttcaccattcagaaacagtgcttctgaatttgtgatttaaaggaattgtaatagaatagttttatttttaagttatctttaagtttatgccatcttcttaaataagtacgtaatgttccaatctaaataaaaaactaatwcataactaatgcatagaaaagatacataaagcaatgtgaaagtttcttgcttctcctttttaatttctaaaaaagccactttgaatggaanttgtcatccgtaaaagctgaagtgtaagcactaggaaatctcaatataganatttgaagaaagttatatccactaaggtggcagtcnttgatcataataagtgaaatgagccctgttctagtacatgaatttaagcttaggtattag

SEQ ID NO: 2479 - DNA, 906 bp, Homo sapiens
ggcacgaggggattacaggcgtgagcactgcacccagcccaaatgagatgtttctaaatctaaagtttcttctgcttctgcatttctgtgaatctcatttgaaatttttcagggaagggattttatcatttgttcagagatgtctttatttttattaatacccataaaacgtttgtgtatttgcttcttcctctttctccttttgatcacattttagctacttatctagaggatctctggccaagtattcccttttattgtattgataacaattcttaatggctggcctctcttgtgtacaatgagccaatattcttttttgttctatatttttgtatcttcccctttcctgaacaaagcatatttagagtctcaaagaaatcctctccacaaagacatgttcctccctctggtgtgggtagacatagggtaagagtttggatgaaacttttgtaaattgtagtgttcttggcataaatatgaattaaatctttttttatatttaaataactagttaaatatgtgcttcttactaagattaggtattttttgccaagataacaatgataaaaacattttgggggggaaattgaccttaaaattttgggataattcaagaaatgtctgcagaaaattgatttatgatcttaatttttgtgttagtcctttgaggtttttttgtttttgtttttgttttttgtaaagcgccttatctgttttggacaagtccaaagtaaatggttgggctcttatatctgttttacccttatttttcccattaagtaatggtttaagaatatatcaagcaccttaatttgttgttaagtagctagtgcttacaggattccattaaattcactttaataagcctaaaaaaaaaaaaaaaaaaaaaaaaaaaaaaaaaaa

SEQ ID NO: 2480 - DNA, 774 bp, Homo sapiens
ggcacgagaggaaactgaagctgagagagggttaagtaaattacccaaagtacagctaataagacccagaatctcagtctcactccttgggatcctgtgtatttccctgagtcttctaacatatgaaaattcatatctaaatcaacaagtgactgtaatctggtactataaatactaaataaacacttcttcataacactgtaccaattcagcttttaaattttattactttgctttcctgtcctttgccaactcttaacctagttaacctagttctgttgacattggaccaggctcagtaaataaacgaatggatttccagcctttttttcccatctgttcctgcttttagtcctctgaatctgcttcttttcttactgctgctttattttacagtgattttgtcaaacatagaatacaggactaaaaatgcaaagaaattgggtctgtgtttaattttgatgtttcaaattttgagcttccaagtctttgtggccacccaatgaagtttgagtctgcctgttcagatgtgaaaggtaagggctgcagcaggtttaagggtggcccttcaccaccctgttgtcacctgcacaggcactcccccatttgcagatgaagaaatgttcagagaagaaaaatgatggaccaaacgtctgtttgcacaattgaaactctaccagtggactattctattttcacagctacctagtttctgccgatgatttttttaaatgtgaaataaacagtgatactttcaaaaaaaaaaaaaaaaaa

SEQ ID NO: 2481 - DNA, 1236 bp, Homo sapiens
gcttgcagggaattcggcacgagtgtgagggagcaagagagaggggtgtgggagagaaaagttggaaaggagggagagagggagtgggagatgagtacaccatctgttttgctattttattcatctttccttcttatattcatcctttgggatgaaagactggggagtattgagaagaatattaaccatcaatttgtaacatacccttgatgcgttgaaagaataagccgctgctaccatagtgttatattggattgacaactatttattgacatttgctgtaccatttaggggataagcagagaagtatttgagaagaaagtattttgtaaaaactgataagaaatcttagtttgattccagtcattaacacttgagtccttaggcagagttaagataatgattataatactttagtcctcttcttgggatcaactgggcagggaaacattcttttaaaatgggagatgtgttgccaaggtactttgttacaaagttttgttgaaaaattttacaatgtaggaaaagtggtatatttttaattgtggaatttacaagacacagaactatggttatgtgtttctttgacttctgaagagtttctcaagttaataataattagacttgagaatgtaaacttcacattttacaagctaagctttagagatcaaagaatgatttaggtgaattacttgatatatccgtgttgacaacccatgaccatttatgcctatgtaagtataaatctgtgccacccaagtaaaatattataaattttatggtctattttagtcagagatttatgggtatgtttgtgtctgagttgttttctgagcataatacattgatatatcgtgagtttcctaacacatattaagttgactcacaatgtgttgttggtctgcagaactcatacatattttatatgagatgataccatcagtagacagtcttcgctctcttcatcctctatctataaattgttattaacaagaaaaattaagtttctccttttgtggccctaatatagttcaggcttaaaatcaacagcaaccatcctatatatttcttttaaatgaggaaactagagattgtacacattttatccacagagatcaaaaaaggttctgcttgctattaaccctaatggctttcagggaggaagcagcactctagcaagggaattagtattttaaaagtttctgttggggcaaaaaaaaaaaaaaaaamctcgag

SEQ ID NO: 2482 - DNA, 2071 bp, Homo sapiens
gctatagaaatgttttggtttcttttcctcctcctccttctccagaactggctttattaacagcaagaattcaagcagtctccctggtctctcatgcagttcaatccccgacagcctttcctgtaaatgccacctgctgtcacatgctccatccgggcctttgttgtcaggctcacttctttctacatcttcctccattgacttcagcagctccttcatgcatgccacagttttttctgaagtctttggatgcattttcttaatgacaacatcaaagttcctgcttctctctgtgttaccaaatactttgttggagttgttgatctgacttgggactttgtaacattcactgaggcagacatgtattttagccatagttcaaatcctcctctctgggagctggccttgcacctctggaaaagaaccacatgttttgatcacagtggcttccaccaagagctggggaccactgacaaatggctggcccttcccccccaattctaaaggcctctgccagagctccagaagccgggcggagcctgccaacaaccattatcagcctgtccgagtagaccctatcttcttatttgaagaaaaaccccactttctttagaaaagttagatatgtgaagatgctggtctacagggtccttttgaaaacatctaacatcttctatgggacgtttccacagttcaccacctgaaacacttggaccacacatgtttgcacatcctggactttctgtctgatacatctaggactgaacaatgggttctcccagaagttccagagggaattcctacaattctcgcttcaagatggcgctccagctgcatcacctgcaggcctgggctaggatatgtcttgactctccttatgacactgtcttggtggctcacttgggtgagtgtggggccaatccaagggaagttgcggggaagctcaaaaaggtaactcagattttcttgggagaagagagattctgagcagattggaacgtaccatcaacagtgccttcttcctcctgagctgatatctgaatgagtccctattcacaggaagaccctggcccaccttgatgtcccactcaactgtaatccattggtcctttttgggcaatgactgagtcctctcctgaccaaggaaaggaatgcatctcaagcctctccccatcaggccttcattagccccatcccctacacccactgactctgctcccactcccgccactgtatcgcccagcgttgcttcctgcaggaaaccctgctgaggagtctagtggaggcagagatgccctgtgttgaacactccaccatgcattatgtcattttctccacacaacagccctgagaggaaggaagtgttattcccattttatagaagagaaaactgatgctcaaacaggttaaataatttctcaactattgactgaagagcatgggatacaagttctaggccattgtcggcaaagtctgtatgcttcacagcttggctgtgggatgtgctcctctgccttcaggagccaacccatcaccttggccaaccctttgaccagtgcaaacactgcatctttgtcagcctcctctgctagcacagccacccggccacctctataaccaatgccaacagctcttgcaagagcaggaaagactctccttagaccagagtgtcccatcctcagcactattggcattttgaacctgataactctttgtggtgatgaggtgttgtcctgtgcagtataggatgtttaacagcatccctagcctctagttgttctctggttgagaacaactgccctagggtactcatcctgtcagctctctctgcttttgagccaaagttcctgagaaagaaaggtctctgatgcaaagcctgtccccactatagcactttgaaacactactcttgctgggacaggcacctaaccaggctccctctcaccatctgtcttagtccagtccagctgctataaccaaatccatgctggatagaagatacatgacagaaatttatttgcacacaattccggagcctggatgtacaagatcagggtgtcaggatgctcga

SEQ ID NO: 2483 - DNA, 1467 bp, Homo sapiens
gccagtttttgtctcagmatccagatactatctaaatatgtttgtcaacctttggtttccttcctatggttgatattaagcctttcttctactcttagaagacaaaatggggagacaaaaaaggcaaccctgaaggtttttatcctttcagggtatctagcatttttctaatttagccctactgaagtttcttcagtaattaatcatctgtttttcarcctctaacctggctaatattatagcctacaattgtacttttaaagcccttttgtgactttgacatattgtgtctattgtgtatggaaaagtagcaggatcagtatgaagataatacagtatctcttaaaacaggcagccagcaaatgaactttctgcattggtcagaatttccatcatttcactgttaatgaggaaagtacagttctttagctaccatgaaagtcaaacatatcctaagccttttggaaaaagacatacatgttagaaaatctcaaatggatgagtcagcctgactgaccccacattgactccattttatatgctggccaaatcctgtttctgactttcctggcacagccctggacatgcttctgtatcataggacttgttccccagcgcctttgctacttccttcaggcacattcctaggaaagattggcagtggggtttgctctttgccagcactcctgccggtttgggggttatggatgccaggttgggctccaggcactctgctctccatttgtggaggcagggacggtaacagcacctgacaagtagggatgatcacattgtattcagaagcctggtggagctctataaacccaaatttctaacagtctccaatgtaatgccctgtaatagaagctgtccttaaccctcaatcatctgkattcagctagtataaaaatgcaaatctgctcttatgcctaaacagttaggartagaggagacttggcttcctttggaaagtcaggatgatagcttyatcccattctggkttttgkgawtaawtgtgacctacaaaggggtttactactctagcaggaactttgaatttcctatatacatctctttctggttagcaggcagaggaaatatcgttgacttttggcttcctggcaaatgtctcatttgccttgtcatttgttgattccttttccctgatctctgtttggtgtgataatgtacagcaaagctgaaaaccgcagggctacatgtacacttgtaggtacctatgttgtgattgccaaaaggctcagaaagccagttttctagtgaaaatggctaacattctaagaaatgctttcactgagaaagagaacgggtcaggggaaggtggaacttaaaggaagatggagtgttcctgaattcagattcctgaattagccatttatagtttcatgggaagacaatgaaaaaaaaaaaaaaaaaaaaaaaaaaaaaaaaaaaaaaaaaaaactcgag

SEQ ID NO: 2484 - DNA, 1201 bp, Homo sapiens
ggcacgagagactacaggtagatttgctgaatttcatgggcaacactaggttttcattttaccttattgttctgccatttagatgtctcctcttaaaacatttttacttgcagtgatggcttccttagactcgtgtgtgattgttgctggggcagttaggtggaactaataggtgttgcttgttgattccctgctaccaagtactagttttgaaatttgagtattcattaaaaacaaatagggatttctgtgtctcactcctggaaattctgactcagtgggggtaaggattaggaatgtttaatttttgaaagccctgcaggtaattttttttctactttttaaaaattataatttttattttctttactgttcttttaagacatcctgttatagcatctgcaggtgattttgatgcccagccatgtttggggaaaaaagtttgggttctgagtgaaaatagaaaacgtaatgacatggaaaggaagtcaggggataagaaaagctctatggccagccatggtggctcacacctgtaatcccagcactttgggaggctgagatgggcagatggcttgggctcacgagtttgagaccagcctaggcaacatggcaaaaccatgtcctattcaggaacaaagaatagatcacaaattaaactctgtgggttttcataagtggaaagttggctttcgttgttctggtatttgggtgctttagtggacaggagttatctaaaagaagtaattatagttgtaatgcggaccctcaaagttgaaagtagattgaaatccattattttacaaggtggccttactatttatagtttgactgtaggtatggcagtgagagataaaattactttttctagctttgcaaaacgccaaacgtctttgaaattaagagtaaaaggggtttaaaatatgtactgctttataaagcaggaaaaccccactggaacattttgggtgtttacagaaatgggtattccatgggagagaacgtggtaacctatgttttgtcatcatttgtttaatcactgaaaatatattaacaggccaggcatggtagctcatgcctgtaatcccagcgctttggcaggctgaggtgggaggattgcttgagcccaggagtttgagatcagcttgggaaacacagtgagactccatttctacaaaaaaagaaaaaaaaaaaaaaaaaa

SEQ ID NO: 2485 - DNA, 617 bp, Homo sapiens
  misc_feature (1)..(1): n equals a,t,g, or c
  misc_feature (9)..(9): n equals a,t,g, or c
  misc_feature (29)..(29): n equals a,t,g, or c
  misc_feature (39)..(39): n equals a,t,g, or c
  misc_feature (41)..(41): n equals a,t,g, or c
  misc_feature (154)..(154): n equals a,t,g, or c
ncccccatncctggctaatttttgtaganagggggtccncnctttgttccccagactgggagatttttctgtacttggctgtatgctttccattgatctgctgctgttttcactattattccttcttttgtgtgggtattttcttttgattttnagaattttacttgtaaacatgctacatatacatataatttggtgccctgtttttccatttacatattatactttccatattagtacattgtctgatatttctgcataatactcaattcaacttacctgctattgtttttatcatatctctattacaaacattaggcccatttcccttttttaaaagaggaaagtttgaggttatgggcggtgttctgataaaataaataatattttgtcatgtttgttttttcattgattaggaaacattgttttgaatttaatgcctcaaatttggtgcacaataatttgaagggaaaaactgacaagtttgaaatgaacattgatattacataatttacattaaaatgatacatcttttgtaaatttgtaagaagaataaataaatgaaaacctgattacctttcaaaaaaaaaaaaaaaaaaaaaaaaaaaaaactcgag

SEQ ID NO: 2486 - DNA, 637 bp, Homo sapiens
aacctctgcctcccaggttcaagtgattctcgtgtctgagccacccgagcagctgggattgcaggcatgtgccaccacgcccggctaatttttttgtatttcctttttagtagagacatggttttgccatgttggccggggtgctcttgaactcctggcctcaagtgatccacccacttcgggctcccaaagtgctgggattacaggtgtgagccactatgcctggccaaaagtaaccattttgtttaattttttctttttcttttaattttaagttccaggatccatgtgcaggatatgcaggtttgttacatagggaaacgtgtgcctcggtggtttgctgcacctatcaacacatcacctcggtattaagtccagcatgtattagctatttttcctcatgttctcccaccccccgccacagcccctgytaaattaatttcttattctccttaatattccatacacattcagattccttctcccctacaaaaatatttgctattttgtccttgctatttctcatacttagatcattcatacactatatttattttttcattaaactattttaaaacctttggaaaaaaaaaaaaaaaaaaaaaaaaaaaaaaaaaaaaaaaaaaaaaaaactcga

SEQ ID NO: 2487 - DNA, 1610 bp, Homo sapiens
ggcacgagtcaaaacaagtatggattttgaatgtgaatattttaaaagatatattgaaattacttagagtagccctggatatatgttcattatggcatttatcttgttaataagtttctacatgctcattttaatttccagtagcatgagcaagtaacttatatttcattcccgagaaactaaaagaatctgcctaaagagtatgaaaattgccattaaatctgtattgtctactttctggatggttatatcattatagttctctgctcttccacacatttttgggctgctatcagtttgtaagtaatcattatacaaactaaatttaaaaatttaaacaagataattttatattacttggatcagggaaaaaatgcagttgctgaaggtggtttcatagctaaatataagcaattattttgctttttctacttttttggattttatcatcttttcccttttagtaatagagtaatacaggtaggaattaacttagcactgccaaattaatagtaatattagaactgtgtacacagcacagggttaaggttatatagaaaaatgtctcatccatgtttaatttggctgaccagcccagttgattagccaattttattgttttgttaaattaaaattctaaatatagttgtccattgttaaaataagtgagtagggttaaaatagagaattgataaaaataaagccttaaaaatcttttagctaaagtagcaggcttcaagtgaaattcagttttggtctcctttacaggaatagctattcagtcagacagaaccacttatcacgttttgcagtatctcctgaggaagtcagaattctgagccagcatgaagacggaatcttgtctttgatctgatttgcaaaccgtacttttattctaatcatgtgcaaggtggaggttatagcgtgggaactaaaatcttagtaagtgtggtttttattttagctattaagtagtatactttcttatagtgatttttttttcttcttagcagagttcacactataaatagtgtatggacttggcaggcaggaacataatacagtatacttcaaaagtgaaagatttaggccaggcgtggtggttcatgcctgtaatcctagcactttgggaggtcgaggtgggtggatcacgaggtcaggagttcatcaagagaagcccggccaagatgctgaagccctatctctactaaaggtacaaaaattagccgggcatggtggcatgcgcctgtagtctcggctacttgggaggctgaggcaggagaatcgcttgagcctggggggtggaggttgcagtgagcttagattgcaccactccactgcattccggcctgggcaaaacatagcgagactccatctcaaaaaaacaaaaatgaaaacaacaacaacaaaaaaacaaacaaacaaaagatttaaccctctaggttcaggaaaaatccctgagaaagagagagcaaagcttctatactctgcctaggatttctttctctttccgggtgaaaaataggcgttgggatgatactgagttgataaaagtattaggaaaagtggccagtgtctaaattcaagccattaaaaaaaaaaaaaaaaaa

SEQ ID NO: 2488 - DNA, 2008 bp, Homo sapiens
gcccacgcgtccgcccacgcgtccgcccacgcgtccggcggccgtggagtttgtgacatacgaggtgacacccctcgagtcacttcccttcaactccagctggagcgcctgcttggctttgggttcgttctgcagccttcgccccgctcctagcctcagggccggactccagcgcagagcccagcccagcgcagctgccagcagccacccagccgcccagccgcccagccccgcacgaaacccggccagagcttcctagcagcccgagccatgaacaccgaaatgtatcagacccccatggaggtggcggtctaccagctgcacaatttctccatctccttcttctcttctctgcttggaggggatgtggtttccgttaagctggacaacagtgcctccggagccagcgtggtggccatagacaacaagatcgaacaggccatggatctggtgaagaatcatctgatgtatgctgtgagagaggaggtggagatcctgaaggagcagatccgagagctggtggagaagaactcccagctagagcgtgagaacaccctgttgaagaccctggcaagcccagagcagctggagaagttccagtcctgtctgagccctgaagagccagctcccgaatccccacaagtgcccgaggcccctggtggttctgcggtgtaagtggctctgtcctcagggtgggcagagccactaaacttgttttacctagttctttccagtttgtttttggctccccaagcatcatctcacgaggagaactttacacctagcacagctggtgccaagagatgtcctaaggacatggccacctgggtccactccagcgacagacccctgacaagagcaggtctctggaggctgagttgcatggggcctagtaacaccaagccagtgagcctctaatgctactgcgccctgggggctcccagggcctgggcaacttagctgcaactggcaaaggagaagggtagtttgaggtgtgacaccagtttgctccagaaagtttaaggggtctgtttctcatctccatggacatcttcaacagcttcacctgacaacgactgttcctatgaagaagccacttgtgttttaagcagaggcaacctctctcttctcctctgtttcgtgaaggcaggggacacagatgggagagattgagccaagtcagccttctgttggttaatatggtataatgcatggctttgtgcacagcccagtgtgggattacagctttgggatgaccgcttacaaagttctgtttggttagtattggcatagtttttctatatagccataaatgcgtatatatacccatagggctagatctgtatcttagtgtagcgatgtatacatatacacatccacctacatgttgaagggcctaaccagccttgggagtattgactggtcccttacctcttatggctaagtctttgactgtgttcatttaccaagttgacccagtttgtcttttaggttaagtaagactcgagagtaaaggcaaggaggggggccagcctctgaatgcggccacggatgccttgctgctgcaaccctttccccagctgtccactgaaacgtgaagtcctgttttgaatgccaaacccaccattcactggtgctgactacatagaatggggttgagagaagatcagtttgggcttcacagtgtcatttgaaaacgttttttgttttgttttgtaattattgtggaaaactttcaagtgaacagaaggatggtgtcctactgtggatgagggatgaacaaggggatggctttgatccaatggagcctgggaggtgtgcccagaaagcttgtctgtagcgggttttgtgagagtgaacactttccactttttgacaccttatcctgatgtatggttccaggatttggattttgattttccaaatgtagcttgaaatttcaataaactttgctctgtttttctaaaaataaaaaaaaaaaaaaaaaagttttgccctataggtcgac

SEQ ID NO: 2489 - DNA, 2008 bp, Homo sapiens; identical to SEQ ID NO: 2488

SEQ ID NO: 2490 - DNA, 2190 bp, Homo sapiens
  misc_feature (1008)..(1008): n equals a,t,g, or c
  misc_feature (1026)..(1026): n equals a,t,g, or c
  misc_feature (1085)..(1085): n equals a,t,g, or c
aggggcggggcggtgccggcaagatggctgcgcccgagaagatgacgtttcccgagaaaccaagccacaaaaagtacagggccgccctgaagaaggagaaacgaaagaaacgtcggcaggaacttgctcgactgagagactcaggactctcacagaaggaggaagaggaggacacttttattgaagaacaacaactagaagaagagaagctattggaaagagagaggcaaagattacatgaggagtggttgctaagagagcagaaggcacaagaagaattcagaataaagaaggaaaaggaagaggcggctaaaaaacggcaagaagaacaagagagaaagttaaaggaacaatgggaagaacagcagaggaaagagagagaagaggaggagcagaaacgacaggagaagaaagaaaaagaggtgattcctgtcatgggatgtgctgtgtgatgagtttgaagaataatcagtaggcmtgycagagtttgggttttttttttctctttttcttgtcatttcattgtttgtttggaaagaatcatatttcagtttagacataacaccagagttcccttctgatgctcttcttcgggtccgtgcagtggcagattccttaaagttttcttcagctttaccctatttaccctttatactgggcattggcaaatgttgtaaagggccagatggtaaatattttaggctttatggtttggtctctgtggcaaacatccaactctgccagtgtaccctgaaagcagccatcgataatatgtagatgaatgggtatggctgtgttccaggaaagctttatttacaaaacaggcagctagcccttgctttatagcaagttatgttcttctgaggttctgctgtatatgagttgacttctttagagaataatactttgttttgkttccacatttatttaggtcataagagaactgcttatgacatgtcagcaagaattagaggatttaaagaaatcaggaactcaaatattgagganctaggaaccagtttttgntatttgtattaaatcttgacttcctcttccacttaggctatgaagataattgtagctancacacagttgcttatttaaaaaaaaaaaaaaatctgtgaggcatatgtgtgtatgtatcttctctatcttccaggattcttttttaaggattgatttggtatgttttgctgctattccttgacagtatatttatttcagaggtatcacagctcatcttcccttgactgattcatcaggatttgtcttttttgtaatacagctaaatttaaatagcataaaattggataatcaccttataattgggaaaaatgcatgtgtcttcattgtagtcaatatggggcagaagcagcctccacgatctttgttttttgtatcttaggccatcagttaatttcagtgcagattttaaacacctttatttgagcacttctttccagatgaggcaagttcatgctaggtttttagggggcagaaaaattgtttggaacttgtcatttttttatagagaggaattaattcccattttaacagtagagtgttcctcaactgaggtctttcaggaattcagtaacagctaaggcctcttttgaatgcttttgtttcagaggaaatctgtgagactwcaaggaraaatgagggaaatgaaatagattctaagcttataarraarawtcrgcagtatgtgttcctgctgtatgctagacacttcgctagcggacagagacagagcagtgaaagacacagtctttgctctcattgagctagttttttatatgggagtgtgagatgataagcaaaacagatcattcaaaatgtgaycatattaagtgctataaagaaataaagcaggccaggcgtggtgctcgcgcctgtaatcccagcactttgggaggctgaggcgagaggatcacgaggtcaggagttcggggccggcctggtcagcatggtggaaccccgtctgtactaaaaatacgaagggttggccgggcgtggtgatgggcgcctgtggtcccggctgctcgggagtctgaggcaggggaatcgcttgaaccggggggcagaggtttcagtgagccaagcttgagccactgcactccaacctgggcaatagaactagmttcgtctcaaaaaaaaaaaaaaaaaaaaaaaaaaaaaaaaactcga

SEQ ID NO: 2491 - DNA, 240 bp, Homo sapiens
ggcacgagctcgtgccgctcaaaccttctgatattgtatacattttctctgcacatttgagtgtgtgtgtgtatggtttgttgtgttgtgtttttttttttctggaaagagtcattgctttttatcagattcttaaaggactctaagacaaaaaaaggcttatgaactgatttaggatttcagtcttatgctaattcattagtcatttttaacctttctaaagaaaaaaaaaaaaaaaaa

SEQ ID NO: 2492 - DNA, 686 bp, Homo sapiens
  misc_feature (7)..(7): n equals a,t,g, or c
  misc_feature (9)..(9): n equals a,t,g, or c
  misc_feature (683)..(685): n equals a,t,g, or c
tgctggnanctagtgggtcccccgggctggcaggtgctccaatgaggcttaagctcctagagtacaggaccattttgttgattgtctttcttcatagcttctctgcttggcaaagagatgggagggggccagatactgactacctggggtaggcacattatgtgttaaagcaagacagaggccagagaggggcaggtagacctgcatagcagcagcctcagcagctgtcttggtaaaggagagagagagacatggggccagtaattccggggtgctcagaagttttaggagggaatgagcctcagggaggagtgagcacctaaatgaacgcagtaaaccttcatggaccaacagtgattgaggatttgtgggcagccagagggagtctgactgaagtttacttggaaagaaagggcttgctaagaaaaaagggagtaaaaatgatgatagggaagtgtctaatgtatgtgcacatataagtaatacaaaagttttgagctcttccaagtataccatttatatacaaacaaataggtttattcattcattaaactactttggaagcgtcagtggatatatttgaaagtggtaatcctgaatctcttttaaactattatatgattcataatggttctcaggaattaataaatgattactgtgtttagctctgaaaaaaaaaaaannna

SEQ ID NO: 2493 - DNA, 1961 bp, Homo sapiens
gtaagttatgatacatttgaaaagtgtaacatcactgatgctccttgccataaacttaggcaatatgaaacaatcttgctcttagaaccacttcaaatgattggtaaattggggtcacttatggtaattttatttataatctttaatcttgtatctacatctcttttctcctcttccttctcttacattcagtaaatctaaggcttctttgagtttctgtgccctctcttacctattggcaatgtctataaagacacagctcacctctttcttctcttctgggaaatattattagccattatgctttcagcccacatttgttcacttattatttccctgtgtagaccctacaaaatgggaaccagatctttttctatagttttagataaaggtattctggcagttttctagagaaattcattattagaaatttattctaatgggaacccatttttggcttactctgttggttgctttgacctctgtttttccttgcagagctcgacttattaatatcatttaggagcactgggaaacatcattctgcatatttatcaggcaattcatacacacatccctacagttcagtgtataragcttctctgttttggacttaaactgaaagattttaatgactggtcgtattggcccagctcctaatatgcagatgaatcattgtgtctgcactgcggartgttggscatctttttacttctgcttttcttaagtagatgcaaatattgaggggatcctaaagaaggacaggaagagtaccagcatttttttttttctaaatctgccactaaagtccctttggattggattttagatartcatggcatttgaataacctgcatttattaatctctggaaataagtgaaaaactagaaaaggctgaacgtmcaatcaatataatgcaatactggggcctamcaaagtggataaatgatatttatcagcaggcgactgctgtttaattcacaggcacaaatgcccacattcatctgtgacactgaatcagttttcttgtgagtgttgtcttccctgaggtttctttctcttactcttctctccttgctcaaatttcagagttgtcatccacaattctgggaaaggtgatgtttcacttgcttcattcaataaagatggggtttaggggggtgacacaaggtatggctaccaatgtctaatgctggtattatatcctttatccagtatgctggggagaaagtacaatcattttgctttacttcatagctatctggttcattaaatcccatgagtcttggtaaattatgaagcaattattgattttgttgtggtcaacatcaagatatatattgattttcccaccagtcaatagtttccagaggcataatcaatattgatgtttgctgaacatgtgtgttaatgtcagtgtgtgtatatgtacttagatctctacactcagatatttattttatactctttctgaacgtttttgtaaaaaactattttctcccaaagatcctattattttttggctgatttattcagttcttcctttttgctttacatttttaatctcatttattcttccccggattgataatggaaaggaaaactaaggctttggaagaagtctatttgcctttaatgaaccggttgggggtgagtcttcctgatgagattgtgattaattgcaaagtgagtattacttcttgtctccatcctgtcggttcgatagaatgacaaaaaaaagttgaagactttcactctccattccagcatctaccagaccaacataactcagtaagcacatctgagaatccccctcatttactcccagtacttttttcaattatgtggaacatagacgaacaggtcaaacttggatttagacaaagttaaatgatcaactacatgatgcaatttaatgggcacaaaaaaaaaaaaaaaaaaaaaaaaaaaaagggcggcc

SEQ ID NO: 2494 - DNA, 2647 bp, Homo sapiens
tcccgggtcgacccacgcgtccgagaaacttcactgctatttccagatgtcattttaaaatattttagaatacctgatttctccatgacctatccatgcttttctaaggttccaaactaaaatgcagaatcttgagttattccagaacatagatttaaaatttgatcagaaaataaccttcatttaagaaatgaggggtcaggcgtgagccaccacgcctggccaccaatttttattatatgattttataactaaaatttcatgtctagcaatgaaattcttcttctctcttttttgtttatttatcttcgttttagtctttctttctcctcggatctttccccttctatctgtctcagttccttcattttccttagctctccatttctcccagcatctgctactagtctagtctcctggctcttaacctttttgagacacagactcctttaataaagtgatgaagaaagttatctccccagaagaatacacacagagaacacagaatattttgcatattatttcaaaggtaaagaatgccaagaagccaggggcagtagttcatgcctgtgatcccagtgctttgggaggctgaggtggaagaatcacttgagcccaggagttcgaggctggcctgggcaacatggtgagacctcctctctacaaaaaaattttaaaattagccaggtgtgctggcacgtgcctgtagtcccagctactcaggaggctgaggtgggtggattgcttgagctcaggaggtgaaggctgcagtgagccatgattgtgccactgcacttcagcctgggtgacagaatgagaccctagctctaaaaaacaaaggatgccaagtatctaaactttgagctccttgaggacaaaaactaggcgtttttcatcctatatgcccagtatttagttgatgtttcttgagtgtatataagtgtgcacatgcccagaaacatgtaaatattagtacatgttgtagaaaagctgttgtcaggaagatatttgtacactctggctttccactatgatagtcaccaggcacatgtgggtactgagcactggaaatgtggattgtccagattggaatgtactaattgtaaaatacgcactggattgcacaggcttggggcagtacaaacaaaagaatgaagatatctcattaatagtttttatgattattacacattaaaatgatcatatcttggatatattgagttaaaatatattattaaattaattttacctctttattgttacttttctaaaagcagctactagaaaattttaaattatacatgtaactgctcatagaaggttggtatctgggttcattcattagtggacattcataaacatagtaattttctttaatttcatggattcgttgaactaaagatcccataggtcaccgccttccctgtccctcctctaccaccaaaaattaatgagaacaaatgggaagaatttactctgcttttcaaggtactctgatacagatttttatctactgtcataagtatacctagaacaaaagcactgttgactcaagtagtttcactaatgaaaaggaagcagcagaatgactaatgtaaattggaggagactcttttatttggaatgctttggttcttccactgtggaacaggtgtggctgctgttgaaacagcagagtcatactaggcatatctgacatgtgaggaaccgcagcattgctcaggggcccctgccttccaatgaatggatgtaggatccatcatacatcagattgctcctttccaatacaaactctgatgcagaaatgcacttggtgtatttgctttttcttactttctggtttagggcagaaataatattttggcttagagacttttgtcctgaactatgacataataggatgagaatatcgtgtcaaaaatagccttacaaggtcctttttggcattaagacttctggagtgagtttgcagtggattattgagaataattctgttcattagcagctagccatctttgatgagtgctgacttctctcctttcagcacagagcaggaaatgcctgcctcccatgactctgggttggagtgaaggggaatgcataccagccaccctcttgcagaggtggggcaggtgctggcacagagcctcaggttaggccgaggggatgcaatctcagatcagcagccagcagtgtttgtaaacaacaggagggagattgtgctggtgatgtccaactcacaccaatgaagatcaaccggtttgtgctttgggcagcaggctgcagatggacagtgcctcctgagggcatcgccatgttttagggatccgtgttgcaggatacctgtctgcaagagagagtcaaggagggctttttaagcccctggggttcaggcctggcatctgggtgttaagtagagtgaatctcctgaagtccaaactaacatatgacattttaaaatgaggaaaacaaatggctctgaaaaggtctataggattataggtaagtggttaatacggaagatgttataaaggtctcaggaggagatggggtgatccagggttggttgaagtcgttgaaatggaattaccctgtcttttacctgtctgtggggaaaaaaaaaaaaaaagggcggccgctctagagg

SEQ ID NO: 2495 - DNA, 1520 bp, Homo sapiens
ccacgcgtccggtgaacgtggcatcctggacttttgcactgctcatattggtaaggtaagcaccacccctggcacacacacggtcaggcatgacataaaaagatgttgctaagggacattgaggtctatttcttgggacaagtaggaattttctatccctgttcattcttcatcttggccacacacatttgctctcttgctcatcccacagcgcctcccacaaggccacgctggatcctgccacagtgttaggttacatttccttccttctggctcaccagatgtggacctgactgggaacgctggaagctactgtccctggagccctactctcctggcttggtgcctccatggggaatgacagtgggcactctgcacccacatggaagggagtcccacaccttctaaggtctcctttgtaacctacctctggctccccactgtgccacatccctgtaccatggcatctgtgtcttttggacagcaccgggctttcaggatgactagtcagggttgtcttgtctggaccagatgctttgagggtgcagccttctgggaattccctctagggattttctatgatgctggcttccctgtaagtcccactccaggcccgggtactctgtccaagccccacagcagaagagctcttcaggggcctcatttggtgtcaactcagcaagaagtgaagtttaaagcccagagcactgcagggcattgtactggtgtaggaagggtacatccagggctccaaggtgttttctgtgctgagctcatctctcatcccccagccaccacagtgctgggtcatagctgggctgttgttttcctatggcaggcccagccctgtctagctctcagttcctctgctctgcagccagggcccttggcctgaaccctacacatagcagcactcactcgggctgtaagtattcttcagtacctgctatggcctggcatttaggaactctcaagcaacagcacaagtgaggcccctgctctcccgtgctttgggtccgttgtaacagcataaaaagcttgtggagtatcttagtgagtccactcttgcagctgggcagcatcatagtgttcggctccctgttacagtgtcatttcttggggacatagcagatggaaaattctggggtagttttgatttagcagttatcacatttgctgttcatggagtgtctgcaggggctaggcacccctcacgatgcttgtgtctgccagccatggtggctcatccctgtaatcccagcactttgggaggctgaggtggtagatcactcagggtcagaagttggaaatcagcctggtcaatatgacaaaaccccatgtctaccaaaaatacaaaaattagccatgggtggtggtgtgcacctgtagtcccagctactcagaaggctgaggcaggagaatcacttaaacccgggaggtggaggttggagtgagctgacattgtgtcattacattccagtctgggagacacagtctcaatctacaaaaaaaaaaaaaaa

SEQ ID NO: 2496 - DNA, 594 bp, Homo sapiens
  misc_feature (15)..(15): n equals a,t,g, or c
ggataatcgccagcngcccaatggtgtttacacaactgcagagcagcgtccgaatgcctacatcccagaagcagatgccactcttcctttgccaaaaccttatggtgctttggctccttttaaacccagtgaacctggagccaatatgaggcacataaggaaacctgttataaagccagttgaaatctgaatatgtgaacaaatccaggcctctcaaggaaaagacttcaaccaggcttccttgtacccacaggtgaaaaatgtgagcataatacttctaatattattgataagtaaggtaaccacaattagtcagcaacagagtacaacagggtttctatttacccaccaactactatacctttcatgacgttgaatgggacatagaactgtcctacatttatgtcaaagtatatatttgaatcgcttatattttctttttcactctttatattgagtacattccagaaatttgtagtaggcaaggtgctataaaaatgcactaaaaataaatctgttctcaatgaagtacggaaaaaaaaaaaaaaaaaaaaaaaaaaaaaaaaaaaaaaaaaaaaaaaaaagggcggccgc

SEQ ID NO: 2497 - DNA, 933 bp, Homo sapiens
tccgaaacattttaaaagtgaaatcatgagttaattttcttttatcacttggtaattgtctgaactaagtggctaactgctcaggacatagcagatgcaccatcaagctgggcacttcaagctgtcttctagaaatgaatttctgtgctttttagcactgctttttgcttgggggtgggaaagggtggtctccagtaactgctaagatgacacctatactggctgctgtccgagcagccctagtgactgtcttgggggcaatcagttgcttaatggttaatacagaagtacctgagtaatactttgcaaaaggactttccccgacctgtgctgggagtgtctccctgtaaactttgccaacctcctggttgttttatcagtgagagcatcatttaagtgaaaatataaattaaggagacagggctcataggacgcacattaaaacacctgatcattttgagcacctgctgtgtgcaaggcactgttctaggccaacagtatagatatacattgcctcccatcttttaaggctgataatgaagagaagaacatggaagaggaagttgttgggttttttttttttccagtcagaaatactgaaagatttcttacagctgtctggtttcctgatacttaaattgtgaaactttaagttcactccattatcatttctaaaatttattttgaataagttccctttcgggggagatacccatgtgtagagaatggtatggaaatctgccaatggagggattagaaattttgtcagtttaaagacttggaccttttgagatttttgttgttgttgttttgtttgttcttcttttctgagatgaaggctcactctgtcgcccagcctggagtgcagtgagctgagatcatgccactgcactccaacctgggtgacagatctcaaaaaaaaaaaaaaaaaaa

SEQ ID NO: 2498 - DNA, 4561 bp, Homo sapiens
  misc_feature (99)..(99): n equals a,t,g, or c
  misc_feature (105)..(106): n equals a,t,g, or c
  misc_feature (1358)..(1358): n equals a,t,g, or c
gcacaccctgacctaaagacatagccccaaatcactttcaccatgtagggtctgagcctctttaaatccatattcccgtccatccagtgttgtgcaaantgaganngagtgtgctttggtccttccttggagtcagcgtcgcctgtggccccctccgttattgtctcgtggccttttgtgctaaactcggggcctctgctgtggagtaaagaatgtgggtttgtgtccctacctctgtcactgctggttctgcaacccaggacsattctcattctactatggtgatgcccctgayttcgttgacagcacacagacrtgacttcagagttccgtgcacatgtgtgcatcttctttcccttctctagagatgtttggcatcttcctcctgctgggttgcaacrcaggctgctacagcattctcttatcttcctttgcccttacacagactccaagcccacggtagagacgctgggacccactgtgaagagcgaagagacaaccaccccctaccccaccgaagaggaggccacagagtgtggggagaactgcagctttgaggatgacaaagatttgcagctccttcgggattcaattgcaacttcgatttcctcgaggagccctgtggttggatgtatgaccatgccaagtggctccggaccacctgggccagcagctccagcccaaacgaccggacgtttccagatgacaggaatttcttgcggctgcagagtgacagccagagagagggccagtatgcccggctcatcagcccccctgtccacctgccccgaagcccggtgtgcatggagttccagtaccaggccacgggcggccgcggggtggcgctgcaggtggtgcgggaagcagccaggagagcaagttgctgtgggtcatccgtgagaccagggcggcgagtggaagcacgggcggatcatcctgcccagctacgacatggagtaccagattgtgttcgagggagtgatagggaaaggacgttccggagagattgccattgatgacattcggataagcactgatgtcccactggagaactgcatggaacccatctcggcttttgcagtggacatcccagaaatacatgagagagaaggatatgaagatgaaattgatgatgaatacgaggtggactggagcaattcttcttctgcaacctcagggtctggcgccccctcgaccgacaaagaaaagagctggctgtacaccctggatcccatcctcatcaccatcatcgccatgagctcactgggcgtcctcctgggggccacctgtgcaggcctcctgctctactgcacctgttcctactcgggcctgagctcccgaagctgcaccacactggnagaactacaacttcgagctctacgatggccttaagcacaaggtcaagatgaaccaccaaaagtgctgctccgaggcatgacggattgcacctgaatcctatctgacgtttcattccagcaagaggggctggggaagattacattttttttcytttggaaactgaatgccataatctcgatcaaaccgatccagaataccgaagrtakggacaggacagaaaagcgagtcgcaggaggaagggagatgcagccgcacaggggatgattaccctcctaggaccgcggtggctaagtcattgcaggaacggggctgtgttctctgctgggacaaaacaggagctcatctctttggggtcacagttctattttgtttgtgagtttgtattattattattattattattattattattatattttatttctttggtctgtgagcaactcaaagaggcagaagaggagaatgacttttccagaatagaagtggagcagtgatcattattctccgctttctctttctaatcaacacttgaaaagcaaagtgtcttttcagcctttccatctttacaaataaaactcaaaaaagccgtccagcttatcccatcctctgattgtcttctgacttaagggatttactgtggtgtaggttctgccagccaaccctacaagctgccatttccagtcctagcatttaagtaggatgttgttgcctttaacttttcttatccaggggaaaattgccattttagggtcagcatgaacagctctttcttgtatgcgatttaaaacaaactggaaaggaaacttcacacgtcaaaatccatagaagcgcctggacgaggcttaaagtgctttgtgagtgaataggagccattcgctaattctagacccacagtgtctggtggtggggcttcccttgtggggcttctggtggtggttttgccttttcttttccctcctccatgttcttctaaaacatatacatatatacatacacacatacacatattcttcaggtctctaagcccctggaagcagcattgtgtgatattctcagaggcaggggaaaatagagggaaaaatagagactattggtatgttctccccatcagcgagttattgtaactggtcaccactggacgggaaggagaacagaggagagggaaagagaagcccaacctctgtratcatatgagggccaaggctgagcagtgtagacagagaccctttgaaatgcatttgtctctcaaatagactagtaaacaccgacttctcctttgggttacaaacaccatttcaacctttcgggagagtcagagctaggatgtacaagaactgattctaaccagaagtccgcaagtactgtggacaagaatgcttaaccatgctgcttcagccttgagagacctaggttcttacacatatgcacacacgcatacacacatgcacgcacacacacatacacacatgcacgcacgcacgcatgcacaccaatttatgtttttattaagtgccttgaaaaaatgaagaaaaatgtattttccctttatgtaaaaattagtgaatatcttatgaattaaggcattcctctttccctaaccccgatggctccattcccaagtaccccaactcactgctgatcctattaaaggaatgagtcctgctacccgagtggtagtcatagccctagatgactctcaactactcttcaaagggaggcatcaggaatagaatgaaactgtgtgaaggataagattgttcgcatcaagatccaaatcttgatttcatattaacgcctaaggattgcctgtgtgctggaaatatatttgaaactcaaccagtatgcccagcctattgcatatcattgtcagaccatttttgctgctgtggtcacccacgatttcatttgtcttatacccaggtgaaaggggaagggtgaatgggactggctggttcctttaaatgttaacttatggaaatgctagttcaaatggtaatgtcacagtgttttgtatgcagagagcaagagttcaaccaacagctgtttattcatgtgtgtgtgtctttgctgctttgagttctctgtatctactgtgtatgtgaatggtcatgtgggactcagtggtggtgttgtgactttgacctagggtccgagtgtcacagctgatcttggcactcggcactcattggcacagtggtagttagaggtgaaaagtagagctgtcaagcccaagggcttagctttagggctcctcctgagttcggcccacagtagaagcaagattttaactagccccttttcctcttcaccctcccatgatgcgcagtgttcagaaagctggtaagtcctagggatttccagaagtagcctgcagaagaaggtaagtttgaaagccactccaggggtcctgatgctgtcatgctcagtgagccattttacagttctccaaagtctagccctgtttcggacctgcacttcacctctaagttatgtacaactcaacctgcatccctctaaaagtcctatatccatattcaccattggctaatttgaggccctgagtgggcyttgaatgctaaaaagaagcagggtacgsagggctacatgtagataccacaccaaggctggaggctgstctgtcrtaagacagaaagaaagacgctgggcccaattttgacttggccaggggacaccttggtgtgtttgttatctttatctgtgggtaggctagctgacccatctccttgagtcattccctttgggaaaccccactgccagtattgatctcctttttgccttgtactgaatgacacattacctccacactctcccggactaggtggtcaacagggccacagggttgctttctgtctttggtggggcaggggagttgacagggatgagggtccaaggaataagcatgaatgacaagaaaacaagggaaagagttaacctgtcacatagcaggttaactttttcagggtttgcagttagaggtattcgaccattcactggctgagccagatcacgggaacttgagagcttttactgtgattcttcaatgtaaaaaataaacaacaatgtcaaactgtgtttatatgatttgtataaagcctttttaagattactatttaaataaacattataccagagaaaaaaaaaaaaaaaaaaaaaaaaaaaaaaaaaaaaaaagggcggccgc

SEQ ID NO: 2499 - DNA, 1142 bp, Homo sapiens
ggttgacatgagtcatactttatgcggatgaagaagctgaaactcataaaacttgtccaagatgtcaaatcagaggttcagagaagagtgattactttgagtgggtgttcaggagggattgctggaggagatggttctttgatctgggccttgtaagatgggcagaagttgagtatgtggagatggtaatggccttcagaatttatgtcttatctgtttggcctggcatacaaggcctttgacaatttggcagagtctggcttttttggtaggtctccagccagctcttcactttgtttcagccacttggaaccaagccacatcgcctgaatatgcaggtatgggtgtttcagggctctgtgccttagccaagagtgtccgttctccttcacctccctcctcctacacctccctcctctttctcctgagctctttcttatacatccttgggcatggcctatatctgctttacatctcggggtcagaacctgacccatggcaagagctcagtaaatgataaatgaatagatggaggttgagccttggagaagacaagtaatgagaaaaaaaaatactttgttggcctcatgtccttcctgtcccttttggggcagaaaggctcattcacaagtccaggccaaagtcagcacaggcttcaatttcattggctcargccggtacacagatggggtgcattagagcttgatgawttaaarggttgggkgaaatgcctgamtgtkgggagarctgarggarctgtkgctggcattgcacaaagcttcctttatttcactccacagccacccccggcgttaaataatctatagattcttatgcaggtctgcctaatggaaagatcattgccccagcctcctccttggaaaataggcctttcttttcatttttccctccctcttccatttaagaaagttcaaggagagaatgtctctcctgttctcctctcttgacttaatctcctatgcagtttcagaatctgcccagtgggagttaggagctgggaagcagataactggagctggatcagcagtgtaattaaatgatactttgtactggtaatagggcctttcatctgaaagcttgacattcgtttggtgcaaaaaaaaaaaaaaaagggcggccgc

SEQ ID NO: 2500 - DNA, 1317 bp, Homo sapiens
gctcagtctgaatgatcatcttcaatattctatctagtgatggagtgagaaaattctcctgaactctgggcaggaagttcatattgctcagggtgagccaccatgataaaaataactcacacaggctaattacaattaatctaggctcttgacctttaaaaaatgtatataatgtttacatatgtttataatgtcacgccatttatttcatttaaaattttaaatgattttatctttggtcctctcttacaacttattcttggtacaacttattctttgtactataacagcagagatgagtaattgggacagactagcctccaaagcataaacttatttatgatttggccctttacagtaaaagggccaaatcataaataagtttatgcccacgcgtccgaacttatttatgatttggccctttacagtaaaagtctgctcatcccaggttttgcttgtcaatttatatactggcgtttgttcctgatcctatttatttatttctggcatccaactctggtagttctttctgaatcagtttaatgaagtttgtaaatgatgtaattaaacgttatttattacttttatttttttctagagatagggtcttgctgtgttgcccaggctggtcttgaactcctggcctcaagtgattctcctgctttggcctcccagagttttgggattacacgtctgaggcattgcactcagacacttttatctaaagtttatatactgttaaactaaagaaaccatatacaaatttcaagtcaggtgcttttactcattttataccttgattcttgaatggccagattttctgaaaatacccagttaatgattagattatgctacttcagtcaccacgtgtttgaaggctgatcacagaaaactagaagcaatgtaactagtttcaaaatataattaaatggaggaggaagtgtttggcttttttccctccagaccacaaattggtaggtaaagtaaaagttagatttgaaaattgggcckgggtgtggtggcttacacctctcagcacgttgggaggccaaggtgagtggatctgttgagtcccagagtttaagaccagcctgggcaacatggcaaaatgccatttttactaaaaatacaaaaatgtagctgaatgtggtggcgcatgcctgtagtcctagctacccaggaggctgaggtgggaggatcatctaagcccaggaagttgaggctgcagtgagccatgataatgccactgtatgccatcctgggcaatggaaatgagagacccccgtctcaaaaaaaaaaaaaaaaaagggcggccgc

SEQ ID NO: 2501 - DNA, 420 bp, Homo sapiens
  misc_feature (2)..(2): n equals a,t,g, or c
  misc_feature (21)..(21): n equals a,t,g, or c
  misc_feature (34)..(34): n equals a,t,g, or c
  misc_feature (93)..(93): n equals a,t,g, or c
gnaacagctttacccactagnctttggcaaaaancttatttaggtgacactatagaaggtacgcctgcaggtaccggtccggaattcccgggntcgacccacgcgtccgggcaaatggcgtgcaggcacagatggctaagcaacaagagcaagacccaacaaacctatacatctcaaatctccccatttctatggatgagcaggagcttgagaatatgctgaaaccctttggacatgtcatttccacaagaatactaagagacgctaatggagtcagcagaggtgttggctttgccaggtaaaattctttctttgtatgtaatcgttctttcctcattgttccttttaaattccattccttttttagtactagagcccaaagcaatagaatatgcaaaaaaaaaaaaaaagggcggccgc

SEQ ID NO: 2502 - DNA, 1506 bp, Homo sapiens
  misc_feature (312)..(312): n equals a,t,g, or c
  misc_feature (323)..(323): n equals a,t,g, or c
  misc_feature (416)..(416): n equals a,t,g, or c
  misc_feature (447)..(448): n equals a,t,g, or c
ggaaaagttttattgaattatagttttttatattctgttctcttgctttggttttcttttttgtgggaactcctgttgtatgcatgttcgaggttcgtttcttgtttctaatatttgttgccttctcttgaattattttttttcttctaaaagtttgttttcattgtctgtttctcttacattatgtattgtgtatattgactcttatgtttctccttagtcttcttcttaaaatgattcattttatagccaattccttcctgagttccatcagctcatttctgagtgtttgtcactccgatttatgctatncttcgtatctngtagcaatattaaaagtttttaaaatgtgaaataatagataattcatctttgtgtgtatgattcttaccatgattcggtaagattcacttctngtagaagagttactctactccttatttaaannctyttttttcttgtaataactttatgtgtgatttggcttcagtccttttctattgctcatttttccatgaaattgatttttctaaacacttagcttgatttaagacttactaattttatggttcttagctctctctcgtatttggaagtgttcagaaacatggctgcttattttctgagatttctttcctttattccctcactccactttcaaaattaccctttcttaaagtgtactatttggtgttttttagtatattcacagagggagaaaccattaccactatcttattttagaagatatttatcacccccataagaaaccccatacttattaatagaactcctcattcctcacttcttccagcccctggcacccactcatctaccctctctgtctctagatttgcctatgttggacattggatataaatggaattatacaatatatgatcttttgtgactggcttcttttacttagcataatgttttctaagttcgtcattctgtagcatgtatcagtatagtcatttgctgcataacagagtttcagggccaggcacagtagctcatgcctataatgccagcactttgggcggctgaggtaggaggatcatttgagcccatgagtttgagatcagcctgggcaacwtagtgagactacatcagaaaaaataaaatagacaggcatggtggcacgcacctgtggtcccagccactcaggagggtgaggttggaggattgcttgagtttcaagaggttgakgctgcagtgaggtgtgatcgcaccayttccagcttgggcaacagagcaagacaccytwtctcaaaaaatctaaaacgaacaaaaaaaaaaacacgacatttcagtcaacagtggattgcgtgtacgatggtggcaatttctatcacctagtaacatcatagaccttccaataggataagatgtggaggtggaagatagtgatattgatgatcctaaccctgtataggcttaggcttatgtgtgtgtttctgtccgtttttagcaaaaaaaaaaaaaaaaaaaaaaagggcggcc

SEQ ID NO: 2503 - DNA, 1424 bp, Homo sapiens
gatagaatcatcactgcataggagccaggaaatttagtttccagtcccaggtagtccttagctgtataatcggaaaaagttactttgcctctttgggcctcaatttctactaattctatgatgacacagttggacttagaaattttaggatgctaaggactgacttaataaagctttcctggtatctcagacattttttaaaaggctgtatatgagtttgtgtatatgtgtatgtgcacatgcatttctggaaaggcttcccctccaaccattaaatatataattaagttataaatgtgttgtttataatgagaaataaataccacacttgacaatgtctatttccaaagaattgggtatttttgtgcttttgtttattcctggtattttcatatcatcctgttacacacgtgagcagagaatgtgtgtatcatccatatttaatttacagtcatagctagactaagttattatccaatgttattgaaagaatcagtagcacagatagaaatgaattagttcctagtatacagttttcttggcctttctcttaaccagtttgctttcttagagaaatgaactgatctgactatgattaagatcatttattgctagacagaagtaaaattagagattatccatagaacattttaatcttgtaatttatttggtgtgttgtagaacacctgacttttctcattgtatttggtaaatgtgttaaaaatgttaagtcagtgttatctggttttattttatctcttgagtcatgtttggcatgtatgtgttgggggggtgggcataggagttacacatttaagaaagccctatcttttagtagaataaattaatgcagattggcctgtcttcctgcctgcctggtcagtaacagtggactttggagattgatctagtgatgataaacctattgtatgtggcataagccagagaagtcagcttcgatagcaagtttctacattggcgtgagagagaagcatttagttaacatttcaaagtaactaagcctgttagcatccatgtattctatcagtagactttattgagtcctgtcatttgtatggtcttttattgttttttgttttcaacaaaggaaatagcacacacatacatctcaaaatggattatacctgttgtaatctcagtattttgggagatcaaggtgggaggatcacttgaggccaggaatttgaaaccagcctgggaaacatactgagatcctatgtctacaaaatttttaaaattagccaggtacagtggtatgcacctgtagtcctagctactcgggaggctgaggcaggagaatcacttgagcccaggagttcaaggcagccagtgatctgtgatcaaaccactgcactccaacttgggtgacaacatgggaccctatcttaaaaaaaaaaaaaaaa

SEQ ID NO: 2504 - DNA, 1348 bp, Homo sapiens
ccacgcgtccgattttctgtgaattttgggaagaagagagttaaatggaagaaagaaaaaaaatcttgcaaatacctttaggatagtagtttttttggatacagtagacattgtttgaaatgaatgattaaagctgtacttacctttcttaaaattcactgcttgggatgggctggtaacagtttcgaggttactctcattaggcttcagtgttaagtacactataccccattttcttgggaagtgaacagcaacatctactctgttaaaatcattatacattgtgtctgctttcagatttcttccttttagtaattagtgttgtgtatgtgttagatttttttttgtctttactgaaacacaccctttggaattcctttagcgaatatgctcttttgggtggataacctaataagctttcctctttgagttttctgtttttttactcagcacagccatggaagtagggatttaattttctgtcaaactctgcatctcacaaagcaatagttactcaaaacacgactttcaagaaggttattctttttaagctttcagcagatgagctgagtagcagcaggaaagcaggtattgagaactgtcttggtttttgtactgctgttgagtagtaacattgcagctgtcttaaatcctgaatgacacagaagcttatggctggtcgtactacatagcaccttgaaagtgacagggcttttcatttctatctgatttctgtttttcaaaaataaaactccttattcttttcctatcattgtaaatattcttcagcttcctatcactaatacatagtctcggcattagagaccagttaaaataaataggctgaggaaaatcttgatagtaggagagattttggagcattcattaaaagtaaaaatagggctgggcgtggtggctcactctcccctgtattcctagcactttgggaggccgaggcaggcagattgcttgaggccaggagtttgagaccagcctgggtcttaaaaggtagatattattctcattttacagatgacgaaactggagcttgtttgaaaagtttgcccaaaattgtagcagttagcgtgaggggcctgcctctagagaccatgcaaattcaacactaagctatactggactggtctcacatagtgagaccctgtctctacaaaaaatagaaaaagtagccgggcatagtggcccacacctgtagttccagctacttgggaagctgaggcatgaggattacttgagccaaggagatcaaggatgcagtaagccatgaccatgccactgcactcgtgcctggacaacagtgcaagaccctgtctcaaaaaaaaaaaaaaaa

SEQ ID NO: 2505 - DNA, 849 bp, Homo sapiens
tcgacccacgcgtccgaaagaatcttcctcttgctctctttttctttcctacccctcacttcatctgtttccctgatttttgactctcccctttccagtcatttctttcccacccatccgcagtcctggaaacatttattttttcttttgcccactgttttcatttgctcattaaattaaaatgactgctcggctcattgggaatccacatccccaagttagactggggatatgctctctgtactgtctccttctatggaattccaccccacccagagagagatgacttcacagtttgttcatatgagcatcatcccatgtcgtccccaacccagggctggtaggtgctacagcttgtgcttcatgctgctcctgtggcccctattcctacccagctcagagctttgcagggtctactgcagacaatcagaagtcagtttctaacaaatagcaacagccacaaatctcttcctccttcctctctgacattaccctgtgcaacttttctcaaagtctgttgcaccactcagcaaagcaagttgcaccagctatatcagaatcacctggggcagcctattaaaaatgcagactgttgagaccatcctggctaacacggtgaaaccctgtctctactaaaaatacaaaaaattagccggccgtggtggcgggcagctactcgggaggctgaggcaggagaatgacctgaacctgggaggcagagcttgcagtgagctgagattgtgccactgcactccagcctgggtgacagagcaagactccgtctcaaaaaaaaaaaaaaaaaaaaaaaaaaaaaaaaaaaaaaaaaaaaaaaaaaaaaaaaaaaaaaaa

SEQ ID NO: 2506 - DNA, 1519 bp, Homo sapiens
ggcacgagggttaatggaatcacgtggtatgtatctttttgagagaggccttttttactctgtataatatccttgagattcatccatgttgttgtgtgtttcagtagtcatttattcttatttccggtagtattccatgctatggatgtaccacagtcgtgctctttttgttaatagaactaaagcaactctatggagctaaggtaactgggtacagctgagtagtgatttaaagtttctggagtgttttcagaaataccatctcacctctaacaaggcgatctcaagtcacttatttgggaaaacaaaattacgaagatatgatttctttcattgttgtagaaccattaaataagtcatcagattatgatttgaacccagggcacccagtcaagtgctctttccctatgcggccttagctacggggatttacatttacagttgagaagtgaaacaagaaaaatttgtttttgaaacataatagtaccatctagcctggctgaccaacccttccccagcaccaccagtggacatgcgcatgtacatacacacatacatacccacactttaggctgagggagaatcttgtctttttgaatagccttcatagtaacctctgggattcaagggtacctgatatttaagacctttattaaaccttggttcagtggttttcaaacatttttgaatatcagaaccccttttcctaatggactgtttcatagaaccccaaaatgtgtaacaggtaacagcaatagttttgaaagttcaaaatggataatctttacttgtgaggtcggacatgtgaatggtgggcatattcccatgattctaatatgctgtcagaattatgagtgacagacagttgctgacttggagcacttcagtggctcatttgtttttctctatttggttatacaacagtgagacaagcgtgatgcacatggccattgtcagggtgacttttcctgaacagcatgctgtgtagttactttgattaatcagagatgggaggacaagctccgttttgaggtcaacataatactgagctatcctagcaatacaaaattatgtgtggtggcgggcttcattgtcttaacatatggcttggaacatgtttgagtgtgcatctttttttttttaattgtcctaccttaaaaacacacacattttgcagactctctgaagccctgtggactactattagataattgttggttgggcatgctgtaatcccagaattttgggaggcagaggcgggaggattgcttgagcccaggagttcgagaccagccctggaaacatagcaagatcctacctctacaaaaaaattaaaaaattagctgggcatggtgatgcatgccagcagacccaactactccagagactgaagtaggatgatcacttgagcctgggagttcaaggctgcagcgagccctggttattctgttgcactccagcctgggtgacagaatgagaccctgtccccaccctcccccccaaaaaaaaaaaaaaaaaa

SEQ ID NO: 2507 - DNA, 1292 bp, Homo sapiens
cggcacgagctgggattacaggaatgagccaccatgcctaacgagtataaaatattgttgattgtgatgtttcatgcacgtaagttttcaattttgatgtaatcttgctacttgtcatctttgcttttgtttcctgtacttttgtgtcatatccaatcatgtgtattatatatatatatatgcacatacacacacatatatatatatacaacagatatatataaaatgaaatattattcagtcttaaaagggaaagaaatcctgtcatttgcaacaacatggatgaacctggaagacattatgctaagtgaaataagccaaacactgaaaggcaaatagtgcatgatctcatttatatgtagaatcttaaaaaagtgaaactcatagcagcagagagtagattggtggttcccaggggcccgagagaggaggtaataaggagattttggtaaagggtacaaactttcagttatgcaaaatgactaagttctggagatctagtgtagagcatagtgactataatgaacaatacagtattgtatactaaaatttgctaatagagtagatcttaaatgttcacacacacacactcacacatgaaagaaaatgataactgtatgaagcaatgatatgttaatcagcttgattgtagtgatcattttacaatgtgtacttatatcaaaacatcaggttgtataccttaaatatatatgatttttatttgtcaattatacctcagtgaagctgaagaaaaagaggggaaagacttaatgatattggatttggcaatgactttttggacatgacagtaaaagcataggcaacaaaagtaaaaatagataaattggactacatcaaaattaaaaacttctttgcatcagaagtcacaatcaacaaagtgaaaacacagccatagaatgggagaaaaaactacttgccaaccatagatctgataagaggttaatatccaaaatatataaagaactcctgaccttgtgatctacccacctcagcctcccagcactttgggaggctgaggtgggtagatcacaaggtcaggagttcaagaccagcctgaccaacatggtgaaaccccatctctactaaaaatacaaaaattagctgggcatggtggcgcatgcctgtaatcccagctactcaggaggctgaggcaggagaattgcttgaacccaggaggcagaggttgcagtgagccgagatcttgccattgtactccagcctgggtgacagagcaagactctgtctcaaaaaaaaaaaaaaaaaaaaaaaaa

SEQ ID NO: 2508 - DNA, 1292 bp, Homo sapiens
ggcacgagctgggattacaggaatgagccaccatgcctaacgagtataaaatattgttgattgtgatgtttcatgcacgtaagttttcaattttgatgtaatcttgctacttgtcatctttgcttttgtttcctgtacttttgtgtcatatccaatcatgtgtattatatatatatatatgcacatacacacacatatatatatatacaacagatatatataaaatgaaatattattcagtcttaaaagggaaagaaatcctgtcatttgcaacaacatggatgaacctggaagacattatgctaagtgaaataagccaaacactgaaaggcaaatagtgcatgatctcatttatatgtagaatcttaaaaaagtgaaactcatagcagcagaaagtagattggtggttcccaggggcccgagagaggaggtaataaggagattttggtaaagggtacaaactttcagttatgcaaaatgactaagttctggagatctagtgtagagcatagtgactataatgaaccatacagtattgtatactaaaatttgctaatagagtagatcttaaatgttcacacacacacactcacacatgaaagaaaatgataactgtatgaagcaatgatatgttaatcagcttgattgtagtgatcattttacaatgtgtacttatatcaaaacatcaggttgtataccttaaatatatatgatttttatttgtcaattatacctcagtgaagctgaagaaaaagaggggaaagacttaatgatattggatttggcaatgactttttggacatgacagtaaaagcataggcaacaaaagtaaaaatagataaattggactacatcaaaattaaaaacttctttgcatcagaagtcacaatcaacaaagtgaaaacacaagccatagaatgggagaaaaaactacttgccaaccatagatctgataagaggttaatatccaaaatatataaagaactcctgaccttgtgatctacccacctcagcctcccagcactttgggaggctgaggtgggtagatcacaaggtcaggagttcaagaccagcctgaccaacatggtgaaaccccatctctactaaaaatacaaaaattagctgggcatggtggcgcatgcctgtaatcccagctactcaggaggctgaggcaggagaattgcttgaacccaggaggcagaggttgcagtgagccgagatcttgccattgtactccagcctgggtgacagagcaagactctgtctcaaaaaaaaaaaaaaaaaaaaaaaaa

SEQ ID NO: 2509 - DNA, 935 bp, Homo sapiens
  misc_feature (691)..(691): n equals a,t,g, or c
  misc_feature (806)..(806): n equals a,t,g, or c
  misc_feature (861)..(861): n equals a,t,g, or c
  misc_feature (868)..(868): n equals a,t,g, or c
aattcggcacgagctatattcttcttgatttctagccttttattggctctcagattgccagagttgggactcaatagtaagtaaccattttkttgaggtggtagtgattctaccagggtgagtwatcatgacagcagaatcactgcgtttttytctctactctgtggcatagactctatgccatagagtgacgtgtgaaaggcttgaggctccctacctacgagacaccctggtccattctagcagtatggcacgtgctgactgggttttgagtctcttgctgtataatcacattactgcacttccctgcattttctcatccaaaaatggggattacctgctttgtggatcggtttgcagatgaaataacacacgcagggtatctagcacggtcccccacatggcacattcagtgttagccacacttccatactaactgccctgcggggatatttaatgagctcttaaatggcagaaatgttgtgtcttttcctgttcccttagtattcctatttttgttggtaatttttcttatgaaccatgcagttgtctagttcaggccattttagtatgcagttttatctttgcttccaacatgatttaatgttcccaaattggatttcacataatcctagtgtcctttgagacttgaattggttctaggccaaaaaagggtgagggggaaggaagnaattcagagtcaaatttggcaaataatatatccctgtcgttttgttttttctttttaagacttgggccgggtgtggtggctcacgcgtttaatcccagcactttgggaggctgangcaggcaaatcacctgaggtcaggagctcgagaccagcctggccaacatggtganaaatacnaaaattatccaggcatggtggcccacgcctgtagtcccagctactcgggaggctgagacaggagaat

SEQ ID NO: 2510 - DNA, 2180 bp, Homo sapiens
ggcacgaggttattctagttatacattcgtctaaatttttttcaaagttttcaacttctttgcctttggtttgaatttcctcctgtagcttggagtagtttgatcgtctgaagccttcttctctcaactcgtcaaagtcattctccgtccagctttgttccgttgctggtgaggagctgcgttcctttggaggaggagagacactctgctttttagagtttccagtttttctgctctgttttttccccatctttgtggttttatctacttttggtctttgatgatggtgatgtacagatgggtttttggtgtggatgtcctttctgtttgttagttttccttctaacagacaggaccctcagctgcaggtgtgttggagtttgctagaggtccactacagactctgtttgcctgggtaccagcagcggtggctgcagaacagcggattttcatgaaccgcgaatgctgctgtctgatcgttcctctggaagttttgtctcagaggagtacccggccgtgtgaggtgtcagtctgcccctacttgggggtgcctcccagttaggctgctccagggtcaggggtcagggacccacttgaggaggcagtctgcccgttctcagatctccagctgcgtgctgggagaaccactgctgtcttcaaagctgttcagacagggacatttaagtctgcagaggttactgctgtctttttgtttgtctgtgccctgcccccagaggtggagtctacagaggcaggcaggcctccttgagctgtggtgggctccacccagttggagcttcccggctgctttgtttacctaagcaagcttgggcaatggcgggcgcccctcccccagcctcgccgctgccttgcagtttgatctcagactgctgtgctagcaatcagtgagactccttgggcgtaggaccctccgagccaggtgtgggatataatctcctggtgaaccgttttttaagcgcgtcggaaaagcgcagtattcgggtgggagtgacccgattttccaggtgccctctgtcacccctttctttgactaggaaagggaactccctgaaccccttgcgcttcccgagtgaggcaatgcctcgccctgcttaggctcgcacacggtgcgctgcacccactgtcctgcgcccactgtctggcactctctagtgagatgaacctggtacctcagatggaaatgcagaaatcacccgtcttctgcgtcgctcacgctgggagctgtagaccagagctgttcctattcagccatcttggctcccggatccagaaatatgttcttaattatatggtggcgtgcttgatgtttgggatgcaattcccttgtctttgttttccttgatctctcttataagttttatttatttatttattttattttttattttattttgagtcggagtttcgttcttgttccccaggctggagtgcagtggcgtgatcttggctcactgcaacttccgcctcccagattcaagtgattcttgtgcctcatcctccctagtagctggattgtaggcacccactatcacacccagctaatttttatatttttagtagagatagggtttcgccacgttggccgggctggtctggaactcctgacgtgaggtgatccacccggtcatctaaagtgttgagattagaggcatgagccaccgtgtctggcctcacataagttttagaataagttgtcaagctccacaaaaagtcttgctgggtttgtgattggaattacatttaactcataatttgtgttaactaatattttccaatgcatgatcatagaatatctttgtgttcagttcttcttttttgtatttaaatgcatttttaaatcctcttgaaaatcattcggccgggtgcggtgctcacgcctgtaatcctggcacttctggaggccaaggcaggtggatcacctggggtcaggagtttgagaccggcctggccaacacggcaaaactctgtctctactaaaaatacaaaaaaattagctgggtgtgctggcaggtgcctataatcccagctactctggaggctgaggcaggagaatctcttgaacctgcggggcggaggttgcaatgagctgagattgcgccactgcagtctagcctaggcgaaagagtgaaactccatctaaaaaaaaaaaaaaaaaaaaa

SEQ ID NO: 2511 - DNA, 948 bp, Homo sapiens
ggcacgagcaagaggctgtgtcattttttaagaggatggcaaggatgacctcaaatgagctcaacaaaactgggaatccaaggaatggtgcttgtagggaaagagaggtcagttgtggtccttaaacctcttggcaccttgtgcgggttataaaacaaggagctggagtaaaattgcccttacccccaatccaaatgctgtccaggatttaggagctacccaacctgtggttatatggtgttggtttccattttttgtttgtttgcttgtttccaaaatagccttgcttggtactgcatggaaagttcaagcttttcttcttgcccgctcagggctggcctcttccccgtgtcttcacagcgtccctaaggaagatttttgcagcactctctggagctgaggggagtgaaatttggtccagagaaggcggaaggaaatagttttcctgtttccttttctcgaggtggatgtcctcaggcttccttcacacctccttctcatgggtgcggctggcagtacsgtcaggctgtggaggagggctgagaagaaaggggcactggtccagccccaggtttggtctgagacaggtacacagcagataccatcccaccttcctctctaaagaacaggccagccacacatataaccctttccctactttactaatgtatcccttatgtggtaccagcaatggaggacaggcagacttaccccctgccatctagagagaatgttgttattacccgtaaaacttgaccacccccatatcccactcctttttgtaaaaacaaatgcttaaacctgtgagcctgccgttcctttctatgtgttaatcagtttccttccatttgagctgtgtgggagggaagggcattgaaattgtaggttgtaatcttgtgccaaccaataaaaaccagtatttcacacacaaaaaaaaaaaaaaaaaaa

SEQ ID NO: 2512 - DNA, 844 bp, Homo sapiens
ggcacgagtttgatgagaaattagaagagtacctaatgttgaaaacatgacatgcgctcttgggatctgctgttctctccagggctccagaacctgatacctgttaccaaagctaggaaagagctttatcacaagccttcactgtcctggcatgagaactggctgccaggctcagtgtaccccattaactgtgaatgaatctgagcttggtttcctttattgcttcctctgcaatatgattgctgaaacacattttaaaaattcagaagcttgtcactcctgttaatgggaggatcagtcacacatgtgtagtacaaggcggactttgtgtttgtttttggtgttaatttttagcattgtgtgtgttgcttccccaccctgaggagaggacaccatggcttactactcaggacaagtatgccccgctcagggtgtgatttcaggtggcttccaaacttgtacgcagtttaaagatggtggggacagactttgcctctacctagtgaaccccacttaaagaataaggagcatttgaatctcttggaaaaggccatgaagaataaagcagtcaaaaagaagtcctccatgttggtgccaaggacttgcgaggggaaataaaaatgttatccagcctgaccaacatggagaaaccccgtctccattaaaaatacaaaattagcctggcatggtggcgcatgcctgtaatcccagctactctggaggctgaggcaggagaatcgcttgaacccaggaggcggaggtcgcagtgagccgagatcatgccagtgcactccagcctgggtaacaagagtgaaactccgtgtcaaaaaaaaaaaaaaaaaaa

SEQ ID NO: 2513 - DNA, 608 bp, Homo sapiens
aattcggcacgagctgaggaggtataccatgtaaagttggcctttactgagattcacgttttcaaaatgcaagcacttcaaacagcatgtttctttttcctcttgttagctcaaccttttcaatgaacaaaaaaagctgcacagagtttctgattggttttataatgagatcattatcctagcttgatcatgttatagaaaccactttccagtccataaactgcaatgtagaactgaaagtcttgaaagaacacaccggaacagtggtcagcctcctgatgattgattctagtcttctcacctctttggcagcaggttctgtgaggtgactgttacaggaagagcattgcaatctgtaagctcagctatttggtctgtttctagagatgtgaaaaaagaaaacaacaacaaacgtttgagttattttttcccccaaacagggactctgtggtaatttcattattggtagttgcaaaggaaaaagcactcaaatgaaagaaattaatgtccaatttgcctttcagtggcccgaagcttatctgatagccattgcaatcgaatgaatggatgacttttaaagagaaaaaaaaaaaaaaaaaaaactcgag

SEQ ID NO: 2514 - DNA, 1595 bp, Homo sapiens
  misc_feature (1284)..(1284): n equals a,t,g, or c
gcgccgcggcccccacctctgcctccttctactcgggcgccccggccgccgccacctctccccagcccaggagaggctgcggagccgcagccgcccagaccgcgcagcggggaggcaggttccgcacgaaataaatcagaatgagttatgcagaaaaacccgatgaaatcacgaaagatgagtggatggaaaagctcaataacttgcatgtccagagagcagacatgaaccgcctcatcatgaactacctggtcacagagggctttaaggaagcagcggagaagtttcgaatggaatctggaatcgaacctagtgtggatctggaaacacttgatgaacgaatcaagatccgggagatgatactgaaaggtcagattcaggaggccatcgccttgatcaacagcctccacccagagctcttggacacaaaccggtatctttacttccatttgcagcaacagcatttgatcgagctgatccgccagcgggagacagaggcggcgctggagtttgcacagactcagctggcggacagggcgaggagagccgagagtgcctcacagagatggagcgtaccctggcactgctggcctttgacagtcccgaggagtcgcccttcggagacctcctccacaccatgcagaggcagaaggtgtggagtgaagttaaccaagctgtgctagattatgaaaatcgcgagtcaacacccaaactggcaaaattactgaaactactactttgggctcagaacgagctggaccagaagaaagtaaaatatcccaaaatgacagacctcagcaagggtgtgattgaggagcccaagtagcgcctgcgcttgcgtggtggatccaacaccagccctgcgtcgtgggacttgcctcagatcagcctgcgactgcaagattcttactgcagtagagaactctttttctcccttgtacttttttttgacctggcatctttttatagggaaaaatggcctttgtaggcagtggaaaacttgcaaggaaagctgccgtctctttggcagtctgatgcagagcctgcactctggcactcgctgaagaatctggaaggttgcggtttgctcttccagtgttcgggggcctctggctgctgaaggattcggtctaccacggagggctgtgctgttaggctgcatcccactcaaaatacaggaaaagcacgaatcatgattctgctttctgttagcttaggcagacattgggccttcacctacaagtttttccttacccctgtggtttttgtgtttttttttttttnctttttccataggaaagaatatataaatttgtaaatcctaattcaaagatggctcatgtgtgagggcattgagtttgatttgttttccctttggtctgggttgtgtggcttttgggggatgcgtgtgagggggctatgtgttttttaattttttaaatatatattttggtgctgtgtgtggtaagagacttgttcctagtggatcaatgaaccatctcttctgggcagttttgttgaaaataaaggtttctctttgatttcaaraawraaaaaaaaaaaaaaaaaaaaaaaaaaaaaaaaaaaaactcgag

SEQ ID NO: 2515 - DNA, 953 bp, Homo sapiens
ggcacgagcagaattcctgttgggacaagagtaggaagaggcaagactgaatgagtggtcctctgcatggacaccactcactcctgaggctgctggcagcatgtaccctcatcctgcctcactccttagcagctagtgtgaacgtgaagaattgagaaatatagtgatcacatcagtgtgtattcattctggtcagcaaactaggcatatcttaagttttttaggaaatcactgttggcctccttttgtgtatcatagtgcaaaacagttttaattagttgaattattatagatacacaagaatttagaaaatgcgtctgggcgtggtagctcacacctgtagtcccggcactttgggagtccaaggcgaatggatctgcttaagtccaggagtttgagaccagcctgggcaacatggtgaaaccctgtgtctacaaaaactaccgtgtctacaaaaaaattagccaatcatggtgttgcatgtctatggttccaactactttgagaggctgtggttggaaagatcacttgagcccaggagttagaggttgcagtgagccgagatcacaccactgcactccagcatgggcaaaaaaaaatgagactcttgtttaaagaaaaaaaaaaagagtttagaaatggccattacgggccgggcgtggtgctcacgcctgtaatcccagcactttgggaggctgaggtgggtggatcatgaggtcaggagatcgagaccatcctggctaatacggtcaaacccmgcctctactaaaaatacaaaaaatcagctgggcgtggtggcaggtgcctgtagtcccaactactcgtgaggctgaggcgggagaatggtgtgaacccgggaggcagagcttgcagtgagccgagattgcgtcactgcactccagcctgggcgacagagcgagactccatctcaaaaaaaaaaaaaaaaactcgag

SEQ ID NO: 2516 - DNA, 1320 bp, Homo sapiens
ggcacgagccaattaacccagaagtgtttattgaagatactttttcacctgttgcatttcaggggcacctttatatgtgtgtgtctgtcttgtctatctttgtgccccagctacactgccttaattatagtagttttgtgagtctcagtatctgatagttaaatcttccagctttattcctcagagtgccttggccattctttttttgtttgtctgtttcaaaaaaaaaaaaaaaaaaattccagagtctagaaattcggtcatttttctctttatgtaaggtaagaattaagaatcctcacatctgcaaccaaaaatacaagcctggtgtgtaacactaaagggtaaaacagggatagatataagctgttatgctattcttcaggcaacactgtggataagtgacattcagatgtttactgtaaagaaaaatttgaatacatttgtattgaagggcttttagaaaagagcattactacacagaactgagagttgaaaatatgaaggtgtggaagattaagagaacgcgtttactttaaaagataatttaaaagttatctttccaggctgacacggtggcccactcctctagtcataacactctgggaggctgtggtgggacgatccctcgagcccaggagttcatagaccagcctgggtaatatagggagaccccatctctatctaaaattttttttaaaagaaaataaatatctttacagttatttttcttagtcctatgttctttattttggtgttttccattggatacctgcatgccaagtgttgtgctacagtattactgaagagtataatggaagtaatgtcctgctgaaaattttctttgagatattaatcattaataatttatatattgctatttaatacttacataggtctttagccttttaaaggatttctgtttgacagcttttataattgaaagttattccatttttttttaattttgcatgcttgaaaaagatgaaaacagtgatttaaattatgaagtatggggccaggtgcagtggctcatgctggtaatcccagcactttgagaggctaaggcaagtgggtcacttgagcccaagagttcaagaccagcctggccaacatggtgtgaaaccccgtctgtactaaaaatacaaaaattagccaggcgtggtggtgcatgcctgtaatcccaggtacttgggaggctgaggcacaggaattgcgtgaacccaggaggcagaggttgccagtgagccaagatcacatcaccgcactgcagcctgggtgacagagtaagactctgtctccaaaaaaaaaaaaaaaaaa

SEQ ID NO: 2517 - DNA, 617 bp, Homo sapiens
ggcacgagcaaggccgtagagctggtgcgtgcgggtagcggggctctccgaggagccgcacgccggcggcaccatggtccacctcactactctcctctgcaaggcccaccgtgggggccacttaaccatccgccttgccctgggtggctgcaccaatcggccgttctaccgcattgtggctgctcacaacaagtgtcccagggatggccgtttcgtagagcagctgggctcctatgatccattgcccaacagtcatggagaaaaactcgttgccctcaacctagacaggatccgtcattggattggctgcggggcccacctctctaagcctatggaaaagcttctgggtcttgctggctttttccctctgcatcctatgatgatcacaaatgctgagagactgcgaaggaaacgggcacgtgaagtcctgttagcttctcagaaaacagatgcagaagctacagatacagaggctacagaaacataaatgagctgacttcagtgagcatagcagtgggaacaaggtcaaggtccttttgaaacactgcagcgatcttaattttgttagatttggagttcaataaatggagtatcctgaaaaaaaaaaaaaaaaaaaa

SEQ ID NO: 2518 - DNA, 536 bp, Homo sapiens
ggcacgagcttgctgcggcagagacgccagaggtgcagctccagcagcaatggcagtgacggcgttggcggcgcggacgtggcttggcgtgtggggcgtgaggaccatgcaagcccgaggcttcggctcggatcagtccgagaatgtcgaccggggcgcgggctccatccgggaagccggtggggccttcggaaagagagagcaggctgaagaggaacgatatttccgagcacagagtagagaacaactggcagctttgaaaaaacaccatgaagaagaaatcgttcatcataagaaggagattgagcgtctgcagaaagaaattgagcgccataagcagaagatcaaaatgctaaaacatgatgattaagtgcacaccgtgtgccatagaatggcacatgtcattgcccacttctgtgtagacatggttctggtttaactaatatttgtctgtgtgctactaacagattataataaattgtcatcagtgaactgtgaaaaaaaaaaaaaaaaaaaaaaaaaaaaaaaaaaaaaaa

SEQ ID NO: 2519 - DNA, 451 bp, Homo sapiens
  misc_feature (6)..(6): n equals a,t,g, or c
  misc_feature (27)..(27): n equals a,t,g, or c
  misc_feature (34)..(34): n equals a,t,g, or c
  misc_feature (434)..(434): n equals a,t,g, or c
  misc_feature (437)..(437): n equals a,t,g, or c
  misc_feature (447)..(447): n equals a,t,g, or c
tcacancacactcccctctttaaagtnaacaaangctgcagctcgcgcgcctgcaggtcgacactagtggatccaaagaattcttttttttttttttttttaactttaagttctgggatatatgtgcagaacgtgcaggtttgttacgttggtatacatgtgccatggtggtttggtgcacctatcaacccatcatctaagttttaagctctgcatgcaataggtatttgtcctaatcctctccctccccttgacccctacccaccagctggcccaggtatgttatgctccattccctgtgtccatgtgttctcattgttcaactccaaaaaaaaaaaaaaaaaaaaaagaattcaaaaagcttctcgagagtacttctagagcgaccgcgggcccatcgattttccacccgggtggggtaccgggtaagtggncanttttcgcggnagta

SEQ ID NO: 2520 - DNA, 272 bp, Homo sapiens
  misc_feature (271)..(271): n equals a,t,g, or c
attctctttttttttttttttttttaaaaatttgtcagtatgtgccttatggcccagaatgtggtatatcttcatgaaagttccatgtgaactcaagaacaatgtgtaatctgcagttacgagtgtagtagtctataatgctcattatatacacttgaagaatggtgttgctgagtccagctatgtctttacttattttctgcctgccagctctgtccatttcaaaaaacaaaaaaaaaaaaaaaaaaaaagaattcaaaaagcttctcgng

SEQ ID NO: 2521 - DNA, 1346 bp, Homo sapiens
  misc_feature (14)..(14): n equals a,t,g, or c
  misc_feature (19)..(19): n equals a,t,g, or c
ttgcagaattggcncgaanaaaagcagtactgactctggagttgagcagatgtgggttcaaacccacatgtacatgtgaccagcagtgtcatcaaagagagttctgcatttctctgagcttcagttttcctcctatgcaaagaggggatcacatctactaccaagatgcaaaacagttagtacaaaatgactgctcgcagggccacatttatactgtggatgcattttggtcatattttggtaacataatctgatgtggctgactgtgtcatggcttcatacctttcatgctttggacttttgtgctttctgcaggaacgattccaggtgaagaatcctccccatacatacattcaaaagctcaaaggctatctggatccagctgtaaccaggaaggtaagatggatttgtttccactctttgttattgcttccttattagcgagcagaatcctcctgcattggaagagaccttccttcctctgcattagagcctctgccagagcctccacaaaaaacaaccttgggagaccaacaacgtaagaagacaaaggaaaaaaaacaaccttctcacttgaagatgtgtataaaagttctttcctgacatgagagtcacgtacctctgatggttgttgagtcactgctatttccaattacatagggcagtgagtgcattccagaggtattcaggctcctagaagagcaggctttgcaaagggaatacttgcctttcagttttttatgccttggtgcatttccagagaccttgaaaaatcactgggcctttgtcatcccagctgtgcactcacatcctgtgttgatgcttttagcagctcccccctactccccccaacccctgcccctggcctgagaaggtaagtagagaatagctgattccattctcaacagactctccccttttacaaacaagccctgctttgtgcagccacacaattggtttaaactgatgcctcgtggtaaagcatgtagcctggcacggccctgtgggcctgaatcagtcctgggatgtctcagggcagagctgtccttgctcaagatgggtgaaggggtgctttaccagatagcatttgtttttccattgacctacaactcctgcttttaaggctcctgcgaaaatctctcaggctgattctctctgktgkttcagtgtgtgattcttgagaaaagaatggtatactttacctagttagccattttcagggctcttgatgcttgcattaaaaaaaaaatctttttctttatcttctactctaactcttcctcccctcaccgcccaccccccgaccaaaaaaaaaaaaaaaaaaaaaaaaaaaaaaaaaactcgag

SEQ ID NO: 2522 - DNA, 638 bp, Homo sapiens
attacgccaagctcgaaattaaccctcactaaagggaacaaaagctggagctccaccgcggtggcggccgctctagaactagtggatcccccgggctgcaggaattcggcacgagattaaccatcagtctgggctgcaacagaggaaaagcagtgatttggcagtgccaatgggactcagatgggtacccagctcctttttttgctatgctcaattttaatccccctatgtgtggagttggactacatattcttgaagcagtcttccctaaataatcttgtagtctagctaatgtcaaatgtttaattggcaatgagctgaaattgcctctccaacaagggcccatttggatgccacttgttctgtgctgccaggtagatctatgtccatgtgctttaacaggcagttgagtgtggagagggatgacaccctctcttgggaataaaactgaatatatgccacgccaccttcccttagagtagagttgatggaatccctacaggcacagccaagagccttcttagacaaggcattttgctgttgttcttttaatagtctcgggtctttatttgactcaaaccgaacactgcacgtctctcatatttaaaaaaaaaaaaaaaaaactcgagggggggccc

SEQ ID NO: 2523 - DNA, 923 bp, Homo sapiens
ggcacgagctacagaccacatagcctgggcaccagagagaagctgctggcgtcagcggccccttctgtggctctggcctccatgcaccgagcagctggacacctgtctgtgcagggaatgacttgatttaaatgacataaaacgacaccaaatggtagaatggacactggcggtgcttgtctgtcatctctttcttattctttatttgtttctgttctgtgagaattgcctagtggtgtcatgctgaacctgcctctctgtgtaggtggcctttcttcagtgagtatttgcgaaagtgttgggaggtagtgagagtcgttgcatctttttctggcacttccttggtgggaccagccacttacgtgcaccctgaaagtcaagacgctcgtcccgtcttccccctcggcggttttcagtaagcgagcgcgcagttgaacgtttctcacctgaacaagtccccttcgtcatgagacggggcggctataacattgccaaacacatccgtattactcgcatcaggagtatcaatcacctgagctcaccatagtctaatagaaaacaaccgaaaccaaataattcaagcactgcttattacaattttactgggtctctattttaccctcctacaagcctcagagtacttcgagtctcccttcaccatttccgacggcatctacggctcaacattttttgtagccacaggcttccacggacttcacgtcattattggctcaactttcctcactatctgcttcatccgccaactaatatttcactttacatccaaacatcactttggcttcgaagccgccgcctgatactggcattttgtagatgtggtttgactatttctgtatgtctccatctattgatgagggtcttaaaaaaaaaaaaaaacaaaaaaaaaaaaaaaaaaaaaaaaa

SEQ ID NO: 2524 - DNA, 1957 bp, Homo sapiens
ggcacgagtcgcatttccagacacagcagaaggatgcacttctggttgattctccttgctgttgtcatgaccaggagaattctggtccacatccattcttaattggttgattacatttgatccggaggccatgaaattggccagttgattataccctttcagaatggttctctttgggaactgcagtctggtgttacactggatggggagtttccttgtggtttttactccttctacagaaatgcacttctttctcccaaagcaagtctccttcccattgtccctcataactcttctttggccttctctcatattgcagaagatttccaggttataacctggaaatttcattacttaggaacagggccctcatggggactaagaatcatcttctgctgtgggcccttcagagcaggttcctgcattccaccctcagctgatccatagcactaagaagacagggggctccctgacatgagctttcaggatgaggtaaggggagggtctgcagcatcccaatcatttcatgcagcagctgcttgggcccaagctagctgtggaacagcaaggatggctctgtttgaagggctgatgaggaaggtctagcctcccatgtgaaagctcaagtcaccaggtggcctctcttgggactgatgttctttgagcatataccatttttctagcgtataatgttcttggttacaatttatattgactcagctgcaggcactctgctgacacagctgtgttgtcatctgaagattgttaattcctcatataaatgtaatgatacacacatatagctttggtctgggtctgggtggaaaaaaagtgagcaagtgccccctctctaaaattacacaggagccataaacccgcggtaggaggctattactaaatctagacatctcgtactagttaatgctttgctagctaggccttaaatcatgccactcatattattctctcacttacaccccttctacaaattcactatccttcaccccgcccctgaccacttttcccttctagggcacactccagaaatgcagccacagcaatatttcttatgtatattacactgcaactttgatatttgcttaataaaatttggcaacacatggtccgaagtgcttagttttcttggggcactttctaagtgatttgtacctctgatttgattattcagtccacaaaaaatctgctctttagacctgtctagagcatttgcattcagtctcttttgtctctggggaaacaagtgagccttaggccacagaagatgctctaatttgcccatccctttatgataacaagaattagccagccaaagactggaataaagcaatcctacttatttcttattttaccatgaggataaaatgatcacatgcaaaaaaaaaaaaattagcaaggtatacactgcaaacaagtttcggggagacagagaggggtagaagattgtggtttcatttgcgaaattattatgctcatattttccagtttggttaatccacacttaccttactttccctgttcatgttcacattagtggggttattttctcaggatgcaagttatagatagtccatgcaagtgttttcttaggtaacctttggatctaagtagcatgaggtcatgattgctcaattcacatatgaagataataggagtgagaaaatggcccagaattaagggcagttaaacaaaaagttaattgtgaagaggataagcttatgcagcccctttcctgaactttcctaaatccgttttattatagtgcccttttattataaagagaaaacttctctgtaggctttcaaagatcagagctcttcagtcccggctatactaaccattatttaaccttaataattagaagtctttctctccatgcacttccttccactggggactttatgtcaacccctgcccccaataaaaaaaaaaaaaaaaa

SEQ ID NO: 2525 - DNA, 1870 bp, Homo sapiens
gggagcctcaggcacttgaaactcacctcgctgtcccttttctttgccacttatttatttatttattttacaaatgaaatttaaaaaacccaaggccaaagtgggaaatgacttgctcaaggtcatccatattcctaaccctccttttactggggcatagggcaatattttccaatatgcctgaaaagcttaggtctctaatcacagataacttacagcttttcacaagcaagagttttggccaaattatgccagttaaggaatgtaaattttataaatgatgaaatactgcaaccaattagtgcaaacaaacatttattgtgaaatattcatcctaccctttattaggtattacatcatcaaagcactttgtggcaatgaaaatagctttttttacccctctaattcacccaatattccattaaagctgcaaaaaatgtgcaatctgcttgaaaaataggttgctcttatttactcatttgtgaaaagtcaaaaattaaaaaagaaaatgatactagcatacagggcctctagagccaattcacctttccatttcccaactactccccaaaataattaacaaagataatttgttttaaatgcctttttataaaaccaatgcacctttccccatattataatcatacaaattttaaaaagccgttatttactttcttggaaaaaaggtggccagccgttgttttttgattgggagcatgtgtatttcctgggagttcactttctttaactttatgctccggtttttgatgggtttcctaaggggctctgcatttcccatggactcttccccttggctgttgatgtcatagccctgaagcacggagtcttctcttttgaaggagaagtttttggtggacacccctgagaggcctttgatcttgccacagaatatggtaggcacagcatcttcgacagagacaatgaccttggccgcctgggactcgcccaccatctcaatgttattttcagccttgacttcgccgctggggtggttgggctggctgagcatctcggtamgcatcactgctgctgatgtgactatccatcatggctggggcctcatgggacgtggcaggggcaaaagaaatttccatgccactgggaagtttctccatcactgtgtgacctgagctgtccactgatgcaccactgtcatacagtgtctcagggggaggctcggatttccggtgggctgccactgacaggtctagggctgcatcttcctggaagattgggggactgacttcaccagccttgagccagggcactgacttcatggagagatccagggcctcgttctcacttcccatcttaatgaccgtgtggcggctgagctggaagtactccttaggctggaggatgtcaaagggcttcagttcatctttttccagaggggtctgggtgcctttaaaggggtgcaggccgaaggaagatggtggcttggggaaactggagctgaacttggattcagaactctgaggcaccgggatggggatgggaatagggactggcacaggcaaggggacgattacaggatacggcaccaagagggtggctggtgggaccaggggggacaagggggagctaaaaggctgtgggggcacagggkcatagccaggaggaggctgacagggtgggggcccgagagtgcccctgggagggaaacaaattctggagcacagcttcaaatggcaaagtgggctctgcggctggctggggatcctcaggtccaggagctggggctgggcctcggggtcctccgctccctggaagaggttgttgtggatggtactggagcggacgcgtgggcggacgcgtgggcggacgcgtgggcggacgcgtgggtcga

SEQ ID NO: 2526 - DNA, 1157 bp, Homo sapiens
ggcacgagctttgatattccttctttcttattcatttccatgtcactgcctgacttcaagcttttatgaagcttgaagttatatatcaaattgtaactgatctcctaattctcattttgtgtgtgcattccccaaatcattcttgacatatctgtgcaaatctcagcatgtcactttcccagtagtaggtatccatcagctccctgttaatctccatgaccagagattctgtccacctctccagcctcatcttgtgagcttctttccaatcacctcatcctttgcctccttagcttttgcctcggctggcctgataaacctctacctgcctgccaagtttcagttcaagccttagctctctgtcaagctcccgcagtccctcacccggactcacatgctccttgcacctgcagtgggtcagctgctttacatatattggactctttacttctcacgtagctttttaaggtgggtgggctttgtctccactttgcaggtgagaaaagtgaagctcagagagcttaagtaatttgctgacagtcacacagtaagaaaatcaagtggcaaactgaaatacaaagaacctgagctcactcctcaacatgttgctccttggctttagctttgcccacacctgcttttattttgttacgacgtttgtcacatttactgtgtttgcaattctccatttctgctacactcgttgaaagcatcagccccacctttcatctttatgtctccaaagacctgcacagtgtctggctcatgagaggtagttaagaaatatttattaaggtgatgaatgaaccaagcaatatacaaccaatatacatattcttttctttgtggtggtgtggagaagaaagggagaagtaataagttccactttctggagtggaagggttctagtgggacaatagaagattgtatgacctccagaaccatcttaagagtgattttaggattagctactaagggccaggcacaatggcacacacctatagtcccagctagttagaggctgaggcaggagcattgcttgaacccagaagttaaaggttgtagtacactgtgattgcatctatgaatagccactgcactccacctgggcaacatagcaagaacctgtctctcaaaaaaaaaaaaaaaaaaaaaaa

SEQ ID NO: 2527 - DNA, 1084 bp, Homo sapiens
ggtttcatcagtatgattatactcctaggtgaaaaaaaagatggagacaagggaaaaaatgaagttaacgaataaaacaaatgttatttcagatcacggccctgtgtgtgttactaaggaaagatataaggatttataacatatatttgttttccatttatttttatgaaggaattaaagaaattatcagaaaatactaaaagggaacaaagcattttaaaaacattccaacaatggcatgctgctttttatacagtatgcagtgaagttccttgcatttcaaaggcaagggtagctaaatctgcctcagccccttagcgttctgtactacccttatcttgccatttacaacatgaaagtataataatctatttacatgctggtatataccactatgagtttctgacaaacatggcacatcttggtggtagttcatttattctacaaatacttattcaatgtctactatgtgccaggcacacttttggacattttggatacatcaggtaagaatataaatacctctgccccatgaaccttacattctacctatattgcaaagttcctagcacatcgtagatttcttctcatggtcataagatgtctgcaccaattctaagcatcacatcttcatagaaaagcatccaaaacaggarggaaaaattagaagcaaaagggctttctccttttgggcctttcttttcataggaaagaaaatctttcccagaaccctcaaacatgtgatctggaccaaacactggctggcaaagagtggaatttcttaagtctgagcaacaagaagaaaaccgttaccataactaccaactcacctgcatctgtgccatgtgcttgcctgcccacctataactaaggatgagctgtttgtagtcttaggtcaactcctccacttgtgccttggatcctgccgcacgcccccatcacctacttgcggacattactccaacagttcttttctttctgtcctgtattatcaaatttctgttcttactggattttcatgctctttcatcattatgaaagcatgcagtaatttcttcattaaaaaaaaaaaaaaaaaactcga

SEQ ID NO: 2528 - DNA, 175 bp, Homo sapiens
aattatggttaccccctacacagatgtgaactcatggaggaactgaaatccttcctacaaagctacacagtgactgtgacaatggtgatgcacaccaggctactgttcagaatgagtttatggccagtaaactgtggtcaggaaacttactgcaaaaaaaaaaaaaaaaaaaaaa

SEQ ID NO: 2529 - DNA, 2845 bp, Homo sapiens
  misc_feature (727)..(727): n equals a,t,g, or c
gaattcggcacgagcctaaatgtattgattacttgtccccttcctcctttgtgacaactcagatgtattatatccacatactacttactcctctgaattcctccagggtagttatgcttttgcaagatgtggtaagtctatattgacaaagaaactcccagttatctatcaatttgttcctgaatgaatactgatgaggacattgttgatgatatcctaacgtatcttttgtatggggaagacctttgtctcagttgggammgcaatgaggcttctcctaatttggcaagcctttttatgccctaaactcaccaagtcttcccaatctttcctctttctagcttatcctatttctctttaactttctttatacgtatttttatttgtttttagtatgttgtgttttatgtagctttatgaactgtactttttcttctcctcctctttttttcttcatcttttaatagaggaatgtcaattaaaaaaaatctttttcaggggaagatagaaagagtaggatatattagtgtgtttgtttcctagagctgctataacgaagtactacaaaccgaatggcttagaacaacagaacttgattgtattccagttctaaaggctggaagtccaaaatcaaggtgttggtaaaaccatgctccctaaatatattggggaggatctgttccaggtctctcactttctgtcttcttcttctctttgcctctcatancttcaggtgttccttgacttgtaaatgtctgtcttcttccttcctttgtgtctcttcacatcatctttcctctccatctccctgttcagattttccttgtataaagamctcagtcatgttgaattagagcccaccctaatgacataattctatgattacctctgttaaaaccctatttgcaaataacgtstmttctgagacactgagggtttaggaattcaaaatatatkttttgaggggcagacatttcmacccacaacaagcagacacaatgaaaaaattaaagcaaactggattttaaaagatagagatgagatcttctaggcccttcaaagagaacttcagtgagacaactagttgaagacagtgtttaggctgtttttctatcatgcaaagaattccttctttgtatttatattttgctgctccatttctctttgacttttcctttcctttctttttcttctctcttctattttttaagagggaatataccctcttggtaaaaaattcaaaaggtctacaaatttaaatttacatattttacamagtaatgcaatatttattcattttataaatataaaaaaattaatatgtaatcattttagaaaagttttaaaaagcaccgttaaaaaagcacaacaaaaacaataaacttatgcaaaatttcaaacctaacagatcatctctgacaattttaggatttatatttttgttttatatatacaatatagttggatattttatacaattgatattatttcatatacccattttctagtccttttagcactaacaagcatactatgaatattttctcctgtcactaaatatccttcacagcatgagtttttgcagtgttctatgaaataaaataccataaaattttcaaagtcttttgtggtatatttagattgccttcaattttacagtaccatacaaataattctgtgatgaacatatttgtaagtaaatctttatttaactccttgactactttttaattttcttctagaaatgaaactgctatattaaagtgtaaatacattaaaatactctggataaatgtcaaataaattatagccaaacatccatcatggccactaaaaaagtctcaataaactatttattaaatgtctagttttatcacatgtgactttcctagtttgccatctgagacaacctaattaaaaattactcccttacgtattatagctacataagataattagctacaaaatacctatgtctacaaaaatgcttgttttacttcagaaaagtttagacaatatttttttcccacatagtaatctagtgcatgaaaataaaatgtccaaaaaatttatatcagagtttaaatgagtatggtggtttctaaaacagatgcaaatccttttaactttcctcccattgaaaagtgcagtctatctttcctttccttctccctggtagacttgtgaccaattccaccaataaaggatggtggaactgacactgcaacttctaaggtgacactatgcaaaggccacttggtttgcagcttccaccttgctttagtggaatacttggttgtcatgggggaagtgttccttgagccaccatgttggagaggggacctatagacacttggacctatagtcccagctgagctcagccttgcagccacatccactgaggtgtcaaatattaggttggtgaaaacataattgtggtttttgcatttttgaaatttgccatttgatattggaatacattcttaaacaaaagtggttatgttatacatcatgttaatgtacatttatgttttttgacactgaattattactgttaattttgtatttattttagactatagaaatagtgtgagacgaaaagcaaatttgagcgattttcttattcgaattcaaaatgggtcataaagtggcagagacaactcgtaacatcaacaatgcatttggcccaggaactrctaacgaacgtacagtacagtggcggttcaagaagtttcacaaaggagatgagagccttgaagataaggagcacggcagccggccattggaagttgataataatcagttgagaccactcatcgaagctaatctacttacaactactcga

SEQ ID NO: 2530 - DNA, 2576 bp, Homo sapiens
agctttcctgtaccttctctgcaggtagatgggacaaatgagtgtccggatcagcgggagtgggaaattgaaatactacaaagatctgtttaatcctgataccaactaatctccctttcaagggagagtctgggaagctgtacagctcatttatttttaaactttttctgtttacagagatctgttggtaatctgaggatttttattctacgtcgtcttgacagatggaaaacctgaagtaacttcgggctaaccttgtgtttttggaaaattagtagacttggtggtgaagaaactgggaggagtaggatattagctaactttgcatagccacatatagagcgtcgcagctgcattccaccaaagaggaaccaaaaggcctgtggtgttcccagggtacatattcatgccagaagtgaagtgcttggtgaattcgtttcctgaaagtttatcgcatacttgtactgggttaggtttttagaacttcagccataaaaatgggcagaattttccttgatcatatcggtggtacccgtctgttttcttgtgcaaactgtgatacgatcctgaccaaccgctcagaactcatctccactcgtttcacaggcgccactggcagagcatttctttttaacaaggtagttaacctgcagtacagygaagttcaagatcgggtcatgctcactggccgccacatggttcgagatgtgagctgcaaaaactgcaatagcaaactgggatggatctatgagtttgccactgaagacagccagcgatataaggaaggccgcgtgatcctggaacgtgctctagttcgagagagtgagggctttgaggagcatgtaccatctgataactcttgaagatacagagagaaatccatcttttcccaggtctccttcactgaaaacaaaaatctacttacatacactgtcaccttagcatcagagtcggattaatgaactgcggaacaagaggttgtgagaatctaagatggaacctttctttctttctttctttttttttaaattttgtattttccatccaacagcagtgtgtagagagaatattatgcagatgccgttaattttttaccctatgtttacatcttgaggcagcagagtctgtctgcagctatgtggtgagctatgtaaggaaaaaaatctgggctgttagagtgaaaaagtgtgttttatgtcaattgtgaaaggaaaatgttaggagtatggtttttaaacttgggcttcattttaaacttttttttttaaacccagttatttcacttgatttgctagcttcagagaagagatccgaatctgtgcccagcgctaaaggctcagtgttagcatggcttgtgctggccggtgtgccatattcttgttggagatgaaccgtagcaccagagcccattcttccttgtcagtcttggcccaaagatgtcaccattcctagttatttgtcaccacataattggtgttgattggaaactttttctgagatgggacagaactgctgggttgtctttttccatgtaacttaagcatagtaatataaataaagtaatagttggatgcttttggtcctgtgttgcttttaaaaacaccttataaaagaggagagtatttgataagcaattttcatagtagtaaagttttttttcatctcttaaactaaattgaccatgcatataatattctttgtttaaatgaaagcatactgttgaaacccgcagtgttgcatttagaaaacagttgaacagaatgtcaatgtgcattcatgcaaaaaaacatttaatctgcatctgttttagaaaagggggaaatgaagcaacttgtctaaaaatactgctttacaaagcatttcagcctttccccctcagttttgcattgattttttgacaagtctgtagagcctaatagtttccatcaaaggcctagatctcttatttagcatttttttcagctcttctctcagaagttcagctgttgaaacgaaaactgtactttgtaccctcacatacaaagggatcaaatttgacctggtgttattttagccccaaatttatgacattacacaatattaaaatgtaaatgtttctttacccaaactacttctagatattctagtatttgcttctggtggaattaaatgacggtaaaattggctaattatttgaatgaatgaatggatggatgttttgcatgctcaatttctaggtcctttgtctagaaaggaaatttgcctcagttgaattagtgaaatatttctgtcgttgatattaaaagtgacttctgagtacagttaagttcctcctatttgccactgggctgttggttagaagcataggtaactgattaagtaggtatgatactgcatttgaaataagtggacacaaactatcctttctccaccatggactcaatctgagaacaacagcattcatttccattcatttccatactggcttttgattatatgcagattcctagtagcatgccttacctacarcactatgtgcatttgctgtcacaataaagtatattttgtcttgcaaaaaaaaaaaaaaaaaactcgag

SEQ ID NO: 2531 - DNA, 466 bp, Homo sapiens
  misc_feature (449)..(449): n equals a,t,g, or c
  misc_feature (454)..(455): n equals a,t,g, or c
  misc_feature (461)..(461): n equals a,t,g, or c
tccccactgtgcctatggctcatctagcctgcttccctcatttttktgacctgcctggttcccatggggaactgagtttgcaatccggggagcaatactggctgaattcatgttcatattgagagcattctgagtagctggcagggccacacagaccttagcgggaagacagggacaccactttccaggatgatccctgtgaaaactgccatgtttgcactgccctcctctgtgagacatggcttagctcaagtccttgctctggtaactttccaacatgtgactttgggcacatgtgaccttcacctctctgggtttgtttcctcactsttacgctgcaggcaatgcacatacaatatttgctactttagggctatgagatgcactagttagttgtgtccaagtcattccttttaccaacagaaatgaagagaaagaggagaaaaaanaaaannaaaaantcgag

SEQ ID NO: 2532 - DNA, 1136 bp, Homo sapiens
ggcacgagcaggatagtcctcagcaagattccgtgtcattgtgttcacaagcacactagaattgtaacaagtctcagatttgggttaaggagagatgataactgtgtctgtaggatttgcccttcctctgtcttcacaccccattcactctgagacaaaggaggtacttccagggctgctggaccagcagggatgggacctcgcctctgccctgtcttggggtcagcctgcccagcgagtaccctctgctggctccttctggcatcttactgggtcctgccgtgcagggacaagcacacgggccctgaaaagctgggtcgacatgagcaggtagcagggccttcctggacctcctttgtttcagatcccaccatcattcagggcccaatttaaaggcttctcttccgtaaagtctcccatcactccaaccatggaatccctccctcctgtcactcttctttttttttctttaacaaatacagttttatttatttacttatttatttcacaaactcttatgtagctcttcctatctctgggcactgttttaagtgacaagtattaactcatttaaactgtcacaacaggccaggcactgacgcatgcctataatcccagcactttgggaggcagaggtggccagatcaccagaggtcaggacttcgagaccaccctggtcccaggagacctcaacttctccagagttctagcctcttcttaaagggccagagtcatgggaacccagatggggtgagggggtctcctgccacggcctccttacaatgatatgacttggcataaatttggatactacctccaaatacagatttatggtctggcgtgatagctcattcctgtaatcccaacgctttgggaggccgagggaggcagattacctgaggtcaggagttcgagagcagcctggcaacacggtgaaacactgtctctactaaaaatacaaaattagccggatgtggtggcaggtacctgtaatcccagctacacgggaggctgaagcaggagaattccttgaacctgggaggtggaggttgcagtgagttaagatcgcgccaaagcactccagcctgggcaacagagtgagactccacctcaaaaaaaaaaaaaaaaaactcgag

SEQ ID NO: 2533 - DNA, 1500 bp, Homo sapiens
  misc_feature (382)..(382): n equals a,t,g, or c
  misc_feature (388)..(388): n equals a,t,g, or c
gtattaaaactacccccgccccccatagagcataaacacaatatttccttcttgggttgtctcatcgtacttagaaaagatccaaagtccttcccatggcttggaaggccttttatgatttggtccctggccaccttactgtcctcacttctcttaaacatgtcaagagcattcccttctcagtgggcttttgtgcttaccatttcctctgcctggatgttcctcctctaaacacctaattggcttaattacttatctcactccaaatgttctttagaaaggccattcttagatcatcctatttaaaatagtagtccctagccaggcccagtggtgctcacctatagttccagctactcaagaggctcaggtaggaggattnctttgnccaggmgttyaaaacyagccttgtcaacatagtgagacccccatttctttaaaaaaaaaaaaagtctctgcttcttcatttcctcttttaatatcgttaccttgctttatattttctggatgttgatcactatctggaattataaatttattttttagttattatttgtctcctccctctagaatgtaagcttcatgagtscaaggacttggttttgktcttgctgtatccgtaaagcctagaccagtgcctgacatatggcaggcacttaataaatatttgaataccaaagttaatgttatagtagtgaaggagaaattatttcaaccaaaagtatttcagtaagccatgtatcccacattatgcaagaattgggagagaaatggaaaagtacagcttacagtctgtgttcttaatcagttgtcagaatgagtgccatagatagtatatgttgaagcaattgaaagaaaagaaaatatctgtgggcttgtgggagcttcatgaaaaagatagaaattgagcaagacatagaagtagaaattaagcaaggtactacttggatttagttgatgtacaagagaggaaaggtttctgtttacacttcatctttgactggtcatgtagtttaaagcttcatgagttaatataagtatcagaataggaagtggccaatttctgtgtgaaatatgaaaatcttgcttagaaaggtcttcttgtgatgtctatgtatgtataattcataaatacacagatcattccattgtgtgaagagaaagaaatagttatggaataacctaaattatgtcagattaaaattctaatgaaagccaggtgtgctggcttatgcctgtaatccttgcactttgggaggccagtgcaagcaaattgattgagcccaggagtcaaaaacgagcctcagcaaggtggaaaaaccctgtctctacaaaaaatacaaaacttagcagggaatggtggcatgcacctgtagtcgcagctacttggggaactgaggagggaggatcgcctgagcctgcagtgagcctagatcgcagtccagcctgattgacaaagtgagactttgtctccaaaaaaaaaaaaaaaaaaaactcgag

SEQ ID NO: 2534 - DNA, 2384 bp, Homo sapiens
gatgaatatgttctttcaacaaaaaacactcaaatggtttcaagcaatataatcactcccatctcccttgatgatgtcccaccacggatagctcgggccatggaaaatgaggaatactgggactttgatatttttgaactggaggctgccacccacaataggcctttgatttatcttggtctcaaaatgtttgctcgctttggaatctgtgaattcttacactgctccgagtcaacgctaagatcatggttacaaattatcgaagccaattatcattcctccaatccctaccacaattctacacattctgctgatgtgcttcatgccactgcctattttctctccaaggagaggataaaggaaactttagatccaattgatgaggtcgctgcactcatcgcagccaccattcatgatgtggatcaccctgggagaaccaactccttcctgtgtaatgctggaagtgagctggccattttgtacaatgacactgctgtgctggagagccaccatgcggccttggccttccagctgaccactggagatgataaatgcaatatatttaaaaacatggagaggaatgattatcggacactgcgccaggggattatcgacatggtcttagccacagaaatgacaaagcactttgagcatgtcaacaaatttgtcaacagcatcaacaaacccttggcaacactagaagaaaatggggaaactgataaaaatcaggaagtgataaacactatgcttaggactccagagaaccggaccctaatcaaacgaatgctgattaaatgtgctgatgtgtccaatccctgccgacccctgcagtactgcatcgagtgggctgcacgcatttcggaagaatatttttctcagactgatgaagagaagcagcagggcttacctgtggtgatgccagtgtttgacagaaatacctgcagcatccccaaatcccaaatctctttcattgattacttcatcacagacatgtttgatgcttgggatgcctttgtagacctgcctgatttaatgcagcatcttgacaacaactttaaatactggaaaggactggacgaaatgaagctgcggaacctccgaccacctcctgaatagtgggagacaccacccagagccctgaagctttgttccttcggtcatttggaattcctgagggcagccagagctccttggtcctttcagtactaggcagaacagcccccgatctgcatagcctgtgaaagcccacggggacatcagtaaccttctgcagccaccatccaatgccattactgtcaagtgagacttggccactgtagcctgggcctgctgcaggagctcttcagaaaggcacatgaggaccacggtttgcctcagtttctggtaaaacacaaggtctggagtgcccctgcaaagggtattgatggacttcctgccagtgacagagcatgtctattgcaaacaattctctcagttacgttcagcacttaagaacggctaatggcaataggatctttagcaactttttcacatcatagaaggtgcaatcgctcacttgggaacactactgagagtgacttctcttttaaaattgagtagcagatgaaaaattaaaatttgaacttgattattaatatcaattaaaatgttttatttattttattaaaagctcaatattttctatgaattcaaaaatacttcagagccaaagccaacttcaaataccgtgaccaaatttacatgattcatattcattatgcattacttggtatacagacttattttcataatgcaaattaataaaatgacacttttactgcactatagaaatattcatgtatgttaaacttttctgattgaggctaactggaaaaagctggggtcgtattctaagtgctaaagaaggctgcttctactgtatagaacccagggctctgaaacagctctagccgcctaatgcacttcacaggtaactccccaaggtaaaactagactctcttgttggttcgcaaagaaaagttaggacttaacacttttttctaaaattttataattcaatttccaaaagtctactctattttatactgtttctacaaaatattccttataaaaacaaagaacaaaaattgaatatttaatgaattgacattttataaccaacctgtttttatctacggtgggaatctttgatgccagaaatttataaagaggttctgtatcttcacaccttgaataagcataataccataaaaaatgacacttgacatgtcaatgtatttgtcatttcattttaaactcgtatttgtggtttttttcccagataaaaatgaaattaaaccatttctttttaagaaaaaaaaaaaaaaaaaaaaaaaaaaaaaaaa

SEQ ID NO: 2535 - DNA, 947 bp, Homo sapiens
ggaaaatacaaaaaaaaaaggaaaaaataaatagaaaatcttcaaagaggcaatctgtttaaatcttcaagaactggaaacagtaaaagtgaacaggtttttattgagcatgtcaataaaatgtttgcataagactttacaagtgctttatttcatgaggtttttattattgatcaaagcaacgaaaatgaacgggaaattcattctcatcaaatctacaacttgggaggaggtccgatgaaatccctggaagctcacattttttataaatgaagagttaattaccggtgggaacaatgagaacctctgtggttcttcctgatgcttggatcctcccagacctctgtttccagtctccttctccacaacctggcctatgcgatgcaagtggtctaactgatctccgcctagggaaggatccttcggcaacttgccgacaagagaagcagcgatgcccgaggcaggtccaaaggagcactgactgcgtgggattgattacactggaggaacaaaaggtcctgtggctacacaagtttgaaaagcagaaggtacaatcattgtatttctggcagacttttcaaagactttaatatatgaatccctcatatgaatctcctggaggattatataataggcagatctcccagccattttcactgaacagttcttagaattggtatccttgaaaaatttcacctaaccactcaatatggtagccactagtcctgggtggctattgagcacctgaaatttgcctagtctgaattaagacacattctaagaataaagcacactgtatttcaaaggcagtacaaaaataaaaaagaatgtaagctgtctcaataataatttttgtattgaatacgtgttgaaatgatgttatttttgatatattgagtgaaataaattgtattgctaaaatgaaaaaaaaaaaaaaaaaactcgag

SEQ ID NO: 2536 - DNA, 2187 bp, Homo sapiens
  misc_feature (49)..(49): n equals a,t,g, or c
taaaagataaaatccattcctcctcccagtgagcaagcatggcttcatnttctcaaaaatgagaacttccatggcagccaagaaaacgtcttctcagaggaactttcgtttgatgcatctcccaagcccacatgcctcctgtgttccagccacctcttccatttcacatttaaaccagctctccattcccattgagttgccctaacaacattgtctccagtgtcagaaccatattaaggttcgtttctcagattgggagcctgcaacaccatacagccaacattgcctttgccacgccactgccaccatccccaccattgccctatggtgggcagatggaattccagaaaccctcagggagccaggataattaggcaacccatctgaattggccacgtaatracaggcacttatctctcgggttcttgcttttgcagactccagggaagtcctgtctagaggtcgatggcagagactcctagtctttcccatgaggggttgataggaatcaaattgggattcctttggctttgggttttgtttttttgttgttgtttttggttttcagtttgttttttggtgtatggggggtgattttgtttctgaataagaaaaagaagaggcaaccatggcccttatgtgggtttatcctttttgagcaatgttttagccacaagtaaggaatcttgaaagtcttttgtccagcaagcagtcttaaaaatgtttttcctaactccttttgcaggtgactaagtacaaaaaaatagttttctcattgtattcaaaatagtgagtaggttccctggataatacacagtggtagttgacatatttyctcaaaacacaaccagaaaacccacttccggtwyttgtaaatcacctttcaagggaaaaagtgaacacgtattccttgtatttctagtttgattaccaaacctgatgttacaaagaaacctccgttctgtagacagaatttcttttatttttcttcttttactcctcacaatcactttcccagtgccatcaccatctataaggtctcagagcagaggattattcatggtaataagtgggggtgtggtgcagccattccagtaacacccacaagaggacagctgttctgaatgtccccacccacccctctttcagtacaggtgagacattttcagttcatgagctccagaccaaatcccaggccagcccttgcaccaaaagccttttttagaaggcttatcagtctattaggaatgtctcaggaaagatgagccatttctttggggagaaatatatttacagatggaagtgtgtgactgcgtgtctgtgtgtgtgtgtggtgtgtgtgcgcacgtgagtgcgtgtgttcatctatgtgcatttcacttccataaagacccagcccaagctgctgggaaccatgtgttcctgagtattctcagaggttaaacaagtgacaagtgagcttctgaaattagtgtctcagcaagctggctttaggaatgagccccattttatcaagcagagaaaaaaaataacagcagaaaagataaagataaaccaaaaatatataccccccaatggaaaataatgttgattcagcaattcccataggatgtattacatgctctaatttattatattattatttatctgtctttgatctttgcccattgtactcttaaaaagatgttgggatgttgattgcgatttttaaacaactagataatgtataaatcagcagtggaaatcagttttaatgtgtggatgtgtctgattattgttaaatgcctctttttttacttttttttttttagatgtataatgtttcataaaccctggcactggtcacaaagctcagctgtgaaaatgaaatttgtagtatttttaaacatgaatgtcaatttcaagtgtatttgaaatggttcctccaggagagatatttgtgcaccattaggaaaatcttctctgcagaggaagtagccttctttggagaaaatggaaaatgggttctgatatgtgatctcagagtagcccatttcctagggcaccatggaaaacacaaatgtgatctttaagtatacctcttccccagtttggggaggaaaggactcagtttgcaccctttttgtatgtaaaataaaatgtcttacctttcttggctaaaaaaaaaaaaaaaaaaaaaaactcgag

SEQ ID NO: 2537 - DNA, 937 bp, Homo sapiens
ggcacgagagagagtacagtagaagaaaagtaagatgggaaggcattggcctactcacctgctttccagtttgggctagaagcagtctcaggtatgagaaaagaacatgaaagggctacagaaaagaactgagaaggaacagtgtgcaggtgagaattcagttttgactctccacgtcagcacgagtttggccaatgatgaaatggcgtaatgagtgaaaatcccttactggcaaaatcaccagaaagtaaattctgtttttaggggtgctgttgtgctgcttagttccgtgtaatcaggctactctcttgggacagccattgtaaacactgccttcctgataaggatatagcaagttgtatagagtcaaagccaatttgtttaacagagccattcagaagaccctgtccatttttttgttcttttaatgaagaaagtaacgttttgaatgtagtgtttatgtatagtgactatattggaatataatgtgtaatgctttcaataaacccagaaacttttccaaaatattgtcttggttcataggatgtgatatggaaggatagacaccgtcttaatattttcccccaacagaatgtcaattcttagagtaggggtggggcaggaaagtgggctataaaatcactggctataaaatcaacttttcccctttgaatctcagaattcagtgtcttctagggcagatctctactcatcatctctacctgatatgaccgcacacgtgagtgcctggcacctgctctttctcttgctctgatgaccacttcctttctgcccatctgttttgacctcgcaccattctggagcttttaggaaaggcatttgtaacaaaggcaggacccaggtctcctggttttcatctccgtattgttttcactatattataaaaccttctttacttaaaaaaaaaaaaaaaaaa

SEQ ID NO: 2538 - DNA, 419 bp, Homo sapiens
aattcggcacgaggtcactgccgctgcgccggcggcactgggtggccctgcgccaggtggacggtgtctactacaacctggactccaagctgcgggcgcccgaggccctgggggatgaggacggagtcagggccttcctggcggctgcgctggcccagggcctgtgcgaggtgctgctggtagtgaccaaggaggtggaggagaagggcagctggctgcggacagactgaccatggctgaccatcggcgcccacagcgcagtccctgcacatccccctccggctgcgcacactgcatgcctgggaaaggccagcacttcatggaccctggggaggccccaccccctccccacacccctgctccccactgccgctgctgcctcaataaatctgctgatttgcaaaaaaaaaaaaaaaaaa

SEQ ID NO: 2539 - DNA, 4049 bp, Homo sapiens
cgaacagacagacttgaggtatgtcgagagtaccaacgtggcaattgcaaccgaggagaaaatgattgtcggtttgctcatcctgctgacagcacaatgattgacaccaatgacaacacagtcactgtgtgtatggattacatcaaagggagatgctctcgggaaaagtgcaaatactttcatccccctgcacatttgcaagccaagatcaaggctgcccaataccaggtcaaccaggctgcagctgcacaggctgcagccaccgcagctgccatgggaattcctcaagctgtacttcccccattaccaaagaggcctgctcttgaaaaaaccaacggtgccaccgcagtctttaacactggtattttccaataccaacaggctctagccaacatgcagttacaacagcatacagcatttctcccaccaggctcaatattgtgcatgacacccgctacaagtgttgttcccatggtgcacggtgctacgccagccactgtgtccgcagcaacaacatctgccacaagtgttcccttcgctgcaacagccacagccaaccagatacccataatatctgccgaacatctgactagccacaagtatgttacccagatgtagaattttcatcactaaacaatcatgctaaagaggaaaggacagtgtgcttggttagagtaaaggacgaggtcattagccatattgtatatatcgtcaagcaacacacacaaaagttcctcagccacaagacatccacatattgcatgttaaccagaagaaaagacaacattttccggaaatccactgcacactgttgcctatacactttgtacatttaattgatatttgtgctgaggtgatattcctgtctaaaagaacaacattgtctttcttttctagcacagagttatgcattcaaagatgcatacctagttagtttccyatatattcatgccatcttgaaaagacagactatggtgtaaccatgattctattatgtattggtacgtctgtagaccaagatataattttttaaaaataagtttatttctttcaaggtttacaaataacaaaggtgcaccttgtatttaaaattgccattatagatgagagcgtgcatgcacagtcatttttgtttaagagtaatatttttaatgtaatagattgtaagacgtggtgagggagggatctgacagagatgaatgtgccaagcaaaaccacaactgtgtatattttaaagcacatcatggctttaagtaccatgttgttaaggattctcatgaagtgccatagactgtacatcaaattagagtattatttcttcagtgttattgttttcagagccacattttgttgcatatttgctagtactaatcagtcaaagggcaccattctttttttttttttttgaaaccaaagctgtctcagaaatggccaatttaactttacagtaacaatagacagcacaacacaaactctctcaatacagataaactcacacatactggagatatatatataatagatatatataaaattattttaatgcattgtagtgtaatatttatgcatactatactgtataacatgttattcaaaagggattgccatttctgagacacagtaacaaaaaaatgaggaaattattttgcttctatttatagcctctgtcaaaagtcaaaagactataaatgctttgcaaaaatggtttcacgtttgcttaaatgcttcatcacagtcacattcaaaatagtgactctaaacaaagaagaaagcagcactgtcatcagatgcatgataaaccaaaatatgaaaatgggaaatgtttaattaacctagtaattgggtgggttaagtacatgggtgaattttatatgtgatttttgttttgttttgttttgttcagattaactgcttatagccttagaaagccttttacaaaattaaaaaaaaaatagatgtgcattcagtttttaagaatggaatcatccaaaggaattcctttttttgaggtttggatgttgcagctagtaaaggatatttttgctctgttcagcagttctaaaaattgctgaagtaggggccaggtcactggtagttatagtatggaatgggagaagtgaaagttcagttatagaactttccatacttccaagtttactgcaagtttttatgcttgagagagatgctttctaatataagactgatgtgttgattttactgattgtactgtacatctattaaagccttagattattacattacgggttggaacccataccaatgtaatttcaatcgtgttaagaaagtaatggtgacttcacatgttattgtagttagttacattatagaatattacttatttttcttgttaaaatgtagtttttcatttcctacatttattagattttcattttctattaacaattgaataccatttcagtttatagacttgttttattagattttaccaatgaatttttcaaaatacaaaaaaaagtagtttttccttcataacatactcagttttgaattacatgtagtgtcacatgaatattcgtattgttaactaaatgatttatattttactgatttaatattacagtgtaagaatgtcagtcattgttagttcttgtctagttttcattaaaagaacaaagatcttttatatggatatcttataaatatataatcattgctaagtaagaagttaagttgttgctatcgcaacaatcctggcagacaattgagtaatattttgatgatttattttgtttgtaattagttattataagaagatctagatcctagatattagaataaaatttattttctactgtatccatttcaaatgttaaaatattgtttaatatttttgaaatccctgagtatcaggccttgttataaataagctgcataatcaataaatagaacaagggactttttgttgataatccaaatactcaaagtttacgtaatgaaaattatagcgtgtgtgcaaactcttgagggttgattatgctgcaatttagcatgttggaacgtctagggagaaggttgactttttgcacttctgtatatagtcaaaagagagaaacctgtataatagtaagatcttattttgaataaaaacgtctataattacaaggagttttgttaaggctaatacaatgacagactgagcaaaattgcttgcaaaagtggcacagagttagcactccataccccttcaaacatgttgctttgctttcttgtggacagcttgtagtttgccaggattttttcagctggaaagatacgccatcctttcaaaccctcatgactgacaaaaactccatggggccaaatctgcctgaagatcattaccaaaaatagcaggtacttctaccattaaggtgaaatcatggatcagatattccttacatttttcaaaactactgcatgtttaaaacttcaacaaaaaaagagagaaagaactatactaagaacatatattattcagatcagtttctgccaatttcagtggtttattgttcacaaaaaaatcttcaaaacaagtattgactttcacaaaatttaaatcataaacaggcaaaccaaacagcacactgtagctatagttgttatgtgattgttttttaattgctgtaggatcctgttctttcagcaggtgaaaaataaaacgcagttcaaatttcatggttttaattttcaactcagaagcactcaaaaatgcaaaatgtgataatgggcacttgtttaaaagaattagtgtatccagccttcactccagctggttaaaaatgttgcacttatcagcaaccctaccactttcatctgctgaaaggacaaatgtgcttggttttactattatgtaatcacaacttactttctgcttgtagttgcttaaaattatgtattttgtcttgggctgcaatttgttttatgcttattttattattactgcagtagttgacyttgctgtatggaaaaataaagtgaaattgccctaataaaacttctctttcttaagtaaaaaaaaaaaaaaaaac

SEQ ID NO: 2540 - DNA, 1377 bp, Homo sapiens
  misc_feature (6)..(6): n equals a,t,g, or c
  misc_feature (19)..(19): n equals a,t,g, or c
tgcagnaattcggcacgancagtacttcattttttttatgtgactgaataatattccgctgtgtagatatatttcacattttgttcaccatttmtccgttgmtggacacttggtttgtttccaccttttggctattgttaacagtgctgctatgtacattcctgtctaagtctttgtttggaaacctgttttccaattctttgaaatatctaggaatggaattgctgagttttatgataattcaaagtttaccttctagaggaaccccagcaaccgtattgttttacattcttatcagcagtgtttgaggggtccagtttctccatgtcctcaccaacactgattttttattatttcctgattattattattattgccatactagtgggtgtgaaattgtatttagttgtggttttgaattccatttctttaatgactcatgatgttgagtatcttttcatgtgcttattggcgatttacatattttctttggagagatgtctgttcaagcccctttgcctatttttttaattgggtggtttgtctttttgttgttgagctgtaagaattctttatatatctggttactagaccctcatcagatatatgatttgtaaatattctattctgtagattgtcattttattttcttcatagtgtcctttgatacacaaacgttttaaattttgatgaagcccaatttatctctgttttcttttgktgcttgtgctckkgcwgkcatagckaarattttatcacsaaatccaaagtcatgaagatctcccccatattttcttctaagagttttatagktttcgcttgkacatttatattttatatcctctaaattttgkttataatttaaatcattgctatagacttggkccagtgagacctataaacagaggkcttaatttactcagtggttaaattgtcctaaaattgatttctgcaaaattcagaggggagatttttgggatttcatagagaaatctatatccatacagttaaatccttcatgatttcatacacttcacttttttaaagtattaaaacttttttatttgaagaatacgtggggagaagagaaatatatttcagcacttagatatgtagattatttccaaaatagtttaccactcaactagtcacttctgtgtaaatcagttttccctgaagcaagcattgtgttgttcccggctacaagcggtcctcattttgcatggtactgtgggaccataaaaatggccatgcaaagcaatcttaataatcaatggggaaaatgatgattgttccatgacctttaaaattctgctaaaatattaaaactcttaaggtcagttataaatgtagaaaaaaaaaaaaaaaaaactcgag

SEQ ID NO: 2541 - DNA, 862 bp, Homo sapiens
  misc_feature (862)..(862): n equals a,t,g, or c
attttaggagtgattttgtgaaatttatttttaatacagtcctagaattgaattgaaatatggtttggaagtttgagggttttttactgtgtctatccttgtgtgtctgtttcctttaaagattcatgatacaatcactgtgtacaatgtgtcctttaatattggttcctgtaataatgtgccttcaaattatttcttgagttttgtgacttaaatatgcagttcactgactcacgccaatgttgtttgctttttaccttaattctttttactgtgctctctcagttttattttttggaagaatggtactcagtgctttgatttgattagtaagatttttgaaacacatgtaatttatttcagaaatgtgattgttttaactctgacttttttagtgcagtcattggagaaatcgatgaagaaacagattctgcgcttgatttggggaatattcgagcagaacctttaaattctgtagcacactgaggaaaaactacatacttggacatctgtaaatctttgtacagaaactgattattctgaggatgatatatggagtttttatgaatgtgtcactggattttgactccttattgattcattgtaatatgtaaattaaaatatttctacattttattgaaaaaaaaacctttttttttgcctaaatataagtttggtagcttggtttcttttttttattaaatagtgtgaaaatataatgggcattttgaaaacttttagaaaaaagtagtactttttgatactttagtatttatggaaactagtgggaaagagraattagtgtgctatataaatccgggcmttccargtaacmgtaataccggggtatatgkgtttcctn

SEQ ID NO: 2542 - DNA, 1075 bp, Homo sapiens
ggcacgagcacaggtgacctaacttctctgagtctcactttcctatccatgaaatagaataatagtacttaccttgtagggttgttttaaagattaaatgagtcagtgaaggtaaagttgcttagcacagtgagtgcctggcacaaaataactaccaagccccaaatggtaactattattatccttcaaccttcctcatttccattaccactgagactcaactgctacaatgctgactacttatattcttcctgagcaccacatcccagctccacaggtataatcttcaagttaacacttttaaggaaacattactgggtataaaattatctctagtaagtcgtatgcgccttttctctgagctcactgtatcacactaaccagcagagggtgcacaataaagaagagaagcctctgactctgcgggaaggtctctcacagaaccaaggacgttgccacccttggctgggtgtacttgaccaaagcgagcctgactgaccctggtagtaggcaaagaatttggcctttacgtttgtatagttaattaccaggctaacaatgcagcaaggatagtaaagcattttacccctcccaaaacaaactgagtattctgacttcaggcttatgtccagctttttagctccgaaacccccccactcactgcacagctgtgttcctttcctggaatgcagttttctatcaggtagcactgagggtccgaacagttcacgtcaaaactatcaggaaagaagaatgaaaaggtaaattaagaaaaagcgggcttggctgggcggggtggctcacgcctgtaatcccagcactttgggaagccgaagcgggtggatcacctgaagttaggaatttgagaacagcctggccaacatggtgactccccgtctctacaaaaatacraaaattagccgggcatggtggcaggcgcctgttatctcagctactccaggaggctgaagtgggaaaatcscttgaacctgggaagcaraagttgttarataragccactgcactccagcctgggsgamagagcgagatccgtctcaaaaaaaaaaaaaaaaaa

SEQ ID NO: 2543 - DNA, 695 bp, Homo sapiens
ggcacgaggtcaggggtctgggctaaaatgcccgatgtttcagaggtcgctctgaaggtgacccaggtgggtggctcttcaccctattcttgtaccccgtttgacgatcacctaatcatcccgttgacccaaatcgatgccagtattttctgcagttttgtctttggtgagtgtgatccatgtcactgtgtggtgaggtttattcacagtcagtctggtctgtaaaatagaacctgcagacagtgaacctgaaaagcatactaggatcatccaggcctccctccccagccttggagctgggaccctcaaagcagggacatagaaggacttggagtgagccacccaccaactccagggtgaaggagagtgtgagttcagaaaagcccccttttggctggttgtggtggctcatgcctggaaacccagcactttgggaagccaaggcaagcagatcacttgaggtcaggacttcgagaccagcctggccaacatggtgaagccctgtctctactaaaaatacaaaacttagctgggcatggtggcacatgcctgtggtcccagttactcgggaggctgaggtgggagaatcttttggaccccggaggcggagattgcagtgagccgagatcgtgccactgtactctagcctgggcgacagagcaagactccatctcaaaaaaaaaaaaaaaaaaaaa

SEQ ID NO: 2544 - DNA, 721 bp, Homo sapiens
ggcacgagcagcgtgggcgttatggccatcatgaaaatgtcacagtgctacagagattttgtttatggccagttttggggccagtttatggccagattttggggggcctgttcccaacaccaggagatgtgttgatttgctccagcaatgaaaccacatctggtacggcagctgcaattggagtcactacttagttaagctcatcataatccactgtcatcctccaagatccatctgtcttctgcacaggccaaatgggagagttgaacagggagatggtgggaatcaccacccctgtgtccttcaagtccttgatagtagcactaatctccatgttccctccagggattcaatattgtttttgatttactacttttctaggtacagccagctctaatggcttccatttggcgtttccaaccataatagcctttaccagtcaaggagccaatgtgggggttctgccagctgctaagtatgtctatgccaattatgcatcctggcacttggaaaatgaccacaggatgagtctggggacccactggacccgctgtaagttggacctgagctaaaactccattaattacctgacctcaggtgatccacccaccttggcctacctgtagggaccagccccacagggtcggtgggtttttctccccgtgtgcggagatgagagagcatagaaataaagacacaagacaaaaaaaaaaaaaaaaaa

SEQ ID NO: 2545 - DNA, 1029 bp, Homo sapiens
ccaggttggccaggctgtcccctgatctttaccttagtaagtaacagatttcttcatggatttatcaatttgtagacatcatctgctgatttcttgtcacggctgttgagatcttctccctcccatccacccactgcaccttcaccttccatatcctgaatgagtttatgtcatgagcatagttggtcattggttgtgttttctaaataagatgcaaaatattgttggctgctaaaacaagtaatatgttcagctaggcttttcttgtaccattctatcttcccttaaagctaattaactttgtttttaccattagcctgattttcttttacctgctgtttgttttttccccacaaagctcccacctctcacacacctatcagttgtattttgcataggtttaaataaattgatctcccctcaccacttccctccaagacccccttatcctcctcctccaaatgggactggttgtgctctgacctggaagtggagctgtkgtcccaaacctycctgtccttgctcccctgtgctgacctctgtttccagtgtggtcatctctttcccttcatgctgyccgagcaaaacttctgggagcttttgaagaaacagatgatttttttcgggggktgggggaagtccttgattgtctgaaaacgagtttatttaccctcatagttagaagtttggtggggtataaaaatctagattgaaaatctgtatttgtaggccgggcgtggtgctcacgcctgtaatcccagcactttgggaggctgaggcgggcggatgacctgagtttgggagtttgagaccagcctcgccaacctggcgaaatcccatctccactaaaaatataaaaatttgccaggcgttttggcatgtgcctgtaatctcagctactcgggaggctaaggcaggagaatggcttgaacctgggaggtggaggttgcagtgagccaagatcgagctactgcctgggcgacagagcgagaatccgtctcaaaaaaaaaaaaaaaaaaaaaactccga

SEQ ID NO: 2546 - DNA, 560 bp, Homo sapiens
ggcacgaggggttttaagccatggttagtgatagcatgtcatttgaagatgtacccccttaatgacttacaggctcatagtgattttttcttttttgttgttgttatttagattagatttgggtaagtctccgggttggttggaaggactcaggtttatgtggagttttgtcttttagttaatgtgccagtaacagagtttgcccgtttgtgctatgggatactcatgaggtgcccccaaacccagctggctacatatacagcctcttgcttcctcttcactgtctcctgggctcttcctccagctctcctcatgccaaactcgtgactgcatggacacaacatagggaggtgattaggaccatgtattttggaggcaaactgtctgtatttgagtcctgcctaccctggttattagtgaagtggtttgagtaagttacttcaaacttctgtgcacttcagtttcttgatctggaaactgaaggtaatatacctaccttacagggatattgtgaggattaaaatagataatgtaaaatgaaaaaaaaaaaaaaaaaaaaa

SEQ ID NO: 2547 - DNA, 1288 bp, Homo sapiens
ggcacgagcagaaaccagttctttcaaaacattttacctctgatgtcacccagcttcctgaggctgctccccctttttgcagtttcagcacaacaactgaccagcattccttcctgataagagaccaccaaccagagtagttctgaccagtctacagaggatgagtagtgtggattttcatgtcctctcttcaccttttgacatcagagggctgaaaactccacccttggatcatgctaacactgccattttttgtgcctgggttccatagagagtcacgaagctctgtgcatgtgcttgtttctcctttcataaatactcatgactcctcctctagcttatttttatttttatttttgagacggagtcttgctctgacgcccaggctggagcgcagtggagcaatcttggctcgctgcaaactccgtctcctgggttcgagtgattcttctgcctcagcctcccaagtagctgggattatgggtgcccaccaccatgcctggctaatttttgtgattttggtggagatggggtttcaccatgttggccaggtggtcatctcaaactcctgacctcaggtgatccacccgccttggcctcccaaagtgttgggattagaggcgtgagccactgcatccgggcctcctctacttattgaatatgtatatttggccaccctgttcatcataaattcttgttccccttgcccttcccatgaagtgtgtttctggcttctggctgggggatacactttcccagactgttagaaaggccaccctgcaggctgcaagcctttatatgtataaaaaaagctctctttttcaaatttatgaaactcatgattcttcagttgacagactggatgagaaggaactctccaggtaaggcatatgggattttgaagcttccagatccaggggaaggaacatgccttgaagctagaaaaaccttgctttgtttaagatatagaaagtagggctggaacagagtgaaggagggaaagactttctaggacaaagttagagaggtaagctgaagccaaataatccaggtcagtgtcaatccttgatgatgggataaatacagaaattgaaaataagcttgtaaagccttttaaatgatttgacatagtggtttgatagctcttcaatctaatgaaaaaattggacttatattttgatgtcttatttctggtttcattttttctagtaattcatttttattttatcttataaaagtatccatcagagaggaattgaaaattgaaaagaaaaaaaaaaaaaaaaaa

SEQ ID NO: 2548 - DNA, 1492 bp, Homo sapiens
ggcacgagtataattcttttaatgtgcattttaattccatttgctagtgttctgttgaggatttttgcatcagggatattggtctgtagttttcttgtgtctttgtctggctttggtgtcagagaaatgcaggcctcctagaatgtgtttgaaaagtgttccctctgtttcagttctttggaagatagctgtttgaggaagattgatgttaattctttaagtgttcagcagaattttccagtgaagttctctggtcctgggtttttctttgctgagaggtttttgattactgctttaatccccttagttattataagtgtgttcaaagtttttatttctccatgattcacccatggaaaattgtttttagaggtttatccatttcttgtagattatccaatttgttggcacataattgttcctagtagtctcttgtaattcttctatttctgtgatatcagttgttatgttccctctttcatttctacttttagttatttgaacttctttttttcttagctaatctagctaagggtttattaattttattgatcttttcaaaaaccaactctaggtttctttgggtttttttctgcttttttttttctatttatttatttttttctatttatttatctgatctaatctttatttttttttctcccttctgctaattttgggtttagtttgtttctttttttcaatttccttgaggttgaagttaggttgctgattttgagatctttcttcttttttttaatgtaaatgtttactggtataaacttccctctttgtatggcttttgctatatatcatacattttggtatatatttttttttgttttcgtttgtttctggatttttttctaaatcccttgtgatttcttctttgacccattggttgtttaggggcgagttgtttaatttccacacatttgtgtattttctgggtttacttttctgctattgacttctagtttcattttgttgtagtcagagaagatacattgcatagttttagtcttcttaaatttgttggtgggcggcactggctcacacctgtaatcccaacactttgggaggctgaggtgggcaggtcacttgagttcaggagttcaagagttcaagaccagtctgggcaacatgacgaaatcctgtctctaataaaaatacaaaaaattcactgggcatggtggtgcataccagtagtcccacctactcgggagtctgaggtgggagtatcagttgagcccaggagattgaggctacagtgagccttgtgctctccagcctgggtgacagagtgaaaacctgtcttaaaaaaaattgttggctgggcacggtggcccacgcctgtaatcccagcactttgggaggctgaggtgggcagatcacaaggtcaggagatcgagaccatcctggctaacacggtgaaactccgtctctactaaaaatacaaaaaaaaaaaaaaaaaaaaaaaaaaaaaaaaaaa

SEQ ID NO: 2549 - DNA, 899 bp, Homo sapiens
ggcacgagagatttcttacttgttgatcacttattctggtacctttccccaaatgatattactgatttaattaggagatacaggttagagggtgctctttggccaattgtgaatacagtaattgatcaaaaaaaaaaggaggatggaagtacgtacacacatattaacatgataattatagctaaagtggtactcttttttaatagcagtgcatcctagagagtaaaatatgatggttctcaagaaacattctgctggggaaaacagtgtttgaatcttagtattttatggaactgcttttttgcttttataaaagcaatttttgtattgacttttggaagaaaatcagttccaataaagcacacattttcatttgtatatctgtcagaagctgatagatttactatactattctgttttggaataataaaaattgcaggcataattaaataaccaaatagttatccccaatgagagagttgctgtatagtttaagagacagatgttcagatctgtctttaattaatctctgagtaataaggagtaataaatttggtcatttaatattttttccttttaaaatgttttatattagggaaaatgctcacaatagtgttttcaggttttatagaattagttgtctttaataaccaatcataggctgagcatggtggttcatgcctgtaatcacagcactttgggaggctgaagtgggaggattacttgagctcaggagttggggactagcctgggcagcatagtgaaaccttatctccacgaaaaatcaaaaaattagccgggtatggtaatgcacacctgtagtcccaaagcactaggattataggtatgagctgttatgcctggccaagatctctttttacaaaaaaaaaaaaaaaaaa

SEQ ID NO: 2550 - DNA, 2006 bp, Homo sapiens
ggcacgagctttgttcatacctctacagaaaacctgctaacagttgaattgtttgtacctcttcccactgccccacctccagctttccccagactgaatgtacttacgtatcaaatacgtttctaagttgcctggattacttctgtawttcttttttgttctcttcctgcgattgtggtattcatgggaaatgcaaataggttgatttgttttgttttagcagtttttctcctttcccattctcactgatgtttaattttattctttgaatatgtagaatattatgtattttgtatagtaaaaactattaaaaaggctatatactcggagtctctctctttctcccatcccttctgctccattctccacactcctcccttgtaggtgatgaacctcattgttctctggtttatcgttgctataaagagaaacacatacgtgcttgttttcctgttttctttcctacacgaaacgtagcatgtatattactctttttcactttgaccttttgactttaggatatacagattgctccatatcaattcagaagcgctcctcgtcctttttcagtactccgttgtgtatatgctccagtttatttaaccagtcttctgtgcttggagatttatgtaggtttccagattttgcagttacaattaatgctataatgagtcactctgtgcatgtatgttttttatattgttggaggtgtatcttcattataaattcctaaagtaggacttctgggtaaatgcatatgtagttttgatagatattggcaaattccccttaaaaggggctgtgccagtttgcattcccagcagtgtatgagagtgcctgtttcctccacagccttatcaacagtgtattgtcaagctttgaacatttgctaatatgacaggttgccttcttcctcatctctgcagtaactgtcttcatggtttcatagccttctccctgatacccctccccagtgtcacatttgaagacgagcactgaggatgaggaaccaactgaagaatatgaaaatgttggaaatgcagcatctaagtggccaaaagtggaggatcctatccctgaatctaaggttggtgacacatgtgtttgggatagcaaggtagagaatcaacagaaaaagcctgtggaaaacaggatgaaggaggacaaaagcagcatcagggaagcaatcagcaaagccaagagtacagcaaatataaagacagaacaggaaggtgaggcatctgagaagagcttgcatctgagcccacagcatatcacacaccagactatgcctataggacagagaggcagtgagcaaggcaaacgtgtggagaacattaatggaacctcctaccctagtctacagcagaaaaccaatgctgttaagaaattacataaatgtgatgaatgtgggaaatccttcaaatataattcccgccttgttcaacataaaattatgcacactggggaaaagcgctatgaatgtgatgactgtggagggactttccggagcagctcgagccttcgggtccacaaacggatccacactggggagaagccgtacaagtgtgaggaatgtgggaaagcctacatgtcctactccagccttataaaccacaaaagcacccattctggggagaagaactgtaaatgtgatgaatgtggaaaatccttcaattatagctctgttctggaccagcataaaaggatccacactggggagaagccctatgaatgtggtgagtgtgggaaggccttcaggaacagctctgggctcagagtccacaaarggatccacacgggggagaagccctatgaatgcgacatctgtgggaaaaccttcagtaacagctctggccttagggtccataaaaggatccacacaggtgagaaaccttacgaatgtgatgagtgtgggaaggccttcattacttgtagaacacttctcaaccataaaagcatccactttggagataaaccctaaaaaaaaaaaaaaaaaactcgag

SEQ ID NO: 2551 - DNA, 1242 bp, Homo sapiens
ggcacgagatttcttagaactgcatgtgaatctacaactagctcaaaataaaaagtttaattataaaataaaagctacatgaaatgaagcaaaaaataattcacccttgtcacgcacacagagtcagagactgtaacataatttgcaggatctagagcagaatacaaatgtaaaacatcttgttaaaaaattattaataattttgagacattgataaagcattaagccgcctgtggggccctttaagcatgataaactgtgctaccacacagattgcacattcacgtatctggccctgcaaatggaatgatttttgcccatgatcaattcaccatggcctctttgggctcagtgaatttgcttcttcaggagggtaattttctcttctttctctgctaagctgtttaacagtagttgccctgcctaatgggcttcatccatccatttctctcagattattttcatgatgcactaggatgaagcacaccctttctcctagtcttgaggaaacgtcgatattcagaatatttaaacgcaggcactgaccaatcagaagagtttctggccaacgttccacacttgagggaaatgacattatctgagccctgaagaaaaacgttgtagatattctccagatcaaagcatcgacaggaagattttagatgttgaagttcgtaatatttcctaaagcaggtatgaattactagtaacttaataggtatattaactgatgaagttttcatttctcagaacaaaccagtcaaggaaggtgctattatactccttttattcatatagatcttgaggctgagacagtttaatcaatatgctataattattgtgtaataataaattaccataaactaggggtgctatgatctcaatatttgtatctcccactcccaaattcacatgttgaaatcctgactcccaaggtgatggcattaggagatgaaacctttgtgaggtcattaagtcatgagggtagaataccgatgaatgggattagtgcccttacaaaaggggcccaccaaagctgccttgttccttctactatgtgaggacacatctagaagttaccatcaatgaaccagaaagtgggccctcaccaggcaccaaatctgccagcactctgatcttggacttccagcctcctgaactgtgagaaataaatttctgttgtttataagttacccattttatggtattttgttacaggcacatgaactaaaaaaaaaaaaa

SEQ ID NO: 2552 - DNA, 1467 bp, Homo sapiens
ggcacgagcttgatgtaaatggactttggttaataagaatatgcaagtattggctcattaagtataataaatgtgcaaaggaaatggaagggagggtatatgggtactctgctgtctactcagttcattaaacctcaaattactttaaaatatagtctattaatttaaaaaattaatcatgttaacttacactatcatgttttctttgattgttgaggtcatttctgggggtctgtcttttatttagtgacagcatgttgacttgcccctcgctcccacttgtttctgacataatttcataccaagcatatatccacagtagacctcctttctttcatggaaatgcacagcttatataaatatattgtagaaaattgctgcttttacttagactaaaagacacaagagtcccctgtaacaaacagcttgaagttattcattcactgaggtttgtacagggttcctgaaactgtcctgtttcaggagctgccagataacctgatcctagagtgaaactcactttggcattcagattttgtctatgttgatatacctcaacagtttaagatcttttttaacttacatggctccatgaaagaggatgtgatgtttcagtgttcagtttggtactattaattatcccttgtagccttccactagaagtgatactttcagattgaacattgtttcttaagttttttcctttccacccctctctcttcttcttcagaaataaagctctgcatgtgtgttggtgtgttttaagtataatttttaatctgtttgtggaaccacagaaatggatccaagaggtaggtaaggtcttaaattgaatttgatgttaaataagctggcctttgacccataggcaatgagtgaggagcaccgttgggtgtaagactagaagcagaaatactaggcattttagaggccaggtgaagggtgaataaggacatttaggtcaattgaaataaaaagaaaaagacagatgtgaaatgtagaagacttaattatggtaggaacttagtgatttggagcctggcagcctgagcaggaaggtgaaaacattgacagtaggcaagtttagaggaagagctagttttagatgaaagattggaatttgtacaagttgaattttagatgaagtgtagtggttaaaattcaggactctgggccgggtgtggtggctcacgcctgtatccccagcgctttgggaggccgaggtgggcagctctcttgaggtcaggagtttgagagcagcctggccaacatggtgaaacctcgtctttactaaaaatacaaaaattagctggacgtggtggcgtgcacctgtaattccagctacccgggaggctgaggtacgagatcagttgaacctgggaagcggaggttgcagtgaaccaagattgcgcctgggcaactgagcgagactccccatctcaaaaaaaaaaaaaaaaaaaaaaaaaa

SEQ ID NO: 2553 - DNA, 851 bp, Homo sapiens
gcatgaacacaaaggagcttttaagagatgtccataccctccttttataataatacaaataaatgcaaaagtcaaagcaaccccgcatattatgtttgattctcctggtaatacccacactacttcagcagtattcttgtacctgccacattaagtaatttaaacctgctatttcactgagcaagatagataaaacatgtcatctccttgagattagtttttgaaaatatgtattacctcacagcagcctaacgcatcttgccgtattgccctgctttcatcttgtcaacagaattccactgggtggaatttgccatgtttgttttaaagttgtttatgcctaaacaacttgaaaaaattttaaaaaggtacattttcctcccattttctgaaagtgtagcaaatatgcaggtaataagtatccttataaatgtccagattatgtataccaagtggaattcttatatgggtgttttgcaatgtgatatttgtaatattaacatgagtataagattactgatttaaatctgatattaaaattaattgtggctgggcatggtagctcacgcctgtaatctcagcactttgggaggccaaggtgggtggaccacctgaggtcaggagttcgaaaccagcctggccaacaaggtgaaaccccatctctactaaaaatacaaaaattagctggacatagtgatgagcgcctctaatcccagctactcaggaggctgaggcaggagaatcgcttgaacccgggaggcagaggttgcagtgagccaagatcaggccactgcactgtagcctgggagacagagactccatctcaaaaaaaaaaaaaaaaaaaactcgag

SEQ ID NO: 2554 - DNA, 1266 bp, Homo sapiens
  misc_feature (497)..(497): n equals a,t,g, or c
  misc_feature (578)..(578): n equals a,t,g, or c
  misc_feature (606)..(606): n equals a,t,g, or c
  misc_feature (615)..(615): n equals a,t,g, or c
ggccacgtagggtcaaaaccacggttccagcaggaaataagcactgggagaggacaggacacgtacccccttccgccgacaccccccacccgatggcaggagggagcccaaaccttgcagcttccatggctcatggctcatgacaatatcattcttaaaattctttgagtttatcaatacgttttgcccttacctgccctacaactgtaaataacaaaatgtatgcatttcctactttttatttgttccgaatgtattctcaagcttcaagaacggttcccatcctaccagacttccaccgtatcaggattaaaaaacaaaacaaaactctgktattctctccatagcttatggcttttaaaaaataataatttgaacaaacaattcctacgtggcatagatctttccatcctggagaatgttactatttcagtctgtcatcttttgtagatattaaaaacctttcgtatgkcaatttctttgctcctcaccaccancttttaggcaggtactagtattagctcgatgcatttgacacgtgtttaatgttattcaatgccagacactgaaataggccntagggatgtataacatattctgtttggnaaattgagnctcaaggaggctaaataccctgccccaggttatatagtctgggattcagtctgagacaggcccccaggtttgttggactccaaagcttgtgctcttaatcactatacttacggttgcctggtagggttgtttgggttgtgcaatgtggcactgagcagctgcactgggtaatcctgccattttgtagccgtccctgctgttttgtctcttctaagtggggagagaacataatttcgtacaagagaaagatgggatctttctcttctttcctattgggactcagcatcttggtggccttacactgtgtgctgaatgagtctatactgttactatctatagtaactcccgggcccttcctgtgcaagaatttagagccccaagctcccctatacatccccacaacttgcttgctcagatatcactttttacctgcttatgaagcctcaaaaatttttatctcagctcacggtaagaaatacattttacatcatgtctcaatacacacacgtatgtctttacacacatcttaagtatatttaagcatacggcagccaaagcttggttgggctatagcaataagtgaccgctaccctctctcctatactcctgagtaaccattgctctcttaaaaaaaaaaaaaaaaaactcgag

SEQ ID NO: 2555 - DNA, 1623 bp, Homo sapiens
  misc_feature (1333)..(1333): n equals a,t,g, or c
gaattcggcacgagcagagattgggattgtttgattgggtctttagcagtggtactaatagcaacttctgtctctagaacattggaaaattaaaatgtgtttatctaccgtttttttcctcgaggttatatgaaggtagaaatgaatcagactagatgattagctaagcgagactattaaccctcatcccttcccctctagacaactatgaaattagtcattatgtatkcsatccttctwgcagtctcttctctgacagttataaaagtgatttaggctgcataatgttgtttgaatgaaatgaaaatatagactagagctgtttttttttttatttccatcagtctcttcagtgaaaactaacatttgagcatgattctttttttaaatcattttgtgacagtttagcaagggttgtgataagcaagttatggtatggtaatatttctagtgtccacgtttcytcacatgtctggtgtatgggaactactaactccatcrggaccttgcctatagtaggtacycmacatttactgaattaaatcaataaacatttttaatgaattacagtacaagtcagacctctgtatctgtgggctctgcatctgcaaattcagccaaccatggatcagaaatattagaaaaatggaagaacagtccagcaatacaagtaatatgaataaaaacaatacaacaactatgtacattgtatcaggtattataagtaatttagagatgctttaagtatactgaaggatttgcgtaggttatatgcagatactgtaccattttatataaggaacttgagcatctgtggattttggtatttgcatggttcctggaaccaatcccccagggatactgagggactatagttgatcataccacctgattttagagattttctgagtctcagaagttaattaagtaaactacaatagtctgttcttaacctcggaggatacattccaagaacctcagtgaatatctgaaaccacagatagtattgaatccaatatatacacggtaatattttttcctatacatatgtatctataaagtttaaattctaaatcagacacagtattaacgataataataaattartgcaagactgggcatagtggttcacacctataatcttaacactttaactatgacgttgtctytgaaaagaaatcagctagcccaaggtggctcatggctgtaatcctagtgttttgagaagctaagtcaggaagattgcttgagcccaggagtctgagaccaccctaggcaacatggtgaaaccctgtttctataaaaaataccaaaaaataggctgggcgcggtngctcacgcctgtaatctcagcactttgggaggctgaggcgggtggatcacgaggtcaggagattgagaccgtcctggctaacacggtgaaaccccgtctctactaaaaatacaaaaaattagccgggagtagtgggcgcctgtagtcccagctactcaggagactgaggcaggagaatggcgtgaacccgggaggtggagcttgcagtgaaccgagatcgcgccactgcatgccagcctgggcaacagagcgagactccatctcaaaaaaaaaaaaaaaaaaaactcgaa

SEQ ID NO: 2556 - DNA, 1441 bp, Homo sapiens
  misc_feature (357)..(357): n equals a,t,g, or c
cacaggtgccaggatgccaagggatacagaagaaggatggttgcttctctacccaggagtgccctgaggtgtcttaaaaagaggagcatttatgactcaggcagggtggcacattccagacggcagtgggcaggagcctgactccagagcgccttagaggctgccgctgggagttgagctggaccctgaaggcagtagggtaagccataaattagggttaaggaaccaagggaataaggggatcagaccattgcatagctccagcagcaccattactagcagcctgtgtgaatgatggtcccctcttacatgcccaccatgcaagggctctaggccattcttcactctttaatgcanaaaagcaaaacttccagctgttttcccctacccaaaatgtgtgagcctgagcccagccccaggatggatcttgtcctaggtaaccaagaaggccttaagtgtcagaagaggtagctccaggctgaataaagggacaaatgaagcattactgcactgagatcgcccgtcgtggggtgggtctatacccatctagtcattaagcctcaataatttggtttctaaatggactattatttgctacagatcaaaagttgttggaaactatattacacagataaatagaattgtcctgcaaataaaggaagtaatctcttctctgtttgagataccatgcagtatttgtccaacttgtacaaatagttctgatccatgagaatcctccactttcaacttacttgctgctatatcccaactattataaggccatggagaccagtagcctggtttccattatctttgctctgtttttttttatggcatggttgacactacctccagtagcaaagagttaacttgtcatcagagctataaaatcacaatgataagtgaaaagttctcttttgtactttagcatccaagagaagtgtaattcccaactacaatgctcaaaataatagagagtttttactttgggcctgaaaatacttataggtcaggtctcctagttgggtccatgctgttgttggtgttccctcccaagtaaatacatactgaatttagcaaattattcatttgtgatcctctgtgccatctaaaaatatatatagtttaaaacgctggccaggcgcagtggctcatgcctataatctcagcactttgggaggctgaggcaggtggatcacctgaggtcgggaattgaagaccaaactggccaacatggtgaaaccccctctctactaaaaatacaaaaattagctgggcatggtgttggactcctataatcccagctactagggaggctgaggcaggagaatctcttgaacccgggaggtggaggttgcagtgagccgagattgtggcactgtactccagcctgggtgacagagtgagactccatctcaaaaaaaaaaaaaaaaaactcgag

SEQ ID NO: 2557 - DNA, 576 bp, Homo sapiens
gattcggcagggcacacatgtgcatgcacacttccagcctcctcttcctgctggtgcttctcagtgatacctatgagaaggatcactttccttccttatttccttttgtgggataggatggatctaaaagggacacattaataagaaggcatagtgattaatgtattcagcaaaggttttttccagtcttctcttattaagaaacagactttttcccttgaaatgagatttcattggccttctttatgtaagcttattgtgccagcaattgtgcttgttgcagtaaaagaagattccctcttttgtgggggtgctaaaaatcccacctacatacatccacacaattctaccttagatacccagttcatagtgtgaacaccactgtcctaagtggagatttagtttaaaaaaaatctttctggctgggcacagtggctcatgcccataatcccaacactttgggaggctgaagtgggcagaattgcattagcccaggagtttgagatcagcctgggcaacacggcaaaaccccttctctacgcccccccccacaaaaaaaaaaaaaaaaaactcgag

SEQ ID NO: 2558 - DNA, 5048 bp, Homo sapiens
  misc_feature (2497)..(2497): n equals a,t,g, or c
  misc_feature (5010)..(5010): n equals a,t,g, or c
  misc_feature (5035)..(5035): n equals a,t,g, or c
gactagttctagatcgcgagcggccscccttttttttttttttttttaaagcaaaccattgtatgtgtaagtgtttaagttacctttttgtctattggtctctttgccagccctcccctttcccaatgaaagccatgtcaaattaatcactggattgactgcttcatctttttatttttaatgaaaggtgtaccacggttgtaaagcaataagatttgagatgaacactattgaaacttcgctttttgctaaaaaatagcaagttgaatagtaatcaaaaaacatagaaagattttagttcaaaatgattgctcctttctctacctggacttttaaaaaatcaattgtcatctaatatgagtttatttgtctatagacacaagtatcaatgtctaaaaaaaatcatgactttaaacttccaccgatgaggcaggtaggagataaagatgaattctgaactgttactaaaagtactcattttttaccttgtagggagggtgggcaatggggttacctgaccttatttgagggtatgggctttcttttttatttcatcacttgttatctcaaagagactcggagccagtgatccttttatcctgctacagtctttagggagctaaaaaaaaaaaaaaagcaggggctgccaaaactcttgatttcatatttccttctctaaatatatatgtatcctgttttttggataaaattttaccaagaatccaaaaaaaaaaaaaaccctagaatttaatcaacaagatcagtctacaggtcacagtggatttcttttcaaactgacaatgtttaggttttaagcaaataaagttccagttaatgtgaaactcagtcacaaagagttgagatttttcctttatgaaatagaattgacattcttttatgctataaatgtgcattcaggtcccattaaccatgctctgcttttatttggggatagaacattttctttttcatatcccgatcttcccatttcttcatagaaatgtgataagaagtacatccctgtgatcctgctgcttcgtagagcaccactgcacaccctaccccgagtgccaaccacctctgctataggacactattttcctggccctattcttcacttacttcccatcctgtccttgactaggaatatgttaaatgctgctcccatacaattcagttagctcttgtctttttatttggtccaacccctgctttactgctcatgctgcttaaagcaggagggactagagaaacaaggcattttaggaggcctgtgtgcagttgaaaaccgacttttacacgccttataaaagcagtcaggagatagatccgtaggtttgatccttcacatctaataccaggcgctaatgggaacaaggtttaaagggtcctggtatgctaataaattgaaaaattagtgaaatttaaacttctgcctttttttcctgccttttaatctagatttgcttcctcaatatcctactttgtggtttactaggaacatgcttactctgatctttttttaaaaaacacacagtggcagagtcatttcactattgcactgtgtgttaaagaatgaataaggagttttcagttacatggccaaaaatacaggacttgaacataaatagcagttggatcattctctttcatgacggttaaattcagaggtgtgaactttgtaatgagggtgttaaagattaatctatttgcctaaatgggtttgttcaggtatccatttttaacaaagaagtttgtgttcatatagtaaaagacctatcagtgtttccaccatgcacttctattttttaggagtttataattttaagtcttacattcctagtaacatttgggcttttcttaggttatgtttcgtgaagatttggggggagggctcttttaaaacttcrgcctcagttgtttaacagtctctttaatatattaatctgcactaacatctctgtgatatatgcacatattttagaggtaatcatgtcttctagattacttgtgtgcatttgattgggcttcttgtttagggtcccttttaaaattaattcattagattgaaaaatgtattctatatttctgatagactggacagaaggatctgtgtccccaagtgagacaggctctgaataacctttgttttctccactttttattgatgatttaaaacactctagtcttcccctcaaatcatgcatgcaaataggaggacagtggtggtgactcaactggatacaggtgctcaatagtcaggcttgatagtgatgtcaggacgcattacaagctgtaagccgatactgactggccattggcaccatccttgactaaccttcctctttttctctagtgtgcctatggtgaaatggcaatagcattcactgtcgtattttgcagtgctcaggaagtgggacgttaactttgaaggtgcttgtttgtattagctctgctaggtttacctctacaacgtagatttcagcagctatgyganctgacactacattctagttcttaagattttttttccagatccccccttccccagctagacatacgtagcatactttcatcttattcagtctttctgtaacctgctgctgcttttagtcctcctcacctcagatcggaatcaatggagtgggcccagaggatacattttaattccagtaatggtaggtagatttgtcctgctttctaaaacatctcctcatttcatatttccactccatattgattccataagggaaaattaatgggtgtttcctcctttagggaggtaatgcaaagagtgtggacatcttctaatcttgaggaacagtagttgatttcccttgaaggagcttacatattgactgttttcacaataacctgtttgccccagttcaatcctcattttaatacttaatttggtactggctcaaatagcattttcttacagataacaaatcaagagtgaaatttgaggttatactccagtaaagtttttaacacttgtgaatatggtcagctagactaaacttgactcttttttttaatggcttttttatctgtgaacattcagataagtggattttcaagtactggttggggatgggaatcgtgcttttctttaaacttcagtttacgagatgctttgagagcgttaggcaaaagcagaaataaatatcaggagcaacggggaaagctttataaaagatcatggtggccactgttgcagctttgaagaatgagtgctggcttgaacagttctttgcctgcatcattggtagctgcactgaaaggaaaaaactttcaccttaagaatttgaaaaggaagaaacctgggctctggtcttcatggcatttagactgagatgcttaaacagaacagaagtaatacgcatttcctgccataggatagggaaaatgtaacaagctggttgctcttgaggttagaaaattgtctgtttctctgtggatgaagctggatttacttgaaaatggagagttggcttattgtttgaatattgggacatcaagctatctatagccaagtttcagtcgcaaccagttttccctttgtctggggtaaattcgatacaaaatgattctttttgaatcctgaatccataaattacacttttttttttcaaattcacaaaattcacagtggtgctgactgtgtaataaccactattgggaaacatcccgtaaacctgcctgttgccatgccaatggagtgactgaactggtgacatctgtttgagcatgctttgtgtggctggtagaatgccaccgttgtgcatacactttgtacatcaggggtgaagggagggttttctagattattgggggagggtaaaattgggatttttttgttgttccttttttgatggggtgtgggggtatagtactcagcttatgccctaaaataacatgtataaaaacccctgaagtattgtgtgggtgtgtacgtgtgagtgtgtgtttgtatacgtctggcaattaaagctttgtcttctggaacttagtgaattcttttctctttttcctccagaagtatttgttacaagatttgtaaataagagctctacttagtttgtttaccatgaacatgttgcagcaaaccttatgcatctaattcctacaaggttaaagaaaggcttttagacttgccaggttaagcaacagccaagttctcagtaattgtttgccttgatttatcttttagacttcattttgccagctctaaaactcccagtcttccttgattttagtccttaatcttttatgttctgagcaggaagggtaaaagacaggaacctgcttcactgtattaactagtccatgggctgagaccggggcatctcttttcttcatactgcaatgttgctagatacatgatcagacaccagagggttgggcattcttgcaataccttaacagtgctgaaatctgcagcatggtactaaggaagttaaagtttgaatgtaaccactttatttaaaaggtttttttctttaatttaaatgaaatggggttgaagtgaacatgattttgttgaccatgttcgtgaattacagatgcaacatgcattggtagaatcgtgtgatggtcttttgtgatacttaatttttacatatcccagtctctgtatgtatctgcatagacaaagaaaaaacaaactcctgctttgcttttattgaagggtttccaggactgcgtgtctgctcctgagctctgttttaagtatgtgtatcctttgcttgtattttgtattaaaaaaataagaaaaagaagcctttattgttgagcatgttggcattgtcccctttatttttttctctttttgggacatatgaagcaagttattctttttctgtatctttttttcttttgtaaactttttttttgttttgtttaaaaatggctttataaaagggcttttataacccaaaaaaaaaaaaaaaaaaaaaaaaaaaaagggcggccgctctagaggatccaagcttacgtgacgcgtgncatgcgacgtcatgagctcttgctnataagtgtgcacc

SEQ ID NO: 2559 - DNA, 1134 bp, Homo sapiens
  misc_feature (151)..(152): n equals a,t,g, or c
  misc_feature (441)..(441): n equals a,t,g, or c
  misc_feature (503)..(503): n equals a,t,g, or c
gctcgtgccgaattcggcacgagatgcagccctgtgtcatcagttgggaacagtgctcttttgtgtccccacgggggcctcatgtttacatttgcttccatgaccaaagaagattctaaactgtgagttaattctcttcatgtgatttttnnttcttcttttctctttttgatgattaataaaatatgtttaggaaatttctcatctgacatagtctgttttaagaatttagtcctttgctgaattgtggggtttttttttccccttttaaaagagaagaagactgcttctccaggaaagacaagaggctgcccgaggctatttgtctttttgctctttccttgtccctcttgaagacaacacagccaccctttctcttcccccgctgctggtgaccagtgctgagacctcttttccagaatcacagaatcaacatggtcntggktataggtttgttctgccatggccaggcttcagacaattaarggaggaggctagcaggntggcagagcaaagccactgcactggtcatctggaattctagggtcttagacccaaattttattccatgcttcargtacttccagaggtgtycatctgtgaattycycccgattttaccaaaaatcgtgatatacgagaaggtagaatgcttccaacattgtcagaaaatcaggaaaaggaaattggaacacataaataaaaatgcccttggggttaagctagagttttattattcatatttcagtactttaacatcatttaagggagttcaaagtttatatattctctacattttctccctcctctttctctccctccctctctgcatcccgccttccctgttgctctctcactctcgctgtgcatctctcttctctttcctccctccctttcttcctgtcgttgttattgcaaatgtcagacttccaggaaaatacaccagtaagcaaatgtgtgttaccattcagtttaaaagttaaatggttcaaatatgattaaaggccccacagtgcttatccttctgttgctacttctctttctcccacccttcctctcacactaaccactgtactgaatttagagtttatctgtctcagaaagtattctgtaaaaaaaaaaaaaaaaactcgag

SEQ ID NO: 2560 - DNA, 1586 bp, Homo sapiens
  misc_feature (24)..(24): n equals a,t,g, or c
  misc_feature (70)..(70): n equals a,t,g, or c
  misc_feature (271)..(271): n equals a,t,g, or c
  misc_feature (283)..(283): n equals a,t,g, or c
  misc_feature (1525)..(1525): n equals a,t,g, or c
ggcacgagaatgaaccttaatttnctttttttttgagtcagagtctcgctctgtcgcccagactggagtncagtggtgcgatctcaatttactgcaacctccgcctcccgggttcgggtgattctcctgcctcagcctcccaagtagctgggattacggatgtgcaccaccaggcttggctaatttttgtatttttggtggagacagggttttcccatgttggtcaggccggtctggaactcctgacctcaggtgaatccactcacctcancctcccaaagtnctgggattacaggtgtgaactcaccacgcccagcctgaagcttaattttcaaagacccaatctgagggtctgggagggaccctagcaatgtgttcacttggttaatttttaaaaaagttttattggtatataatatatgaatgagaaawttcataaatattataagtgtgtagtttaagatttttcacaaactgaacacacatatataactagcatccagatcaagaaacagaacattgccagtatgtggtcacatatctttgaagaatttgcaaatgtaagttatctaaaccacagtcagctaaaattgccgtctttttacctgacttcccctttgttacactcttccttatgttgggtggcattggaatggctgtgggcacttttggggtctggctatggggaaattgacttggagagatatttagttggattttagcaggatatgtttacatggttcatagcctctttgtgtatagtcaaggtattactagccatcccagtatgggaatggtttctaggaatactctatgtctgttgtgctaactcatggggcattgtgacataaacgtgcatagctagaggttgtctagcaatatgaatgtgtcctatggcatctggcacccaaagtgtgtggttagtagaggaaaaacaaggtttgatgtcaaaagccagtctggggaaaattctttaagattttgtagctttaatgaaagagacttgttaagaattttcccaggtttgaccatagtcctaaaagttgatataacattatttattgatgatgttcctgtgctaaaagaaaacttttctaagccawcaataacaacaggctgagcgtggtkgcttacgcctgtaatcccagcactttgggaggctgaggcaggcagatcacttgaggtcaggagtttgagaccagcctgccaacatgacgaaacactgtctctaataaaaatacaaaaattggkcaggcgcagtggctcatgcctgtaatcccagcactttgagaaactgaggtgagtggatcacttgaggtcaggagttcaagaccagcctggccaccatggtgaaaccccatctctattagaaatacaaaaattagtcgggcttggtggcacatgcctgtaatcctagctacttgggaggctgaggtaggagaatcacttgaacccaggaggtggaggttgcagtgagccgccaagatcgtgccactgcactccagcctgggcaacagagtgagantctgtcaaaaaaaaaaaaaaaaaaaagaaaaaaaaaaaaaaaaaaactcgagggggggccc

SEQ ID NO: 2561 - DNA, 1703 bp, Homo sapiens
gatttaatagctctttgaacctaattcagttcttttcatggtcttacctcaatgcaggtccaagacaaagtttctaggcctgttccttgctatttgccccagtgtagctctccagacaaaatggccttctttcacttactgaaaggcactgggttatttcctccctcgctgtcttcatctgtgctatgctttgtggstgatctttttgmctggactattcaccgttctgctcttctcttcctcttgcccctctccgtcttttcctgctaattccagattacctttaagatcttagtttggatgtcattgtcctagggacacccatcttgacacctatattatatwaggttaatttttccagaatgtgctttcataagacaatctatacttctcagcatttaacataattgtaatgaattaattwctygtgtaattattctttaatgcctgtcttcttcactagattgtaagccttctgaaggcagagaccacatctgtcttctattgctctggcttctaggacagtgcctggaaagtagttgtttagccataagtatttattgaatgaatacaagggctgtgctgtgctaggttctcattcattcagcagacatctgtgragcacctgctctgtgccagccccttggcatgagaggaaggtgggacataccaagattaacaaatcgaggaaatcgcatctgctagaggagcaggaacatagactcctgtaactgtagcccatggcaggaagtggagagtaaatatggagatgaagttagaaaggcaagtaggtggtttttgatgctgctttcttgttcaataaattgagtacctgctgtgtgccggggctgggcattcagtagtgaagacgagagaattcctaccttcaggaagattatagtctagcagggaaaagaagcaaagaaaccttttcctcctaggccaacaggtatttatggagagagtaggtgagcactttgaggtggtccttttggtctaagaatctgtattgagacttcacacttcattagacctgggcgaggcagttataaatactctcattaaccagagtgaaattccaagggaaaaggaagggaggataaggaacattgtttcctctcattgcatctgtggttaattcaggctctgaaatccttcccatgggtcatggacctatggtttcctatcctaagttggaatatgtgcagttaaatacctaaccattctcagtgtgccattgtctcatttgattcccacatagccctctgaggtgcacaggcaggaatgcctatttttcagctgggcaaacaggctctggaaggcagacttgcccaaggtgacacagtttgaactgggaagggatcagaaatctctctggctggctgggtgcggtggctcatgcctgtaatcccagcactttgggaggccgaggtgggcggatcacgaggtcaggagtttgagaccagcctgaccaacatggtaaaaccccacctctactaaaaatacaaaaaaaaattagccgggcatggtggtgcacgcctgtaatcccagctactcaggaggctgaggcaggagaatcacttgaccccgggaggcagaggttgcagtgagccgaggccgagatagtcccattgtactccagcctgggcaacagagcgagactctgtctcaaaaaaaaaaaaaaaaaaaaaaaaaaactcgag

SEQ ID NO: 2562 - DNA, 1114 bp, Homo sapiens
ggcacgaggggattataggcatgagccaccgtgcctggcctattctgtagtcttttgtatattacttaggattttctacaaatgcttatgtcatcagataataaagatagttttacttttctcttgcctgttcttatttcttttatttgtttttcttacctcactgtactgggaagtaacaccagtataatagtgaataaaaatggtatgagcaggtgcacatggctttttcttgatcttggaagggacttttttatactaacattaattttttaaaaaaaaattagtcttatttttcaacctgacttaagtcatttaataattactaggaaccaagattttgttgttatttgtcagcatagtaatccttttaagattatattttaaatttttttagaatgaagaaaatgtgcctttttatatgttatttggacttttgataaggaggaatcgaagaattgcatttgagaatattctcagagttcaattataaatctttttagaagaaatttaaagaaaatattaatagtaattctatcagatattcatcaatacatataatttgatttggtttaattaggtaaggtataggatgcaagaacaacaaaatagaattgataggtgtaattatagaaagatactggtagctgtgtgttgttttttctcttagacacagacacagaatttaacacctggaaagcagcatggaactgttagcagtttatatatatataatagtggtcattaaagaagaaaataaatgtttgtatgtattttgtttataattttagaagtacagttcttttaagcctgcacaataagctttttaagaaaggtatatataagtttaacttggccggcacggtggtggcaggcagatcacttgaggtcaggagttcgagaccagcttaaccaacatgctgaaaccctgtctctactgaaaatataaaaattagctaggtgtggtggcacgctgtaattccagctactctggaggctgaggcagaattgcttgagcctgggaggcagaggttgcagtgagctgagatcactccaccctactgcagcctgggtgacagagcgagactctgtctcaaaaaaaaaaaaaaaaaaa

SEQ ID NO: 2563 - DNA, 624 bp, Homo sapiens
gaattcggcacgagacagattcattttgcctgatgtcaaattccataggaatggaatctcatagtatctatcatttgcgtttggcttcttatattcaacatagtgtttttgaggttttttttttaatgtgcttgtaccagtttattttccttttttattggttagtagtattttatttggaatgtaccacagtttatccattcacctcttgatggacatttgagttgtttgtcatttttggcaaaacaagtatttatctcaagaagaatgtgactggagtgagacctagccattggtgggtaaaaaactagcaccaaaggcggggcgcggtggctcgagcctgtggtcccagcactttgggaggcaaggcgggcggatcacgagaccaggagatcgaggccatcctggctaacacggtggagccccatctctactgaaaatacagaaagttggccagggcgccttggcgggcgcctgtagtcccagctacaggctgaggcaggagaatgacgtgaatccgtgaggcggagcttgcagtgagctgagatcgcgccactgcactccagcctgggtgacagagcaaaactccgtctaaaaaaaaaaaaaaaaaaaaaaaaactcgag

SEQ ID NO: 2564 - DNA, 533 bp, Homo sapiens
ggcacgaggtcagctgtaccaggaacaccatgaagaagacttctttctctacattgcctacagtgacgaaagtgtctacggtctgtgaagctgctgcccctgagctggaggggggtctcattctacaaagagagaggtggcccccctttcttgacctcctcctccttcaagctcaaacaccacctcccttattcaggaccggcacttcttaatgtttgtggctttctctccagcctctcttaggaggggtaatggtggagttggcatcttgtaactctcctttctcctttcttcccctttctctgcccgcctttcccatcctgctgtagacttcttgattgtcagtctgtgtcacatccagtgattgttttggtttctgttccctttctgactgcccaaggggctcagaaccccagcaatcccttcctttcactaccttcttttttgggggtagttggaagggactgaaattgtggggggaaggtaggaggcacatcaataaagaggaaaccaccaagctaaaaaaaaaaaaa

SEQ ID NO: 2565 - DNA, 4015 bp, Homo sapiens
attgcaacccccactttttttttttttgctttccatttgcttggtaaatattcacccatccctttattttcagcctatatgtgtctttacacatgagatggatctcctgaattcatcacatgaatgggtcttaactctatccaatttgccagtctgtgccttttaattggagcatttaacccatttaaatttaggattaatattgttatgtgtgaattttatcctgtcattatgatgctagcttgttattttgctcattagttgatgcagattcttcatagtgttgatggtctttaacttttggtttgtttttgcagtggctggtaccagtttttccttttgatatttagtgcttccttcaggagctcttgtaaggcaagcctggtggtgataaaatctctcagcatctgcttgtctgtaaaggattttatttctactttgcttatgatgcttagtttggctggatatgaaattctgggttgaaaattcttttctttaagaatgttaagtattggctgctactctcttctggcttgtagggtttctacagagagatctgctgttagtctgatgggcttccctttgtgggtaacctgacctttctcttgggctgctcttaacattttttctttcatttcaaccttggtgaatctgatgattatctgtcttggggttgttcttcttgaggagtatcttagtggtcttctctgtatttcctgaatttgaatgttggcctgtcttgctaggttagggaagttctcctggataatatcttgaagtgtgttttccaacttggttccgttctccccatcgctttcgggtacagcaatcaaatgtaggtttggtcttttcacatagtcctgtatttcttggaggctttgtttgttctttttcatttttttttctctgatcttttcttcatgctttatttcattaagttgatcgtcagtctctgatatcctttcttccacttgatctattcggctattgatacttgtgtatgcttcacgaagttctcctgctgtttttcagctcaatcaggtcatttatgttctttaaactggttattctagttagcaattcctctaacctttttttcaaagctcttagcttccttgcattgggttagaacatgctcctgtagcttggaggagtttgttattacccgccttctgaagtctccttctgtcaatttgtcaaactgattccccatccacttttgttcccttgctggtgaggcgttgtgatcctttggaggagaagaggtattctggttttggcattttcagcctttttgtgctggtttttcctcatcttcgtggatttatctaccttttggtctttgctgttggtgacctttggatggagtttttgcatgatgttggtgttgatgctattgctttcagtttattagtttttcttctaacagtcaggcccctctgctgcaggtctgctggagtttgctgcgggtccactccagaccctgtgtccttgagtatcaccagtggaggctgcagaacagcaaagactgactagaaaaaaatcaccgtgagactagtgttaagcatgagaactagtattaaatgaaagttataaagaatagtgtgtaatgactatatgttttggcaaagaaatataattcagctgtaaaaaacagtgggaagagcatatgcaaaaaattttaaaaactattttctgccatcatacttttgactgtagtgtttgttttgttgctcaggtattttctgtgtattgtgcagcagagcaaatgaataattatacattattctaattttgttatctcctgtgtccttgagagctaggaatcttaatgtggaagaaattatatactgtttatatttatatagatgtaagaaggctaaatcctctacttctgatttttaattagaagtatcagtatgaacttgagattctttaatgtcatttaaaaatagtatataccttatatttgtgtgtatatatatatttgtgcatatgtatatgtatgttaatctgagaatgttttatgtgtattgtggcataaatcaaatgaatatttatgtgatattttaatgctggcatttccttgctatgtctatggaaaagtcccagaaatgaacaaacctagttctgtgaatgtggtcttgaagtgctgttttctgcctgggtgcagtggtccattcctgtagtcccagcactttgggaggccaaggcaggtggatcacatgaggtcgggagttcgagatcagcctggccaacatggtgaggccccatctctgctgaaaatactaaaattggtcaggcatggtggcagacacatgtaatcccagctactcgggtggctgaggcgggagagtcgcttgggccctggagggggaggttgcggtgggccaaggttgtgccattgtactctagcctgggcgacaaaagcgaaactgtctcaaaaaaaaaaaaaaaaaactcgagactagttctggaagaagaaaaatacttctatttgagaaccctattgaggttgcatgccaacttctggagatgttcagacaagaaaaaaagaaatgtggtaaattctaattttacctttttatgtctattttatttacatgacttcttttcagtatccaaaacctaatataaaaaaaaaatcacataatcatttttatgcattcatgtgtaattcaggtatactgtcatattcataactttcaaatgattccaatcaaattcatcctaataatcatctaatattatttactactactacaggaactgaaaaacttatttcatatatatcacttttccatatctatttcacacaaataaacaactaaatatttggtacaacttctaattccacattaaccattcatattttacaacctaaaaatatctataaacaagcacctttgactttgtaatatttacatatgctcaagggaacattttgccagaagatcgtatggttggcttcaaaagaatcttttaaattttcatgtatacttagattaaatttttaagagactagctccaactaacatgagaaatgaaagaatacaaatgactgtaacttttcaataaccttttctcacagactgaaagaatatctgaagaaaacattttgaaattactacttaactattatttgatgtaattctaaaatgtttataaacccgtaacttgtaactttccttccaagaatctttataacaggagtactatttttcttatttgatttgctttgtttagcttagcttagctattaaaatggctaattatactgaagattttacatctttccaacttaaatcagcaatgaatatacatcttcctttcagctacaaggaaacatatacaaatgaaaaatatttaaactgaattcttaagttattagtcctaatatatcccatatgctaacctaagaggcactctccttaattatcttcaaattctcatccttagttcaaacatattccttaaaaaagaaaaaacaaaagattattaaaaattatacttactttagccaacaattcttgtgtttcaggagtcagtggagcatgagaaaacttgcagtattctccctgataacattttgttcctgtatggtaaaacttacaaggatattcatgtaacccaagtgttaaggaagagaacaattttaatccaattgaaataatgttattaacttaatgactttatttttcctaaataaagacctctgtggccgggcgaggtggctcatgcctgtaggaggcggaggtgggcagatcacttgaggccaggagttcaagaccaacctagccaacatggcgaaacctcgcctttactaaaaatccaaaaaaattagctgggcatggtggcgcaggcatgcctgtaatcccagctactcaggaggctgaggcaccaaaatcatttgaacctgggaggcggaggttgcagcgaaccaagattgtccactgcactccagcctgggcaacagagcaagataatgtctcaaaaaaaaaaaaaaaaaaaaaaa

SEQ ID NO: 2566 - DNA, 550 bp, Homo sapiens
  misc_feature (376)..(376): n equals a,t,g, or c
  misc_feature (407)..(407): n equals a,t,g, or c
  misc_feature (516)..(516): n equals a,t,g, or c
gaattcggcacgaggtggagaggacgggcaggtgttcacgtgcccagttaagagtgagatgggtttttatcttcgagtgctacgcctcgtttatgtatttcaggagttgctggggcactgtgggtcagcggctccgggcacctcctgtgcttgaggcagacaccgtctccccgacctcgcttcaccccgtgggtgaaaatgctctgggagctgagaaaaactagtttgtgatcttacagactttcagggctgcacagttttgtaaataggtaaaacactttccagtgttacgattttagtaaattcgtgcttttaaatgatggaaaaaaaaaagaaaaaaaaaaaaaaaaaaaaaaaactcgagggggggcccggnacccaattcgccctatagtgagtcgtattanaattcactggccgtcgttttacaacgtcgtgactgggaaaaccctggcgttacccaacttaatcgccttgcagcacatccccctttcgccagctggcgtaatagcgaanaggcccgcaccgatcgcccttcccaacagttgcg

SEQ ID NO: 2567 - DNA, 812 bp, Homo sapiens
ggcacgaggccactcagctgctagcactctgttctctcccctcatcctctccagaatgtattttagaacttgactcttctaatgactgaagaaaaggtggggtatgggaagatggcctgggactgcagggtcacttacactcacctggctaagagttgagatctggctggtgccctggagtggcacctgccactcacctaatcctaaacaatccagggtgtgggcccaggattgccctctgccttttgaaacaccctccctggttccggcttctaagaccaacagggaggctactttggtggcagggagctgactcaccctccagttggaactggtgctaaaagcctccatttaacgacagccgactgcttggccccaagtgggctgccttgtgggggggaaagttcagtggaaagtgttggaggaagcagggtggtgtgtgaatatccaagtagtgctggtgctattaagctctgacacagtcagggaggtcagttaaaatgtggtcttatggccgggcgcagtggctcgcgcctgtaatcccagcactttgggaggctgaggtgggcagatcacctgaggtcaggagttcgagaccagcctggccaacatggtgaaaccccgtctctaccaataatacaaaaattaactgggcatggtggcaggtgcctgtaatcccagctacttgggaggctgaggcaggagaatcgcttgaacctgagaggtggaggttgcagtgagccaagatcgcgctactgcactccagcctgagtgacagaacaagactccatctcaaaaaaaaaaaaaaaaaa

SEQ ID NO: 2568 - DNA, 898 bp, Homo sapiens
ggcagagggaaatgtaaactttaggttctttaagtcactgttacaagagcaactcaaatttggaatatatggaagggagattataatgcaaattaatgattattttctatcctaatgtttcatttggctgcttttccaagttattctggatggttactggaccccaagattacctagccaactgtcagttttgaggaagtacctgagatgttaggaagacagaactgcactgtttgtcctcatttctgctttctgctgataaatggattgaaaaggaatatgagataagaaaatgaaacaaatgtatttatttcttgktgcctttctggcttcctccactatttagtttcagttattcagtaggctgcgtaattatacttattcagggctggacaaagggtcagtamcctgataagcgtcaactatttctctgattgtcaaatatgtagtcagtatgtttaatgttttaatattctatgatcaatgatgcataggtttatcaatagctgctaagtttcattgaggtaatttatggaaatttactcatagcaactaacaaacgaggaagtattacaaaagatgacagattaggccaggcgcagtggctcatgtctgtgatcccagcactttgggaggccgaggcgggtggatcgcctggggtcaggagttcaggaccagcctgaccaacatggagaaaccctgtctctactaaagaaaaatacaaaattagctgggcttggtggtgcatgcctgtgatcccagctactcgggaggctgaggcaggagaatcgcttgaacccgggaggcggaggttgcagtgagccgagattgcgccactgcactccagcttgggcaacgagcgaaactctgaatcaaaaaaaaaaaaaaaaaactcgag

SEQ ID NO: 2569 - DNA, 899 bp, Homo sapiens
ggcacgagaagttgttagctgacaaagtgatattaaaggagatcctccccattttgttagtatctgtaaattcatgtatctgtattttctgagttttgtggtcacagaaagaaagaatgaacaaatagagtaattttctgtactcacatttcggtaaaatgaaggtgggatatacaagtttacacttacagtctgtgcagcccatatacgttttctggttctggggttgtttttatattctctgcatggagactggcaacatcagcatcacatgagtaccacctgactctagtgacctagtctctttcaacctggatttttaattgtttggtctttttgtttgtttttaactgcttctgcaggctaccccataggagtgtgcccagaatagcctgttttgtctttagttctgcaacatcagaagacaaagagtaaatattatatgtgcatgagggatgctcttaaaaaatggttcattttactttcagtaagaggccaggtttcttgatgcacaacttttttgtttgttttacagtggaagatagatgataagcctgtaaaaattgacaagtgggatggatcagctgtgaaaaactctttggatgattctgccaaaaaggtactttcttgaggaggggttggttagtatctatacagctgatggccatctctcctgggaaatcttttccttttgtaacttggagtgaccttagttttcagtgttagaaattaagtcagaaagcagtttctaaaatttctcacagaaaaagtcagaggaagtgtgttgaaatatcaccaacatggcacatgtatacatatgtaacaaacctgcacgttgtgcacatgtaccctaaaacttaaagtataataataatcaaattaaaaaaaaaaaaaaaaaa

SEQ ID NO: 2570 - DNA, 484 bp, Homo sapiens
ggcacgagcaaaggacatagaattaaggaattaaccttagagaatgtttacattttaaagagtggagaagaatcaaagagtagtcaaatatgatagaaaatcctgggcgactatttctgagttctgttttgttttgtttttttgccctttaagtagctctctttagtaggaaagggaagaatattgacttgggttagttagttctgatttcaaatttcccctttatcacttacttggcagtatttaaccttttcagagtgtttcactgtcagaaaataggaattcagggttgtgaagattacataaaataaatacataaagcacagtgcttgtgacagagtttctttaacttcattagcaccttccctgtgacttcaagtatagacaggacttttatacattagaatggaatatttgtttaactttgtttatgtctcttgttttctccttccttttgcttccacttaaaaaaaaaaaaaaaaaa

SEQ ID NO: 2571 - DNA, 1391 bp, Homo sapiens
  misc_feature (1058)..(1058): n equals a,t,g, or c
  misc_feature (1093)..(1093): n equals a,t,g, or c
  misc_feature (1143)..(1143): n equals a,t,g, or c
  misc_feature (1156)..(1157): n equals a,t,g, or c
  misc_feature (1214)..(1215): n equals a,t,g, or c
  misc_feature (1232)..(1232): n equals a,t,g, or c
  misc_feature (1247)..(1247): n equals a,t,g, or c
  misc_feature (1285)..(1285): n equals a,t,g, or c
  misc_feature (1295)..(1295): n equals a,t,g, or c
  misc_feature (1307)..(1307): n equals a,t,g, or c
  misc_feature (1315)..(1315): n equals a,t,g, or c
  misc_feature (1325)..(1325): n equals a,t,g, or c
  misc_feature (1340)..(1340): n equals a,t,g, or c
  misc_feature (1366)..(1366): n equals a,t,g, or c
  misc_feature (1368)..(1368): n equals a,t,g, or c
  misc_feature (1373)..(1373): n equals a,t,g, or c
ggcacgagatcacctcctccctcctttcacttttcattctgatggtggttgcaccgctactggcttcactccctgggctggggcccctggactcaccgggtgcagggattgtaacgatggggccctggactgtgacgtcaggccaggcggggcggggctgcaactgctccacacatgtagctgcgggactatgcccagcttgggccgggaactctggcccacggctgataagagctttttcagccccagggtggaggctatgctgctgctccttttcttgttctggtccaaaggggcagccgagggggagccgggtcctgtgccagctcctgctggattctctgaaacacaacggtggaggtgagggggcgggggagggccgggagggtggccagggagactgtaccctgggggccatctcaagggccgcagatgggccagcaccaaatgcctctggcacatttggggccaggaactaacaaccaggctgtagaaagaaaggccaagtggaagccgggtgtggtggctcctgtctgtggtcccagctactcgggagatggaggcgggaggttcacttgagcctggaggtcagggctgcagtgagctgtgatcacgccactgcactcaacctgggcgacatagtgagacccaaaaaaaaagaaaagaaagaaaaaaggaagagaagaaagaaggaaagaaggaaggaaggagagagagagagtaaaggaaaagaaagaaagaaaagaaaagaaaaaaaaaaaaaaaaaactcgagggggggcccggtacccaattcgccctatagtgagtcgtattacaattcactggccgtcgttttacaacgtcgtgactgggaaaaccctggcgttacccaacttaatcgccttgcagcacatccccctttcgccagctggcgtaatagcgaagaggcccgcaccgatcgcccttcccaacagttgcgcagcctgaatggcgaatggcaaattgtaagcgttaatattttggtaaaattcgcgttaaaattttggtaaaatcaagctcatttttttaaccaattangcccgaaatcgggcaaaaatcccttataaaatcanaaggaattgacccgaagaataagggttgaatggttggtccaagttttggnaccaagaagtccnnctttttaaaagaaccgggggaccttccaaccgtcaaaaggggccggaaaaaaaccgnnttattcaaggcccaaanggccccacttcccgnggaacccctttaaccccttaattcaaaaggtttttttnggggggtccnaagggggccccnaaaaggcncttaaaattnggaacccccttaaanggggaagccccccccaattttaaaancntttgnaccgggggaaaaaacccc

SEQ ID NO: 2572 - DNA, 1125 bp, Homo sapiens
ggcacgagattctgggacttacctacatttgggagccactaaaaagcatctcctaatgtgccatatcagttcttccaatgttgcctcctcccagaagtctctcatgccttccctcgccctagctatggaacgtggtttttcttgtctttgaacctttatgggtcaaatgttattatcagtattattacttctccagtggctctgttctcactctgcctccaatctcagcagtttctcttctgtctttacccatctaggtagatggtaaattccttgcaagtgggtaactctcttagaacaccttacaacatctcacacatagggtgacctgaagttcagacattctaaagtgtcattgaagactcaatgttgacttaataattggtttgttttcaagagaagaaaagcaccacctccagaatgaaagatggctgtatttcagagacactcttaaagtataatgcagcataacaagactatgaattatcagtccatctgttcacaataacttaccctgtgtgttgagattatcttctgaaaggtcaccttcaaattatatgaacagaaagaaagaaaaatactcctaacacaaccaacatgtctcagatggagactgacaatggaataattacttccaataagtagcaaacttagcatgtgataataatggccaataatactctaatagttcttgtcctagtattgtattccaggagcaattctaggcacattacctcagttctcccatcaaccttccaaaggtcattttacagatgaggaaactgaagctcatacagttactcatctttataagttccttttaaggccaggcacggtggctcatgcttgtaatcccagcactttgggaggccgaggcaggcggatcactggaggtcaggagttcaagaccagcctggacatcatagtgaaacctcatctctactaaaaatacaaaaaattagccaggcgtggtggcgggcacctgtaattccagctacttggaaagttgaaggaagacagtcacttgaacccaggaagtggaggttacagtgagctgagattgtgcaactgcactccagcctgggtgacagaatgagactccatcttaaaaaaaaaaaaaaaaaa

SEQ ID NO: 2573 - DNA, 366 bp, Homo sapiens
ggcacgaggctgtgtgttcatggtgtgcctgctgcttagaaccctgtgccctctttgttcaaggggtaaaactggattggaggtaaacctcagtctctttctgtacattgaaggaagagatcaatgatcttcaaaccaatcattacagatttccccagttgaatttgacttagcttttggatgttgagactgataaggtgattgaaaacctggccttaaccacagccaatgatattgagagttcaaggagaaacacacagccttttcaagggtttagaatccgattgggattgggaggaggtgtgtatccacgctacctcatggaagagtgtttctagtttaaaggagacagaaaaaaaaaaaaaa

SEQ ID NO: 2574 - DNA, 1066 bp, Homo sapiens
  misc_feature (630)..(630): n equals a,t,g, or c
ggcacgaggtttcaccgtgttagccaggatgatctctatctcctgaccttgtgatctgcctgccttggcctcccaaagtgctgggattacaggcgtgagccaccgcgcccggccaagccgcatccttttaaattattcatctgttgaaggatgtttgaggtttttcactttttggcttttgtaagtaatatggtttggatctgtggcgccattcaaatctcacatcaaattgtaagcctgaatgttgtaggtggggcctggtgggaggtgactggattatatggttggattctcatgaatcatttaataccattgcctttggtactctctttgccataatgagtgatttctcctgagatgtcactttctttctttgtttttttgatatctcatccatcgcagtttaayctacaaatgaaatttctacagaaacaggaactattttaacaaagaaaaaaatccctcattcagacttctttgggtagtggtaatggctgcaaatttgcagcattwgraaactacactatcaacaagcttycctttawgaactgagatgtmcaaatgtagaaagcagatgaaagtgaattattyctycaacattttagtaaaactyctgataaycagagttcnaagcacataacaactcaagcataaatgaagatggagagcctggggagtttgatttcttaaattttccaaaaaggtattattgcaaacatataggatttccccccattttaaccttaccagtttcaaaggaaagtaaaggtactggattacatgaagacagcatgtgtgcgagtgcacacgcatgcagggtggcaggtagagtgtctaattcctttttcttactacccaagtctcacttcacagaaatcattaggtaaaggaaaaccaacgaggagttctgcagttttcttttaataactgaggctgaggcaggagaatcgcttcaaccctggaggtggaggttgcagtgagccaagattgtgccactgcattccagcctgagcgatagagtgagactccacctcaaaaaaaaaaaaaaaaaaaaaaaaaaactcga

SEQ ID NO: 2575 - DNA, 605 bp, Homo sapiens
  misc_feature (449)..(449): n equals a,t,g, or c
tcaacatccagccttagaaatagctccctttaggtcaccaaattaacaggagtttctaaaggatagcagcttttttgcaactgctgcatctgttagattcatgttctctttgctcccttctccccaagcttctatttcatgatctttttgttgttttgctctacttttcctctttttaaaacctctgcattggccacccaggatttaagaggagcttttctggaaagctgtctgaaacaggaacaaattacacagaaacactgagagctgtgaacttgtgtgtatacctgacatagtgggagaggggggcttccttctaagtaatagagaagagtgaatattctaatcattgagtagtggtcaggcctgtaatcactgctttttcttttgctgagctcggtatcaacggacaagctcaaaaattgtagctatttaaaattactctccangtaaagggttccygttcctttgatcctatcacagactattcctttttttctattgaggaggttcataagatctcgtgggcaagggctgaggagatgactattgcgtagtgtagttgttttaaattaaaaatttacctctagttataggtgctactt

SEQ ID NO: 2576 - DNA, 3116 bp, Homo sapiens
  misc_feature (1342)..(1342): n equals a,t,g, or c
atccacccgccttcagcctcccaacgtgctgggattacagccgtgaagccgccgcgcctggcctagacttgtgtgttctaaacaggttaagtagcaggttgggtttttatgatagtgcaaggaatgactcatgcctctgagcttctaaactgaagctgctgtaactaaaggaatctgaaaagaacaaccctgaagcagaggcctttattgtcttggttgccagtagtaccttgttttgccatgtagcagacaacacacaaaataatgcagttgtggtgtgccatgctatgtgcacagccccttggattactttgttttaaaaagcatcagagttgggggtactttagggaaacctttgcttaccttgttttgccagtgataagagcagtgggttggagggcacttggccagttttctgttcagcttttcagtgaatgtacccctttaaggttcagacttaaacttccttaaaaagtggcgttgttcatagaatcgttggactcattaatgaatcgttcaactccactcactgaagcccagacctccgtgcccagggcccaatctcgtcaggctgccagagaaagttggtgctgctcatactggtctcacagtctaagtaagtgtctgtgatgctcccaagcaaaggaaatgcaagctctggaaattcgttaatgtatttgatgtcttagtgttttagtgactagggagaccattaactagtttatcattaaccacttatcagtgtattgatgttaaagcatttccctgttagctaaaagaggcctgttcatacaagccaactggtatatacgtgtggttcatccatcatctgctgcacatagcagactagaattctgggaaccctgtgcaattcagtctgctctcccttgtggaccctggtaaagaaaagcctcagctcatagtgaacacagcagacctagaaatgtagcagcagcctactgagtagctttcatttactgatcatctgctgtgactgtggccctgtctggaggttcctaggttttgagatttagagcaatgcattctggagacagaaccagcagaacagccatttttcaatttttctttaaatcagtattccatcaggcagataactgctgtattcatgaatcttgagagtgttcctgagacagaattaatggtcatttgggaaaactatcgccatggcttcccatctgtggttttcctctaaaagccttggagattagcccttccttgccagtgagaacggtgaccgcctcctgctctgcacggtctgcggcagttgcccttctggttaggtgtgtcaggttggcttattttgggttcaggcctggcgtanacccacaagtggcagacatatcacaagagtccccagactctgcctagaaacagtgtttgccctttggccagtgacgtggttcatcccggcccatgttgagccatgagtggagtttccaacagagggaggaatgtgtgccttgttcaaggagggcacgacccttaggcctttttcaaccagatttagctgaagggcttgacacctttgaattacagcagttgactcagagtgcaagaagtctggccattttggaaagcaaggtttcctttcagccctgtctactgaccaataccccgactcaccttgtgtggcgcacttcagaatcagatatacctagagtatacctgtggtttggttttataattaatcagctcgttacttcagcccatgaaaatggcatccagggctgccaggagattcagagctcaaaacaaggcgagcttgagttctgcactccagatgtgtgccaaaactagtaaaacttaacggacttacaaccttgtcagtttttttaatgaggcagggatactctgtttttcacactaaacatatgaatgcagcactgctgcctcagctcagcttcgtgcctgggttccccactggtctgggaagactgttgtgctccatagagcagtgcacatctgacccagagggtgggtgttcataactgctacttgctctgctctaccatgtttaaagaaatatttggatgttaaattaactcactatggtttttcacctgggaaggaaacaaattacgtactagagggcattgattggttaaaaacttgtgtatcccgggaaggacctgcggtacaggagtcagccatgtctgtgctgtgtggaaccacctgatgacatggttaacgaggaagacgatgtgttgaccggctgccgtttgaggactttggtcacccagactagacaccttctgtgctcatgtttggaaagctgaaagggaaggacagctgtgccctcctgggagctcatgtgtccctggcgctgtgctagctttcctttacagctgtttacagacaaggcaggcctgaggcagatggccactgctcttgtgatgtttgctcagaggaatatgaacattttatttttgaaaagggatgatgtggttttttgccaggtgtttataattaatcctttaatattatggttattaacctcttaaacatgaatgaattcttgattgttttaacacagtacctaagactaatgctttctgtggacaccactgagctctgcctcaactccaccctctgcgaccggaggactatgcccctagtaactgctgtcggtgtggacgctgtgctggttctgttttctaaaggagcagaaggacaggtctctgagacaggatcgttgtccctacaggaggaacagtggccttgcttcttagacggtcttcactgtgtgttttaaaacaacaacaacaacaacaacaacataaaactcttttgacctgtaacttaaagatcataaacttcaggcaataatattttctgtgtaagcttttaaaattatttttggggatcatagcttgttttattttgtgctataaaattaacagtattaaatgacttatattcttagaatacatcgagtgtcttttcttaacagattagtgcctttttatttttgtattccgttttacgttactggtcccagcatcaaaacccttgtttccatggcctgtttgtatattgtctcaataaaacttgcatcagccggtggtggcggcaaaaaaaaaaaaaaaaaaaaaaaa

SEQ ID NO: 2577 - DNA, 1073 bp, Homo sapiens
  misc_feature (694)..(694): n equals a,t,g, or c
  misc_feature (1050)..(1050): n equals a,t,g, or c
  misc_feature (1056)..(1056): n equals a,t,g, or c
  misc_feature (1067)..(1067): n equals a,t,g, or c
  misc_feature (1072)..(1072): n equals a,t,g, or c
agctccaccgcggtggcggccgctctagaactagtggatcccccgggctgcaggaattcggcacgagaaaaaacagatgagagcctactcactccaaggggatggttttaagccactcatgggttttaagctcccatgatccaaacacctcccaccaggccccacctcttaacactaggctggagtacttgctttctagtgtggtctcatgagattcggacaggggcacatatccaaaccatgtcacatacaattcaaagaattatagcaatgtgtaagtaaaaagatcttaatcttttgtagtaaaaacagaatgaagaagtataaatggtgaattttcatcttggaggacaggagctatataaaaacccatcatgaaaagtctcagctttgtatctgggagaaacacatgatgaaaacgagcttgttatgttttttgttctctkgtaggcctagtcattcattttgsatgagttctaagccctggttaacaatctcccttggtttcttctgtagctcttattataccacactagaaaagcaagtactccagcccagttcccttactttctaagtctttttccattttcaagccatgtgtgktatgtgctgattttggaatggtctggaatgctctcttcttaacctcaacctctctgagaccttaccaatccgcagagtccactggagtctnacctycaagataacttccccaacctctctgagaccttacccatccgcagagtccactggagtctcacctccaagataacttccccagccacctaaaccaagccccagcatccccagcatcactctagtgcttagttattattcggggatgaggtgaggggttgctagatccacatgaaaactctacatgctgtgaagtgcagtacagatgtgagagggcaacactgttttccttgcattattatttttgttttacctgttatgtgtttgtcctgtcatccccttcccccacattatgaccctcctagaggtcaaaagctttatgtttcttaacccatccccaagtgcagaaaaggnaggggnaccgaacccgngtcgna

SEQ ID NO: 2578 - DNA, 2195 bp, Homo sapiens
  misc_feature (2169)..(2169): n equals a,t,g, or c
  misc_feature (2179)..(2179): n equals a,t,g, or c
  misc_feature (2187)..(2187): n equals a,t,g, or c
  misc_feature (2192)..(2192): n equals a,t,g, or c
ggaaaagccatattgcggatcctcatagggatggtatttgtactaataatcagagatgtaatgaaaaagatcaccattcctttagcctgcaaaatcttcaatataccgtgtgatgatattcgaaaagcaagacagcacatggaagttgaacttccttatcggtatattacctatggaatggttggtttctccatcacattttttgttccttacatatttttctttattggtatctcttgatggagaagtattgtttatgataagaaaggagggtatcagttactgatacccaaaaatatattccaggtaaagccaggtcagaattaggcttttgcaggaatttaacttaaataattatttaagtaaattcataagagtcagtgcattttatcattgcacatccagatactgttttaggtgagctgagctatttcgttactgagaaaatgataagtatccatttagaatgttcatgtaatgtttggagagttttgtattatggattcaacttatatataatatatataaggtacataatatgcaattatatatctgatatatattatatataaaataatatacctaagtgtttttttaaactatgggagtgtattataaaatcaataataatatgcaaacagttgtgcctgtgtatttgaactacatacaggtatgttgttattaacagatatatttaacatttatttactatgggagccatttcctaattgaattgcgtaattactagaccagaatgcatatgctactatacattgatttactgcctgtttttacactgccattacctttcatgttatccatgatgttgaacatgggaggcatttttaatggaccaaatttttagaaaaattagtttttggatttttttttaagttctgtatactgttttgaatgaactttatttgcagctattctggatgtcagtttaataattcaggtactgaattttattgcttgctaattgtgcctttccgttgctaaattaagaaatgctatgtgtactgtgatgtaaaaataagacattaactttatcttaagttacatataatcaagcaaatattttaaaaaatgtatgtcagggtgacaggcataaaagtaaattacccttaactctttagcctttatttagaaagaaatgtggaatgggctaaactttctcaccaatttattagaaagctaaatggataaatacttccctttttgtagatatttttctgtgcattgtaagttataggagcaggacatattttttgtacattgtcttgattgtttatactgcaggtaggtatttccagtgaatggaaacgttgaaatttatagatgggacaatgcacatacttcatatgtaaacaaagcatttttctaaataatttggaaaggattggatttagcaccgttaacttttaatacccatttattggctatttaaggtaaattataaaacctaaaattagtatcagtattttagatcctattattttttcaactttctattattttcacagtggaaaatttgcgtatagtattaaactattcttttttctgtctacctttatattttgaagtgtggttgtacttacgttaatagtaagtgtatttgtagaaagtttttcataaagaagagattaactttccatataaataaataccaggtatgaaattactgattttagtgcaatatctgtatgattatccagaactatcacttcagatgtttctattttgggcaccataactatttgagctcatatttttataattctgattgagaatttaggggcatggtaatttttaccaaaactgaagctggtaattttaagtaaagcaactaaatttaccctttacttattagttaaaaggaaaccaaggcatgtaggaaaatattggtacgttggaaaatgtgaaaagagctttactttcaaaatgtatgtttaatgaattgaattttagggaccgtttcccataatttgggcctatgctatcctgttgatttttatgtctagcttaaaaggtatttgaaaatgttccatttgtgttttattattttctgtcctatgacagttctatgctaaatgtattttaaaataaaagccaaattgaagattaaaaaaaaaaaaaaaaaaaaaaaamcycgagggggggcccggnaccaaattcncccaaaanggggnccc

SEQ ID NO: 2579 - DNA, 1057 bp, Homo sapiens
ggcacgagccttcttcaagaaaggctgtccaactagctctcacttcctctcgtgtgttcagtgtcacccggaagcagagtttaatgtgactaaagtcaacattggctcacactgtcagggagtgtgggaagatgagtaaggactcatcgcagggcgatacccacagcttaaaataggcaccttcccctcccaggtctggttagggcagttgttacatatgaggggcgtggagttttgtcttgtattttggccttgttggtaaagcattccaaagcttcgacacaccctcctttcagcccattaggaaaggctgttgattgtaatattcacacagctccctgggctatggttaagagccttgcagaaggactgggagaagccctgtgtgtttgaagtattgtagcatcagaaaaaaacaccggaagaaggcaggtggggacaaggtgcctatgtctgctccttggaattcctttccttactgtccgaggcaactacagggaaagcaaagcgtgagcccccaaatccacacctgggaggaacgttcccctttgcaaggcatgggactggctggccctgtgtctcacgggggctctgagttttgaggtcacactagcctcctgaggcctggctgagagggctgggttgggggtcaggaggccccctgtagccacgaagcttcctctggggcattgttaaaggttcaccctctttttttgtggggtatcctggaagatctcaagaaactgagcttggaagaagagaggctgagagggtctcccgccgcctgcgttctctgcagctatggccccacagcctccagtgaccatggaggggaaggtgccacccgccttggctgctgaaagggtgatgctcttatgcctgagtcttggctcctgtggtcctgcagagaccctgtgggggccgcccggtcgtcacctgcactcatcttgggttttccttccttttccaccctaagctgaaggtatttttttcctgttttcttcactctaacttggggaagaaggaagatcctttatggaaaaaaaaaaaaaaaaaa

SEQ ID NO: 2580 - DNA, 1626 bp, Homo sapiens
  misc_feature (1102)..(1102): n equals a,t,g, or c
  misc_feature (1206)..(1206): n equals a,t,g, or c
ggcacgagcccgcttcaggagaaactgtatgtgccatcccttttctcagagcattatgcacagataattgtgtaactgcatgaaacatatattaaaattaggtcagaagtaaagtatggttggaatttgggtatgcgtctgccacttgtctgtgtctcaagcacttaaaaacatatcctattcctggcacagttcagtgcatttcgggaagtgaccaatagtcagggaaataatcaaggtttctggaacaaaatgcaagagttggcctgagatcactgctctacctagagaggagtagggcaaggccagtctkggccatgattcagagtaaggatgactgacccagccacaggggaggacagtgcccaggacctgtgtactcctatgttcccaatgcctaagagtgcccagcccatggaaagtgttcagtgaatttaatgaataaatgattctacagaaatgggcacggggaaggagaaagggcctgcagtcttttatttttattttattattttttttttgagatggagtctcgcactgtcgcccgggctggagtgcagtggccacaatcttggctcactgcaacctccaccttccaggttaaagcgattctcctgcctcagcctcccgagtagctgggattacgggcgcccgccaaccacgcccggctaattttttgtatttttagtggagatggggtttcactatgttggccaggctggtctcgaatgcctgacctcatgatccgcctgtcttggcctcccaaagtgctgggattacaggcgtgagccactcgcccggycggtcttttattcttcatacaagtgtccttcctgcacatcccagagctatctaagacccattctgatcatcactaatgccagttccctcttctgtgaggggcagtaacacccctggtgctgcctacctcacaggattgtcctgagagaccagcgagattctgcatgtgaaggggctttctctgaatagtgaagttctacaatgtgactcatctttgcggaccctgcctycacgtgagggtgggagacctctgctyattgscatttcttttcagattctgcartgttaarttggaaggtwnccacggaagccacattattattacataggaagtgacatyactttccarcttgttttggggggccaaaatcttgctatgktcttggccagcacctcagtttccancctccttccaacccattgtctttctttgtaactctgcctaacaggtctgggaggtccaactttgactgaggatgttaccttcccctccccagtgctgacctcctccctcctagttacttggcataccgggaaccacatcatcaactcctgtgggtaaaaggtgacacatgagccataacactgcttgctttcccagagatgcctgggtttccaggagctgccacatcactcttcctcttttgcatcttaatgttggcagtgggaaagagttagaggtggattcctggacccagtctggcctgcattatttcagcatgtggaatagaggtcactaaccggtgtgccacaggctagtctcagcttgcaaatgtattttgtctccataaaaaaaaaaaaaaaaaaaaaaaaaaaaaactcgag

SEQ ID NO: 2581 - DNA, 1692 bp, Homo sapiens
  misc_feature (23)..(24): n equals a,t,g, or c
  misc_feature (72)..(72): n equals a,t,g, or c
aaggggcaaaagctggtagctcnnccgcggttcgtcgcgctctagaactagtggatcccccgggactgcagnaattcggcacraggaactcctggattcaagcaatcctctctccttggcttcccaaagtgctaggattacaggcgtgactctggcacccggcctcagtgtgtgctcttaattgctacactgtgccgccacttggcaatgtcacggccgcttactcttacctatgcaatcctagcatgcctttccttcttctgcttcatgctattgagcactctttgtcatcccacagaattcagttcagccatttgagaaaagcctttcctgactctaacagacaagttatgcacctctttcctgtgcttacatagtagcctgtaccaacattacatttctcattgcattatgattgcaacatctgggcacatctctctaggacgctcagctctgtggaggcaaactctttctcattcagtttgtatgcccagtttaacacctaagcgttagcacacagcagatacttggtaaatgtttgttagctgagtaagggaaaaatagatcttctagccatgaagttttaatagtgttgatgtaaaccagaaggaacatttcaaataaattatgtaattttcaataaaaaaagatatacccttgatctgtaactcacaaaaataatgtattcttctgaaacagtatacaacgaatgtttaattaaccatttgattaaatggctgagtaccctgggccaataaagcaaagtttcattaactcctctaatattcttaacggaaaacctgaagagctgacatatagtagtaaatgaaatgtgggttggtatctcagaccatcacaaatcacctcttaatacaacttcttatcatcacttaacttgaaatactttcaaagatgaagacaaagggtaataaagaagtagcaggatggagttgtactcttggtataagagaaatatacagcaagtcattataatacattagttagtaacagtgacttttctaaggtttcagttgatggttattcatccactacttaattctttcctcttaacaacctaaatgaaaagtcactgcttttaaaataacattttgtcataactctataaaacttttttttttgagacggagtcttgttctgtcacccaggctggagtgcagtggtgtgatctcagctcactgcaacctccgcctcctgggttcaagcaactctcctgcctcagcctcctgagtagctgggactacaggtgcacgctgccatgcccagctaatattctgtattttagtagagatggggtttcacccgttgtccaggctggtcacaaactcctgagctcaggcaatccgcccacctcggcctcccaaagtgctggrattacaggcgtgagccaccatgcctgaccacattaaagcttttracatgctaatctgagtggttattgatgatggtaagatcaagttcggttgttttgtagtcattagatttaatggaaataaccattagcagagcaatgccttgtgttggattattcactatcccgttagtatcctttgttttcactttgataatacgattgccttttattgagtagaaaggaccagtatgctcaaggagttattgattcatagttgagatcaaaaaaaaaaaaaaaaaaaaaaaaaactcagacggggg

SEQ ID NO: 2582 - DNA, 975 bp, Homo sapiens
  misc_feature (813)..(813): n equals a,t,g, or c
  misc_feature (843)..(843): n equals a,t,g, or c
  misc_feature (917)..(917): n equals a,t,g, or c
ggcacgagcctatctccttacagcccgcagacacaaggtaggcaataaaaaatggtttcaactttttcagtatttttacaccaaaagatgctgtcttacaagacctctatcttttgtttgttcctgtttttccctcccttcctcaccaggggagagaaaaaaacggaaggaaagaaaggaggaaatgaatcttaatgagcatctgctgtgtgctaggcacttttaaaaatacctaaggtcatcagataatttacacagaacttgggtggtagtgtgtgaaagactatgcataactgagatgattccatggcagaaaattccaagccatggaaaaaccacatcgtatttatgatggtgcacaaaccgtgatgaagaagagcaagagggaggaaggaaggacagatcccctatcgaatggcaatacttgaggattggggggtaaaaccctaaatgaacttgtagattaattcaaagccagacttactgcttctatagagagactagcacattgtttatatatcagaaagtcctgaattaatttcatgcttaatgccaaaggggttgccataacctttgcctctaagcaaggctgtctctaaataatcatcatatttttaaagttactcagattgcaggatttcctttgacagcctatttctgcttatatcacttttactatagggtgttttgtctttatttctgattttctacccccttcaaccaaagtgtgtttctgcaagcctgttctttgtggaactaatggcttttttttttttttttttactgaattataaataccatgaggactttgtntctcccacagttctcatagtaagctttgcncagggtttatggcctgtaaatatttgttgaatgaacagtggaataaataaataaataatggtgatataccaatntaaaaaaaaaaaaaaaaaaaaaaaaaaaaaaaaaaaaaaaaaaaaaaaaaaaaaaaaa

SEQ ID NO: 2583 - DNA, 1276 bp, Homo sapiens
ggcacgagcttgtatctatctatatacacactttataaataaatgagtcaagatttttaaaacaaaataccaaatttttcagtatcatttgaaatttttcaaaattacttttttaaaatttctgcatattcattcagtgaagttgaatgatccagtgggcactctgtattccttcataaactgtgtggtgaatgtgcgtgtgtgtatgtatgtatatgcacgtgtttatgtgttttctggggttaatttccttaaaataaaaaggcaactgtcaagactaaagctataataatttttatgaatcttagaaaatgttgaatttttagtgattccagaaattgatctctatcgatgaaactgctttctcaaatacgtcagcaatgggattcaggctttgcttacaatgtgaaggaagttcttagtctcatttgcacaaagaaggaaggagggctaaagataaaaagaactcatagtcttttccatagttttgggtcatgttcactgtaaaaaaaaatcacaagatgccatttttacacagccttttaatctacacatacggcagctaatattccaaaaaaataatttcttcctttgtagccatttaaactaacagctagaatatttcttctcccaattattaaaaataagctgtttctgagtcggtgctgactacatttactgattgaagcagccaactccaaatataccatcttttagtattgacacttaaaataaaacttctccccagaaaaagagttctataaatgatggctgtagaaataggcactgtccaggcagttgttttgtggaagtagtgttgttattttctggtgttttccaagtcatctcagatggtgcgtgaaaatgagatgccaaagaaggcttaaaaaagataccctgcaccagcttcagaatgtaagcaaatctttcattccagcgcttaaaagttttgagaaagctaatctaaagttaaatgtttactagcatctctccgattatattttagaaactactgcacaaaaataaaacaaatttcttattttctctgggttgaaaagtgcacataaaatggaaaatgctttttataccactatttccagcagggattttattttcatttgtcatttgccagcctggggtatgttgggagaaggaacaattgatttttgaaaaggtgcatttgtgtgaaaaccaaaaattgtgttcaacaaatactactactaacccatatgtggatatatgtgttttatacatgagtaaaaaaaaaaaaaaaaaa

SEQ ID NO: 2584 - DNA, 1212 bp, Homo sapiens
  misc_feature (551)..(551): n equals a,t,g, or c
  misc_feature (730)..(730): n equals a,t,g, or c
gattatctgcttctaggttgctaaatatcaatataaagcatattattccagtaagtgccaatgcagttgttagatgctggcgctgaagttagtgctcactgcattctctcttgttggctgtctacttgagtcaccgattggcacagccagagctataaccagtctgtgaggattgatttgccctgacttgtatcttcatgtgtggtctataaggtctgccagattggcttatagtcacaaccagcatgtcctaagcaaaatgaaactatatgaacaaaaatcagctctcatttcactgctagactttggtgttttctttaagaagtagccttgttaatgcttagttttgccttggggrccttaatgtgtcattaactgcctggaaatacctttcatttaaaaaagtatactttagtacctaatgttcaatttagtatcgatctggatattttagcaaattttgacttttcaaagacaaagtttctgtcttgtaatgtttcttgggccggctatactgcctttcatctaaaactcactacagttcactgggnccgtttggtaacagggtaacckgggcataattaggtgcttgattgacaagagagttaccagtaccagaagtcaggttctattttaaccccatcatttccaattgattgtttttctctccaccattattcactgtctctcaagtgttagcactctgagttgttgaacggaggtttgtatntgcgcagagccctgtcgcaatgccccagcaagcttcttgttggcatgtggccactctaaattgtgctccaggatctgctatgggtccatgcttgcaggagaaacagctgtgtagaatttcctattgcatttcatttgtgggtttagaactcggttgcttatttcatattgtctcccttttcagtccttcaaggtacatttttccaacttctctaatgaattattacatttctgagtagctgatatgtttttatcttatctaagcagtatatttataattccttctttgcattggctaatctgattagtagttcagaacccaattttcagattgtctatagcaaactgtgaagaactgtgctgtcaagtagaaatagaatataagccacatatgtaatttaaacttttctaataccacattaaaaactataaaaggggaggaaatggaaaattagtaaaaaaaaaaaaaaaaaaaaactcgag

SEQ ID NO: 2585 - DNA, 575 bp, Homo sapiens
ggcacgagctcgtgccgctcgtgccgtgatattacattcacctttgattgttttttaaaagtttatttttacagaatatatttagtacctttcttaaggagtaactgaattgaatcaaccagtttgcatttaaataaaagaacaggctcagtggtcttcctgtagaatggtttacatgcctgcatgtgcagtagttgtgtctggaatcctagaattggcactttctgcctccttgctctaaatgtcacaaaaaattatacttccttaaagtaaatgtaatgatttcttcttttcctattgaccagtacagatagatatgttgtgtttgcttcatttttaatgatgacttcaagattgatgatgtgatccaataactgtggaggtagctttaacttggttctgtgtaaatagtatgtattttattataatatttctcattttaagatgcttggtttacattaaattatggtatttaactatttttatgtttatactaggtagggtctttcttatgtttctgtgtttttggtatgctaaataaagctatttttaaacccaaaaaaaaaaaaaaaaaa

SEQ ID NO: 2586 - DNA, 519 bp, Homo sapiens
ggcacgagggaacaattgcatcaccccagaaaattccctttacagacagatctgtccctccaaacttagcctctggcatcctctgatctggttcctgtgactctaggcttttctgatgtttgtttgttggccttttctagggtttcctgtaaatggaatctcatgtcttctgcgtctgggtactttgacttagcatagtacttttgaaattcctccatgtattgcctgtgtcccttcttattgccgagcagtaatccactgtattcctactgtggattatgttccaccgttgtttatccgtccaccagatgatgaccgttgggttgtttccagtttttggctgccatgagtcaagttgctataaacgtgagagtgcaagtctgtgtgtgaatacacattttcatttctcttgggtgcatgtaacagtggggttgttaggtccaatggtaactgtatgcttaataagaaactacctgattcgctgagagagagctttaaaggaaaaaaaaaaaaaaaaaa

SEQ ID NO: 2587 - DNA, 1104 bp, Homo sapiens
ggcacgagatttccttatatatgctagatagaggtgtcatcagatacatgatttgtaaaaattttcccttgttctatgaattctatgaattatcttttcattttcttggtgtctttggaagcataaaagtttccaattttgattttgtccagtttttctatttttcttttgttgctcttgcttttagtgtcatatctaagaaaccaatgcctaatccaaggtcataaagactatgtctatgttttcttctaagagtttggtaatttagttcttacattgagatctttgatccatttcaagttaattctgtgtatgatgtgaggtaggagtcccttagcttctgcatatgcacttttcccagcaccatttattgaaaatactcttctttccccatttaattaccttagcacccttatcaaaaatcggttagctatagatatatggtcatatttctggactcacaattttagtccattgatatatatgtctatccctatgcctatactacattgttttgttatggtagctttagagtaagtataactgctttatgttaaaatattaacctatataatcttctgccagtggtaggttttcccttattttctcatttttgagactaattttccaacttaatttggcttatagaaacctacaaaaagtattgttaaatatttttcattttcttaatactgcaaatcaaactcaaaggaaagttgggagggggtgtgctgtttaactcaggcaactagtgttctcagaatatacctgggctccaaatatgaatcagtaagggagatctatgcttggcgcggtggctcgcgcctgtaatcccggcactttgggaggctgaggcgggtggatctcgaggtcaggagatcgagaccatcatggccgacatggtgaaaccccgtctctactaaaaatacaaaaattagctgggcatggaggcgcgtgcctctggtcccagctattcgggaggctgaggcaggagaatcgctttttcccgggaggcggagattgcagtgagccgagatcgcaccgctgcacttcagcctggtggcagagcgagaccccgtctcaaagaaaaaaaaaaaaaaaaaa

SEQ ID NO: 2588 - DNA, 865 bp, Homo sapiens
ggcacgaggaaaggctggggaaactcaccatccattaagcagaatgttttttggtccccctgtttttagcatggtccttcatctccacctccagctgtgtctggtgtccgtctgcaagtccaaatccttggttcaaccattccaggcaacctggccaaaactaaccaaacacccatgatctcccgagaggagaaaaggcagctgcctggccacaggctggggaagggaatcaggtcatcctgctcctttgccagacttttgatcgctccacctggatttagccctgtggcacagttgtgccttcgaagatgtgtagtgccttcatgtgctgagcttttctggggggcctgtagctttattctgttttcttcttcttagcttctcattctgtacacatttagatctcatttttctcttgtctgctttatatcttctttaattttgctgatgtctgtcagctgcatcatttcttctcccaatctctttgtgtttataggtttacacctttcattatttcttgcctgttattttagtatgtttcaagagtgaacagagggctaggcatggtggctcacgcctgtaatcccagcactttgggaagacgatgtggatggatcatttgaggtcaggagtttgagaccagcctggccaacatggtgacaccccacctctactaaaaatgcaaaaattagcgaggcatggtgatgcgcacctgtagtccccagctactcaggaagctgaggcaggagaatcgcttgaacccgagaggtggaggttgcagtgagccgagattgcgccactgcactctaggctgggcgacacaacaagactctgcctcaaaaaaaacaaaaaaaaaaaaaaaaaa

SEQ ID NO: 2589 - DNA, 3244 bp, Homo sapiens
  misc_feature (343)..(343): n equals a,t,g, or c
ggcacgagcaaagggggaaaaaatggccattatgttgcaagcctgagtacatcttacctggatgccatgcccttcgtagcctggttttgtttttgtgtctttagcaccattcactttagtattttggcctcccggaaagaaaaccagccttctagacttgccagattgaaatgacacagtgatctgcccatcaactttttatcatttcccttcactttaattgggtcacaacacaaatgacttagaaaatgtgagcgcactagattataagaagccttagcagacagtgtctgaggattaaagttgcttttctgctawgtttcaggtggttaatggaatgaangggttgcctgtcctgtagctatatcgagaagtttactgactttcttcggctctttgtgagtgttcacctaagaagaatcgagtcttactcccagttccctgtggtggagtttttgacacttttgttcaagtacacatttcatcagcctactcatgaaggttacttctcttgtttggatatctggacgctgtttttggactatctgacaagtaaaattaaaagtcgtcttggagacaaggaagcagttctcaacaggtacgaagatgccctggtgctcctgctcacagaggtgttgaatcgaatccagttcagatacaaccaagcccagctggaggagttggatgatgagactctggatgacgatcagcagacggagtggcagcggtacttacggcagagcttggaggtggtggccaaagtgatggagctcctgcccacgcacgccttctccacactgttccctgttcttcaggacaatttagaagtttatttgggattacaacagtttatagtcacttcagggtcaggacacaggttgaacatcacggcggagaacgactgccggcggctgcactgctccctgagagacttgagctccctgctgcaggccgtgggccgcctggccgagtactttatcggggatgtgtttgctgcacggttcaatgatgccctcacagtcgtggaaaggttggtcaaagtcactctgtacggatctcagataaaattgtacaacattgaaactgctgtgccatcagtattgaaacctgacctcattgatgtgcatgctcagtccctggctgcgctgcaggcttactctcactggttagcacagtattgcagtgaagttcaccggcagaacacgcagcagttcgtgacactcatctctactaccatggatgcaatcacacctctaatcagcaccaaggtccaagacaagctgctgctatctgcgtgccacttactggtctcactggccaccaccgtgcggcccgtctttctgatcagcatccctgcagtgcagaaagtattcaacagaatcactgatgcctctgccctgcgacttgtcgataaggcccaggtgttggtgtgccgagccctctctaacatcttgctgcttccgtggccaaaccttccagagaatgagcagcagtggcccgtgcgctccatcaaccaygccagcctcatctctgcactctcccgggactatcgcaacctgaagcccagtgctgttgccccacagagaaagatgccactggatgacaccaaactgattatccaccagacactcagcgtcttagaagatattgtggagaatatctcgggggagtccaccaagtctcgacagatttgctaccagtcgctgcaggaatctgttcaggtctccctggccctctttccagcttttatccatcagtcagatgtgactgatgagatgctgagcttcttcctcactctgtttcgaggccttagagtacagatgggtgtgcctttcactgagcaaatcatacagactttcctcaacatgtttaccagagagcagttagccgagagcatcctccacgagggcagcacaggctgccgggtggtggagaagtttctgaagatcctgcaggtggtggtccaggagccaggccaggtgttcaagcccttcctccccagcatcatcgccctgtgcatggagcaagtgtatcccatcattgccgagcgtccctcccctgatgtgaaggccgagctgtttgagctccttttccggacgctccatcacaactggaggtacttcttcaagtccaccgtgctggccagtgtccagagggggatcgctgaggagcagatggagaatgagccccagttcagtgccatcatgcaggctttcggacagtcctttctccagcccgacatccacctttttaaacaaaatctcttctacttggagactctcaacaccaagcagaagctgtaccacaagaagatcttccggactgccatgctgttccagtttgtgaacgtgctgctccaggtcctggtccacaagtcccatgatcttctgcaggaggagattggcatcgccatctacaacatggcctcagtcgactttgatggcttctttgccgccttcctcccagagttcctgaccagctgtgatggtgtggatgccaaccagaaaagtgtgctggggcggaatttcaagatggatcgggacctgccctcattcacccagaatgtgcacaggctggtcaacgacctgcgctactacagactctgcaacgacagcctgccccctggcactgtgaagctctaggcctgctactgcctggggacacggacttctgctgctgccacctgcgccagccctaccttccaccacagatgtctcccagatgggccttggtcacactccttggcttctcccaccgcaagcaacgctgcctgcctctgccgctcctccacatcttgccgctgcccagcagagctggcttctgggtccacctgagcactggacggtgctcccagggcgttggagcaggcggaggggtgtgtggccaggtactaggaggcaccaggaaatcccgcggggtggcccatgcagaccaggcgcacgtggctcatggggcagaattgccaaggacagctcacgacagtgccaccttctcaccattccagccaaggagagatgtgacgttggaactgctctggcacttctgtcaagcctcccccgccccaattgccttgagatctctgctctttgtcagagatttgcaaagactcacgtttttgttgttttctcatcattccattgtgatactaagaaactaagaagcttaatgaaaagaaataaaatgcctatgttgttgttctagaaaaaaaaaaaaagtcgagcggccaagaatttagtagtagtag

SEQ ID NO: 2590 - DNA, 3229 bp, Homo sapiens
ggcacgagcaaagggggaaaaaatggccattatgttgcaagcctgagtacatcttacctggatgccatgcccttcgtagcctggttttgtttttgtgtctttagcaccatwcactttagtattttggcctcccggaaagaaaaccagccttctagacttgccagattgaaatgacacagtgatctgcccatcaactttttatcatttcccttcactttaattgggtcacaacacaaatgacttagaaaatgtgagcgcactagattataagaagccttagcagacagtgtctgaggattaaagttgcttttctgctatgtttcaggtggttaatggaatgaagggttgcctgtcctgtagctatatcgagaagtttactgactttcttcggctctttgtgagtgttcacctaagaagaatcgagtcttactcccagttccctgtggtggagtttttgacamttttgttcaagtacacatttcatcagcctactcatgaaggttacttcyctkgtttggawatctggacgctgtttttggactatctgacaagtaaaattaaaagtcgtcttggagacaaggaagcagttctcaacaggtacgaagatgccctggtgctcctgctcacagaggtgttgaatcgaatccagttcagatacaaccaagcccagctggaggagttggatgatgagactctggatgacgatcagcagacggagtggcagcggtacttacggcagagcttggaggtggtggccaaagtgatggagctcctgcccacgcacgccttctccacactgttccctgttcttcaggacaatttagaagtttatttgggattacaacagtttatagtcacttcagggtcaggacacaggttgaacatcacggcggagaacgactgccggcggctgcactgctccctgagagacttgagctccctgctgcaggccgtgggccgcctggccgagtactttatcggggatgtgtttgctgcacggttcaatgatgccctcacagtcgtggaaaggttggtcaaagtcactctgtacggatctcagataaaattgtacaacattgaaactgctgtgccatcagtattgaaacctgacctcattgatgtgcatgctcagtccctggctgcgctgcaggcttactctcactggttagcacagtattgcagtgaagttcaccggcagaacacgcagcagttcgtgacactcatctctactaccatggatgcaatcacacctctaatcagcaccaaggtccaagacaagctgctgctatctgcgtgccacttactggtctcactggccaccaccgtgcggcccgtctttctgatcagcatccctgcagtgcagaaagtattcaacagaatcactgatgcctctgccctgcgacttgtcgataaggcccaggtgttggtgtgccgagccctctctaacatcttgctgcttccgtggccaaaccttccagagaatgagcagcagtggcccgtgcgctccatcaaccacgccagcctcatctctgcactctcccgggactatcgcaacctgaagcccagtgctgttgccccacagagaaagatgccactggatgacaccaaactgattatccaccagacactcagcgtcttagaagatattgtggagaatatctcgggggagtccaccaagtctcgacagatttgctaccagtcgctgcaggaatctgttcaggtctccctggccctctttccagcttttatccatcagtcagatgtgactgatgagatgctgagcttcttcctcactctgtttcgaggccttagagtacagatgggtgtgcctttcactgagcaaatcatacagactttcctcaacatgtttaccagagagcagttagccgagagcatcctccacgagggcagcacaggctgccgggtggtggagaagtttctgaagatcctgcaggtggtggtccaggagccaggccaggtgttcaagcccttcctccccagcatcatcgccctgtgcatggagcaagtgtatcccatcattgccgagcgtccctcccctgatgtgaaggccgagctgtttgagctccttttccggacgctccatcacaactggaggtacttcttcaagtccaccgtgctggccagtgtccagagggggatcgctgaggagcagatggagaatgagccccagttcagtgccatcatgcaggctttcggacagtcctttctccagcccgacatccacctttttaaacaaaatctcttctacttggagactctcaacaccaagcagaagctgtaccacaagaagatcttccggactgccatgctgttccagtttgtgaacgtgctgctccaggtcctggtccacaagtcccatgatcttctgcaggaggagattggcatcgccatctacaacatggcctcagtcgactttgatggcttctttgccgccttcctcccagagttcctgaccagctgtgatggtgtggatgccaaccagaaaagtgtgctggggcggaatttcaagatggatcgggacctgccctcattcacccagaatgtgcacaggctggtcaacgacctgcgctactacagactctgcaacgacagcctgccccctggcactgtgaagctctaggcctgctactgcctggggacacggacttctgctgctgccacctgcgccagcctaccttccaccacagatgtctcccagatgggccttggtcacactccttggcttctcccaccgcaagcaacgctgcctgcctctgccgctcctccacatcttgccgctgcccagcagagctggcttctgggtccacctgagcactggacggtgctcccagggcgttggagcaggcggaggggtgtgtggccaggtactaggaggcaccaggaaatcccgcggggtggcccatgcagaccaggcgcacgtggctcatggggcagaattgccaaggacagctcacgacagtgccaccttctcaccattccagccaaggagagatgtgacgttggaactgctctggcacttctgtcaagcctcccccgccccaattgccttgagatctctgctctttgtcagagatttgcaaagactcacgtttttgttgttttctcatcattccattgtgatactaagaaactaagaagcttaatgaaaagaaataaaatgcctatgttgttgttctagaaaaaaaaaaaaaaaaaaaaaaaactcgag

SEQ ID NO: 2591 - DNA, 1545 bp, Homo sapiens
  misc_feature (835)..(835): n equals a,t,g, or c
ctactactactaaattcttggccgctcgactttttttttttttctagaacaacaacataggcattttatttcttttcattaagcttcttagtttcttagtatcacaatggaatgatgagaaaacaacaaaaacgtgagtctttgcaaatctctgacaaagagcagagatctcaaggcaattggggcgggggaggcttgacagaagtgccagagcagttccaacgtcacatctctccttggctggaatggtgagaaggtggcactgtcgtgagctgtccttggcaattctgccccatgagccacgtgcgcctggtctgcatgggccaccccgcgggatttcctggtgcctcctagtacctggccacacacccctccgcctgctccaacgccctgggagcaccgtccagtgctcaggtggacccagaagccagctctgctgggcagcggcaagatgtggaggagcggcagaggcaggcagcgttgcttgcggtgggagaagccaaggagtgtgaccaaggcccatctgggagacatctgtggtggaaggtagggctggcgcaggtggcagcagcagaagtccgtgtccccaggcagtagcaggcctagagcttcacagtgccagggggcaggctgtcgttgcagagtctgtagtagcgcaggtcgttgaccagcctgtgcacattctgggtgaatgagggcaggtcccgatccatcttgaaattccgccccagcacacttttctggttggcatccacaccatcacagctggtcaggaactctgggaggaaggcggcaaagaagccatcaaagtcgactgaggccatgttgtagatgncgatgccaatctcctcctgcagaagatcatgggacttgtggaccaggacctggagcagcacgttcacaaactggaacagcatggcagtccggaagatcttcttgtggtacagcttctgcttggtgttgagagtctccaagtagaagagattttgtttaaaaaggtggatgtcgggctggagaaaggactgtccgaaagcctgcatgatggcactgaactggggctcattctccatctgctcctcagcgatccccctctggacactggccagcacggtggacttgaagaagtacctccagttgtgatggagcgtccggaaaaggagctcaaacagctcggccttcacatcaggggagggacgctcggcaatgatgggatacacttgctccatgcacagggcgatgatgctggggaggaagggcttgaacacctggcctggctcctggaccaccacctgcaggatcttcagaaacttctccaccacccggcagcctgtgctgccctcgtggaggatgctctcggctaactgctctctggtaaacatgttgaggaaagtctgtatgatttgctcagtgaaaggcacacccatctgtactctaaggcctcgaaacagagtgaggaagaagctcagcatctcatcagtcacatctgactgatggataaaagctggaaagagggccagggagacctgaacagattcctgcagcgac

SEQ ID NO: 2592 - DNA, 3304 bp, Homo sapiens
ggagctccaccgcggtggcggccgctctagaactagtggatcccccgggctgcaggaattcggcacgagcaaagggggaaaaaatggccattatgttgcaagcctgagtacatcttacctggatgccatgcccttcgtagcctggttttgtttttgtgtctttagcaccattcactttagtattttggcctcccggaaagaaaaccagccttctagacttgccagattgaaatgacacagtgatctgcccatcaactttttatcatttcccttcactttaattgggtcacaacacaaatgacttagaaaatgtgagcgcactagattataagaagccttagcagacagtgtctgaggattaaagttgcttttctgctawgtttcaggtggttaatggaatgaagggttgcctgtcctgtagctatatcgagaagtttactgactttcttcggctctttgtgagtgttcacctaagaagaatcgagtcttactcccagttccctgtggtggagtttttgacacttttgttcaagtacacatttcatcagcctactcatgaaggttacttctcttgtttggatatctggacgctgtttttggactatctgacaagtaaaattaaaagtcgtcttggagacaaggaagcagttctcaacaggtacgaagatgccctggtgctcctgctcacagaggtgttgaatcgaatccagttcagatacaaccaagcccagctggaggagttggatgatgagactctggatgacgatcagcagacggagtggcagcggtacttacggcagagcttggaggtggtggccaaagtgatggagctcctgcccacgcacgccttctccacactgttccctgttcttcaggacaatttagaagtttatttgggattacaacagtttatagtcacttcagggtcaggacacaggttgaacatcacggcggagaacgactgccggcggctgcactgctccctgagagacttgagctccctgctgcaggccgtgggccgcctggccgagtactttatcggggatgtgtttgctgcacggttcaatgatgccctcacagtcgtggaaaggttggtcaaagtcactctgtacggatctcagataaaattgtacaacattgaaactgctgtgccatcagtattgaaacctgacctcattgatgtgcatgctcagtccctggctgcgctgcaggcttactctcactggttagcacagtattgcagtgaagttcaccggcagaacacgcagcagttcgtgacactcatctctactaccatggatgcaatcacacctctaatcagcaccaaggtccaagacaagctgctgctatctgcgtgccacttactggtctcactggccaccaccgtgcggcccgtctttctgatcagcatccctgcagtgcagaaagtattcaacagaatcactgatgcctctgccctgcgacttgtcgataaggcccaggtgttggtgtgccgagccctctctaacatcttgctgcttccgtggccaaaccttccagagaatgagcagcagtggcccgtgcgctccatcaaccacgccagcctcatctctgcactctcccgggactatcgcaacctgaagcccagtgctgttgccccacagagaaagatgccactggatgacaccaaactgattatccaccagacactcagcgtcttagaagatattgtggagaatatctcgggggagtccaccaagtctcgacagatttgctaccagtcgctgcaggaatctgttcaggtctccctggccctctttccagcttttatccatcagtcagatgtgactgatgagatgctgagcttcttcctcactctgtttcgaggccttagagtacagatgggtgtgcctttcactgagcaaatcatacagactttcctcaacatgtttaccagagagcagttagccgagagcatcctccacgagggcagcacaggctgccgggtggtggagaagtttctgaagatcctgcaggtggtggtccaggagccaggccaggtgttcaagcccttcctccccagcatcatcgccctgtgcatggagcaagtgtatcccatcattgccgagcgtccctcccctgatgtgaaggccgagctgtttgagctccttttccggacgctccatcacaactggaggtacttcttcaagtccaccgtgctggccagtgtccagagggggatcgctgaggagcagatggagaatgagccccagttcagtgccatcatgcaggctttcggacagtcctttctccagcccgacatccacctttttaaacaaaatctcttctacttggagactctcaacaccaagcagaagctgtaccacaagaagatcttccggactgccatgctgttccagtttgtgaacgtgctgctccaggtcctggtccacaagtcccatgatcttctgcaggaggagattggcatcgccatctacaacatggcctcagtcgactttgatggcttctttgccgccttcctcccagagttcctgaccagctgtgatggtgtggatgccaaccagaaaagtgtgctggggcggaatttcaagatggatcgggacctgccctcattcacccagaatgtgcacaggctggtcaacgacctgcgctactacagactctgcaacgacagcctgccccctggcactgtgaagctctaggcctgctactgcctggggacacggacttctgctgctgccacctgcgccagccctaccttccaccacagatgtctcccagatgggccttggtcacactccttggcttctcccaccgcaagcaacgctgcctgcctctgccgctcctccacatcttgccgctgcccagcagagctggcttctgggtccacctgagcactggacggtgctcccagggcgttggagcaggcggaggggtgtgtggccaggtactaggaggcaccaggaaatcccgcggggtggcccatgcagaccaggcgcacgtggctcatggggcagaattgccaaggacagctcacgacagtgccaccttctcaccattccagccaaggagagatgtgacgttggaactgctctggcacttctgtcaagcctcccccgccccaattgccttgagatctctgctctttgtcagagatttgcaaagactcacgtttttgttgttttctcatcattccattgtgatactaagaaactaagaagcttaatgaaaagaaataaaatgcctatgttgttgttctagaaaaaaaaaaaaagtcgagcggccaagaatttagtagtagtag

SEQ ID NO: 2593 - DNA, 3303 bp, Homo sapiens
ggagctccaccgcggtggcggccgctctagaactagtggatcccccgggctgcaggaattcggcacgagcaaagggggaaaaaatggccattatgttgcaagcctgagtacatcttacctggatgccatgcccttcgtagcctggttttgtttttgtgtctttagcaccattcactttagtattttggcctcccggaaagaaaaccagccttctagacttgccagattgaaatgacacagtgatctgcccatcaactttttatcatttcccttcactttaattgggtcacaacacaaatgacttagaaaatgtgagcgcactagattataagaagccttagcagacagtgtctgaggattaaagttgcttttctgctawgtttcaggtggttaatggaatgaagggttgcctgtcctgtagctatatcgagaagtttactgactttcttcggctctttgtgagtgttcacctaagaagaatcgagtcttactcccagttccctgtggtggagtttttgacacttttgttcaagtacacatttcatcagcctactcatgaaggttacttctcttgtttggatatctggacgctgtttttggactatctgacaagtaaaattaaaagtcgtcttggagacaaggaagcagttctcaacaggtacgaagatgccctggtgctcctgctcacagaggtgttgaatcgaatccagttcagatacaaccaagcccagctggaggagttggatgatgagactctggatgacgatcagcagacggagtggcagcggtacttacggcagagcttggaggtggtggccaaagtgatggagctcctgcccacgcacgccttctccacactgttccctgttcttcaggacaatttagaagtttatttgggattacaacagtttatagtcacttcagggtcaggacacaggttgaacatcacggcggagaacgactgccggcggctgcactgctccctgagagacttgagctccctgctgcaggccgtgggccgcctggccgagtactttatcggggatgtgtttgctgcacggttcaatgatgccctcacagtcgtggaaaggttggtcaaagtcactctgtacggatctcagataaaattgtacaacattgaaactgctgtgccatcagtattgaaacctgacctcattgatgtgcatgctcagtccctggctgcgctgcaggcttactctcactggttagcacagtattgcagtgaagttcaccggcagaacacgcagcagttcgtgacactcatctctactaccatggatgcaatcacacctctaatcagcaccaaggtccaagacaagctgctgctatctgcgtgccacttactggtctcactggccaccaccgtgcggcccgtctttctgatcagcatccctgcagtgcagaaagtattcaacagaatcactgatgcctctgccctgcgacttgtcgataaggcccaggtgttggtgtgccgagccctctctaacatcttgctgcttccgtggccaaaccttccagagaatgagcagcagtggcccgtgcgctccatcaaccaygccagcctcatctctgcactctcccgggactatcgcaacctgaagcccagtgctgttgccccacagagaaagatgccactggatgacaccaaactgattatccaccagacactcagcgtcttagaagatattgtggagaatatctcgggggagtccaccaagtctcgacagatttgctaccagtcgctgcaggaatctgttcaggtctccctggccctctttccagcttttatccatcagtcagatgtgactgatgagatgctgagcttcttcctcactctgtttcgaggccttagagtacagatgggtgtgcctttcactgagcaaatcatacagactttcctcaacatgtttaccagagagcagttagccgagagcatcctccacgagggcagcacaggctgccgggtggtggagaagtttctgaagatcctgcaggtggtggtccaggagccaggccaggtgttcaagcccttcctccccagcatcatcgccctgtgcatggagcaagtgtatcccatcattgccgagcgtccctcccctgatgtgaaggccgagctgtttgagctccttttccggacgctccatcacaactggaggtacttcttcaagtccaccgtgctggccagtgtccagagggggatcgctgaggagcagatggagaatgagccccagttcagtgccatcatgcaggctttcggacagtcctttctccagcccgacatccacctttttaaacaaaatctcttctacttggagactctcaacaccaagcagaagctgtaccacaagaagatcttccggactgccatgctgttccagtttgtgaacgtgctgctccaggtcctggtccacaagtcccatgatcttctgcaggaggagattggcatcgccatctacaacatggcctcagtcgactttgatggcttctttgccgccttcctcccagagttcctgaccagctgtgatggtgtggatgccaaccagaaaagtgtgctggggcggaatttcaagatggatcgggacctgccctcattcacccagaatgtgcacaggctggtcaacgacctgcgctactacagactctgcaacgacagcctgccccctggcactgtgaagctctaggcctgctactgcctggggacacggacttctgctgctgccacctgcgccagcctaccttccaccacagatgtctcccagatgggccttggtcacactccttggcttctcccaccgcaagcaacgctgcctgcctctgccgctcctccacatcttgccgctgcccagcagagctggcttctgggtccacctgagcactggacggtgctcccagggcgttggagcaggcggaggggtgtgtggccaggtactaggaggcaccaggaaatcccgcggggtggcccatgcagaccaggcgcacgtggctcatggggcagaattgccaaggacagctcacgacagtgccaccttctcaccattccagccaaggagagatgtgacgttggaactgctctggcacttctgtcaagcctcccccgccccaattgccttgagatctctgctctttgtcagagatttgcaaagactcacgtttttgttgttttctcatcattccattgtgatactaagaaactaagaagcttaatgaaaagaaataaaatgcctatgttgttgttctagaaaaaaaaaaaaagtcgagcggccaagaatttagtagtagtag

SEQ ID NO: 2594 - DNA, 3304 bp, Homo sapiens
ggagctccaccgcggtggcggccgctctagaactagtggatcccccgggctgcaggaattcggcacgagcaaagggggaaaaaatggccattatgttgcaagcctgagtacatcttacctggatgccatgcccttcgtagcctggttttgtttttgtgtctttagcaccattcactttagtattttggcctcccggaaagaaaaccagccttctagacttgccagattgaaatgacacagtgatctgcccatcaactttttatcatttcccttcactttaattgggtcacaacacaaatgacttagaaaatgtgagcgcactagattataagaagccttagcagacagtgtctgaggattaaagttgcttttctgctawgtttcaggtggttaatggaatgaagggttgcctgtcctgtagctatatcgagaagtttactgactttcttcggctctttgtgagtgttcacctaagaagaatcgagtcttactcccagttccctgtggtggagtttttgacacttttgttcaagtacacatttcatcagcctactcatgaaggttacttctcttgtttggatatctggacgctgtttttggactatctgacaagtaaaattaaaagtcgtcttggagacaaggaagcagttctcaacaggtacgaagatgccctggtgctcctgctcacagaggtgttgaatcgaatccagttcagatacaaccaagcccagctggaggagttggatgatgagactctggatgacgatcagcagacggagtggcagcggtacttacggcagagcttggaggtggtggccaaagtgatggagctcctgcccacgcacgccttctccacactgttccctgttcttcaggacaatttagaagtttatttgggattacaacagtttatagtcacttcagggtcaggacacaggttgaacatcacggcggagaacgactgccggcggctgcactgctccctgagagacttgagctccctgctgcaggccgtgggccgcctggccgagtactttatcggggatgtgtttgctgcacggttcaatgatgccctcacagtcgtggaaaggttggtcaaagtcactctgtacggatctcagataaaattgtacaacattgaaactgctgtgccatcagtattgaaacctgacctcattgatgtgcatgctcagtccctggctgcgctgcaggcttactctcactggttagcacagtattgcagtgaagttcaccggcagaacacgcagcagttcgtgacactcatctctactaccatggatgcaatcacacctctaatcagcaccaaggtccaagacaagctgctgctatctgcgtgccacttactggtctcactggccaccaccgtgcggcccgtctttctgatcagcatccctgcagtgcagaaagtattcaacagaatcactgatgcctctgccctgcgacttgtcgataaggcccaggtgttggtgtgccgagccctctctaacatcttgctgcttccgtggccaaaccttccagagaatgagcagcagtggcccgtgcgctccatcaaccaygccagcctcatctctgcactctcccgggactatcgcaacctgaagcccagtgctgttgccccacagagaaagatgccactggatgacaccaaactgattatccaccagacactcagcgtcttagaagatattgtggagaatatctcgggggagtccaccaagtctcgacagatttgctaccagtcgctgcaggaatctgttcaggtctccctggccctctttccagcttttatccatcagtcagatgtgactgatgagatgctgagcttcttcctcactctgtttcgaggccttagagtacagatgggtgtgcctttcactgagcaaatcatacagactttcctcaacatgtttaccagagagcagttagccgagagcatcctccacgagggcagcacaggctgccgggtggtggagaagtttctgaagatcctgcaggtggtggtccaggagccaggccaggtgttcaagcccttcctccccagcatcatcgccctgtgcatggagcaagtgtatcccatcattgccgagcgtccctcccctgatgtgaaggccgagctgtttgagctccttttccggacgctccatcacaactggaggtacttcttcaagtccaccgtgctggccagtgtccagagggggatcgctgaggagcagatggagaatgagccccagttcagtgccatcatgcaggctttcggacagtcctttctccagcccgacatccacctttttaaacaaaatctcttctacttggagactctcaacaccaagcagaagctgtaccacaagaagatcttccggactgccatgctgttccagtttgtgaacgtgctgctccaggtcctggtccacaagtcccatgatcttctgcaggaggagattggcatcgccatctacaacatggcctcagtcgactttgatggcttctttgccgccttcctcccagagttcctgaccagctgtgatggtgtggatgccaaccagaaaagtgtgctggggcggaatttcaagatggatcgggacctgccctcattcacccagaatgtgcacaggctggtcaacgacctgcgctactacagactctgcaacgacagcctgccccctggcactgtgaagctctaggcctgctactgcctggggacacggacttctgctgctgccacctgcgccagccctaccttccaccacagatgtctcccagatgggccttggtcacactccttggcttctcccaccgcaagcaacgctgcctgcctctgccgctcctccacatcttgccgctgcccagcagagctggcttctgggtccacctgagcactggacggtgctcccagggcgttggagcaggcggaggggtgtgtggccaggtactaggaggcaccaggaaatcccgcggggtggcccatgcagaccaggcgcacgtggctcatggggcagaattgccaaggacagctcacgacagtgccaccttctcaccattccagccaaggagagatgtgacgttggaactgctctggcacttctgtcaagcctcccccgccccaattgccttgagatctctgctctttgtcagagatttgcaaagactcacgtttttgttgttttctcatcattccattgtgatactaagaaactaagaagcttaatgaaaagaaataaaatgcctatgttgttgttctagaaaaaaaaaaaaagtcgagcggccaagaatttagtagtagtag

SEQ ID NO: 2595 - DNA, 815 bp, Homo sapiens
ggcacgagaacagccctctggggcaagagcatacctgtgatcataacaggaaggaaaaagctgggaagaaaagaaagaaggcagccaatgaagagatattcagaatgattgttgtcctcgccactccatggaaattgctcttttcaaagcatcagtgacttctgtcttgccaaatccaaatgtcgtatcttttacgacttttagcaacattcaaaccaggtgattactatgcctttattgcaactttttttattctattatttccttccttcctaccttccttcccttcctcctgagacacacaccttcctgttttttcccctaaccataccaggcattttttccagaaccactttcctggaggttcttctgctcctgattctaaaatttgcagtgccttggctcttctccttctaaacacactctttagcaggtcctgtctatttgtttccaaggctgtaaattcctcctgtccattcatgacttccaagtttataaccccagccctgacttctctgtgctcaagcctatgcgtgcacacacgcgcacgcacgtgtgtgtgtgtgtgtgtgtgtgtatgttactgcatagttgagctttctagtgcaatgtcaaacaggcagctcaaactttatatgtgtaaactagaatcattgttttttgaatcaagactgcttcctctccaactgttcctaccccaaccatcattccccctaaataaaaaaaaaaaaaaaaaaaaaaaaaaaaaaaaaaaaaaaaaaaaaaaaaaaaaaaaaaaaaaaaaaaaaaaaaaaaaaaaaaaaaaaaaaaaaaaa

SEQ ID NO: 2596 - DNA, 1433 bp, Homo sapiens
ggcacgaggcaaaatcttacatgtttaacaacatataattttttgtatctgaatttagaataaatcattttaatgcatcttaaatcacgtcacctaatcataatagttgtggtaactaatcattagtgcagagcatgcagataaaaaatatttgaatttttttttcttggaagtacatgtagttatgagtaggttaagagaatatctaattttcctactctttttttcatctttagcatttaatgttgaaacaccattcacgtcacattaaggacccactgaaaatgtattgttttaatgcataattgacttacctaattaaacatacacacaaatttaattattttttttctcttaacctgatcacgacacagctcttaatcattgtcactttcagtatatcatagtagttagtagtagattgccttgatggcagtaattctgtagtaatttctattcaatcaaacctaagagagctttgatcttactgtaaaggtacaaacaaatctcttatataattcctagcttttttttttgtttatgattctgatcaactataagacacaatgtaaagaattgtggcttataatttatctgaaatttattagcttagtttagtttgggcaggagttacaaacttaataggaattgtcattttacttacagtttatttcctgattagttgttaatttttttcccctcagttatctttattcagtcttattggtcaaaacaaagaaacaaatagtccatcaactaaaataagctgtaatgaatttagaagatgaatgcatatattagatttccatttaaatcacttctgttataaatcatataaagaactttaaacttgttttatctaatactgagcactgtttttttgtcaagtattttttaagaccacataattctttttgtctgctcaaggaaaggatagataaataattggcacacatttgtttctcactgaattttacagtagtaaattaatgttataatgtaccacatggagatgagttggtaagaaatcatctagttctagagcccagagattataaacagtaggtgaaatagatttatgacttacgaaatatgttgtgacaatatatttaaatgcatttttatattacttgcatattctcacattgatttgtgcaatagttcagttttaaaaaaaatcttcctatgcatcatgtattttatttttatttattttcacaagtatttgacagtatggtagaataaaagatgattgtaagattaaaaatgtaaaaattgcttatgtattattctgaattgtgttaggttgaaaaagatgattgtggtgactattatttcttgtccactatttgttttttgttttttcaccaataatgtcttcatatttgaacctattcaataaagacatgaagcataaaaaaaaaaaaaaaaaa

SEQ ID NO: 2597 - DNA, 1862 bp, Homo sapiens
ggcacgagctcgtgccgcttgatgaaacctgatcccaatttgatatggattataattatgatggttctcacccagttgggtgcattttacatagtaaaagacttggactggaaatgggtcatatttggggcctatgcgtttggcagttgcattaaccactcaatgactctggctattcatgagattgcccacaatgctgcctttggcaactgcaaagcaatgtggaatcgctggtttggaatgtttgctaatcttcctattgggattccatattcaatttcctttaagaggtatcacatggatcatcatcggtaccttggagctgatggcgtcgatgtagatattcctaccgattttgagggctggttctctgtaccgctttcagaaagtttatatgggttattcttcagcctctcttttatgcctttcgacctctgttcatcaaccccaaaccaattacgtatctggaagttatcaataccgtggcacaggtcacttttgacattttaatttattactttttgggaattaaatccttagtctacatgttggcagcatctttacttggcctgggtttgcacccaatttctggacattttatagctgagcattacatgttcttaaagggtcatgaaacttactcatattatgggcctctgaatttacttaccttcaatgtgggttatcataatgaacatcatgatttccccaacattcctggaaaaagtcttccactggtgaggaaaatagcagctgaatactatgacaacctccctcactacaattcctggataaaagtactgtatgattttgtgatggatgatacaataagtccctactcaagaatgaagaggcaccaaaaaggagagatggtgctggagtaaatatcattagtgccaaagggattcttctccaaaactttagatgataaaatggaatttttgcattattaaacttgagaccagtgatgctcagaagctcccctggcacaatttcagagtaagagctcggtgataccaagaagtgaatctggcttttaaacagtcagcctgactctgtactgctcagtttcactcacaggaaacttgtgacttgtgtattatcgtcattgaggatgtttcactcatgtctgtcattttataagcatatcatttaaaaagcttctaaaaagctatttcgccaggcacggtggctcatgcctataatcccagcactttgggaggccaaggtgggtggatcacctgaggtcaggagttcgagaccagcctggccaacacggtgaaaccccatctctactaaaaatgcaaaaattagccgggcgtggcggcacatgcctgtaatcccagctacatgggaggctgaggtgggagaattgcttgaacccaggaggcggaggcagaggctgcagtgacccaagattgtgccactgcactccaccctgggcaacagagcaagaccccatctcaaaaataaataaatatatataaaaaataaaaagctatttctagtttatttcactataaagttttgctttattaaaaagctaataaacagctattaatcacagtgtattagtatttgttacatttttgtatttcactatctttatactatataatatggttacttgggtaccgggggaactttaaaatttcatctcaaaaataatttttaaaaagcctgaggtatgatatagcataaaagattgagatgaaaatatatttccctgtaagctgaattactcatttaaaaattttaacttctatatgggacccgaattagacactgctgaatcctgtacagccttactcataaataaagtacttactgaatttccaccattcaaaaaaaaaaaaaaaaaa

SEQ ID NO: 2598 - DNA, 1201 bp, Homo sapiens
ggcacgaggttttgccatgctgcccaggctggtctcaactcctcagctcaagcaatctgcctgcgtgagcctcccaaagtggtggaattacaggcgtgggccactgcgcctggcccagacagacattttctgaaacacaactggcaatgagctgtttttacattttgaaagtgattcttcacttcctagttcttaattatagtatacctattaagatctgtaagatcctgaagacataagatcatgaagccatataagaatgaggattgaaagttgagcaaaattttcgggattttgggaaacattcttagctgtgctatctgcctaaaattattccttattacttctctcctttgacagacttcaagttttcttcatagccctttcaaagttttttgagccatccagagtaaaatcatttctaaatgatagttctgtatatctccaactcgtcttaagtgtatttgcctgtgtgcaacgtattgctagactatgaactcctcagcatggctgctggataacttaattgtcctgagttaatagccttcaaaggacaaatcggtttctttgcagatagcttcgtaaaacttcacatggagtttattttatcatatttcccttttttatttctgctcctcctttaattgcccatcttgcttcagagactgacatttcagggtggatattaattaaagcattaattttgttttttggtatatttctatccctagtatttctatcttactgctaaaatacaggaaaagtgccgtatttttaatgcatttagtggttttctttggtgttatctgttccatttttctttttcatacattgaagtgtgtctccttttcaaccaaaataatgaaatagtggagaccatgaaattgttgtgcctggctaattggcaaattaatttaccaatataataagtgtagcgccttgtttgaataccctttttgagaaggtatgatgagaatgggcaagggtgtcagcatctcttcttcttaataattaattgttttcagttttggttcacgaagaatgcttagttaatctgtaatgttgcctagagctgtatttatctgtttttatttatactagtgtagtaaagctgcatatcattacagtaaaaacgactactgtgatgagttaatcagaaaatctattaaaatctatatgacaaaaaaaaaaaaaaaaaaaa

SEQ ID NO: 2599 - DNA, 1969 bp, Homo sapiens
gtaattaacatgttctgaaggttacaattgatatttgaaattgactgtagagcatttagttgaagagttaagcattcagttccattaggttttcacatgtgttaatctcatttacagcattgaattgcggcagtaacattttcctttctgtgaagttctaaatttagttatgacctatttagcaatgcctttgaaaagggatattgtatccatggtaaattaattgtatacctaaacagagatagctcatctttgcctatcaggcttgtaattgacatctagtagacttctgcacatgtaaaattgaattcaaataaaatcatacacactttctagttcttaatatttgtctttctgaataatagtttaaagcaatatttgttaaagttttcttgcactatcacaattgctttttagttatttctcaagaagcatgttcggcacgaggagacaaaatctgtgtaacaggagggagaatagcgccaagtctctgggctattttttatttttgcaaatgtgctttctaatagccattgccttccatgttgtttacctaatcagcatatttttgtctgaatacttgaacattttaacagtaacgcaggtgtagaatcagaaaggaaacttatgcagagtaatattttggttcagttttaacatcgtgacaatgagggctttttctagcaatgatttttaaattgtgtaagtttgacagtattttattgttgggtttttatttgattttagttgtgtgcttttcatttgcagaagttagtaactgcagctcacctactgcaccaaagttctcgattttaggagcccagctttagtcatttgaacatgcttctaaataaaataaaacaaaaccaaaactatacttttgatctataataagagctcaataactttgtcaaggaaagctctaatatatgcagtgatggtttatgaaagggtgtggcaattttaaatttatattgtgtgtgatgttcaaataaagtggtatctacattcatgtgatttatgggtcagcatgaccattaattactgagtagaaattgactaaactttgatttcctttttttaaatcgtgttgcatttgattcctgagcaaattccctcaaagtgaactcttgttcttaaattttgaattttatggtgagattgtaaagatagaggcaattgaaacattgttccttatttatgaactgcttgaagtgaatacttaatttaagtttgcactttaataccaaacttaaaaccaaacactcatttaaaagtaggttaagtgatcatggatcattgttattagctttgtggctttgtgaaattctaaaggaatcaaataattcatcatgatttaaattttctagagattttgatttttttataatgtttctttcctgtagattgtgttcttgtttctctctctctctctctctctctctctctctctctctctctctctcaaaattacagtgttcattgtcattgacctcagcagcaaatttgacttgaattcacttaggatcgcaggaatcaggggaaagtgattttaaaggtggtttctccagcacattttaagaaaagggaccaaaagttattttagcttcctcaatagattgcatgttgcttattaggataataaattaatattaaatgcaatatatgtcttgtctttattatggcatctatttaggagttgttcaaatcactgcagtagggctctgcaaataaaataatgtaacctattatcatggatctaatgtactgtaactttatcagtgaaaggtaaaatctcaaataacaagtacaaacattgaacaattacctataaagatttgtaaaagtaaaatttttccaatagatttcattcttgtcattttgtaagacgaccctgcagtccacctgtttgtaacttttttaataaaatagacatctgtattactgaaaaaaaaaaaaaaaaaaaaaa

SEQ ID NO: 2600 - DNA, 1166 bp, Homo sapiens
ggttttcaactcaatgtctccgagataagagcaggacccggacagtaggaatccacaggctgtgtccctaccatgtaaccagcgaccctgtctccacaagtctgccttttactatgccttgtatgcactgcctcctctctagttgcattctctctgcctgcttcagcccttgcatatctattccctgggctcctccagtggttcctgtgtagtctgtgcctccaacccagtggtttctaaccagagaactattttgctccccaggggaaattcagcagtatctggagacatttttggttgtcaagaccagtggggtccttctggcatctactggatagaagccatggaagctactaaacatcctacaatgcacaggaatcccacaaaaagaactgtctagctcaagaggtcggtggctctgaggttgaaaaactstgctccagccatatctgcctctaatccattctctacacatcaccagagtgatacaaaatacaactcccatgccattgatatcatttcccatacctgaaatccctcaatgcctcctagctgctctcaggttaaagtctaaattctcctgcaaatcacacgaggcccataatctggccctctcctacctttctacctcaccttcaccatcccccagaaccctcttccctgaaaccacactcacacctcatgcaggtgaaacagaccactccgttaccaactcttcctgtccatctctcccatttattccttagcccactgattttatgtcagacactccaatgggactaaaaaggaacaaatgccctcaaggcagctcaaggcactgatatccagtagggcacacagaaaagtgggcacacaattcaatcagcagaggcagaactttgtcatcgcctctgtgatcccactgccatctccccagtggactgtgatcctccagaagagagagcatcttcatgtcttcatctttatagtccacaggaacttggacatggtaagtgtggtctacagggtgtacaacttgtatttgtcacaattgttgcattaaggaatgaatgaattcccagcctctttaagtttggctctagcacagaaataaaaagaaatgaaacattaaaatatagagatgaaacaaaattcttcatagtgcatgcactcaaaagcccagaaac

SEQ ID NO: 2601 - DNA, 1144 bp, Homo sapiens
ggcacgaggttacctgcagcagttggagagtgaaatagatgaactttacatccaatatatcaagcacaatgatagcaaaaatatcttccatgcagctcgtaccccagccacactgtttgtagtcatctttatcacatatgtgattgctggtgtgactggattcattggtttggacatcatagctagcctatgcaatatgataatgggactgacccttatcaccctgtgcacttgggcatatatccggtactctggagaataccgagagctgggagctgtaatagaccaggtggctgcagctctgtgggaccaggctttgtacaagctttacagtgcagcagcaacccacagacatctgtatcatcaagctttccctacaccaaagtcggaatctactgaacaatcagaaaagaaaaaaatgtaatgcaaattttaagaaatacaggtgcatgaccaattgtcaattaaatattcagttttatgtctccatgcaaacattcaaagtgcttccatcagaacggataaaatactaaacacctctgaagactgcaaactggattagttcttttacttcagtgtttaataagcagatgtatgtatgcatggttatactattttgttaacatgtacaatttcctgatttttcttcaaaaatgctgttataaagtatttgtctatttatgataacagtacacgtgttctgcttgaatttactaaattctactactgggttataattaaatcatgtgatattccacgtttggatatgctcatttaatttctacagaaaaaattttaaattatttcacattagccatttgttaaaacacagcatcataactcagcaggctggatttaatctgtatcatcttatatatatcacaatcttatttttaagcacattttagagttccttagttgctttatcaaaaaccagatattgcttttacatggtttaatagaatataaacctcttgataaaaaatgcacaaaaaatcactttgtatatgtgagtttcactgcattgtatattttttcatttggtacacaaagaatgtattcttcataggtttattcttttaatatgtgaactattattaaagtttactctggttcctaagattaaaaaaaaaaaaaaaaaaaa

SEQ ID NO: 2602 - DNA, 1930 bp, Homo sapiens
  misc_feature (9)..(9): n equals a,t,g, or c
  misc_feature (1922)..(1922): n equals a,t,g, or c
aattgagtntgtggcatttgctgtgtttttcagcaaaacttcatcccaaatcagacatcttaaggcaccaataatttgcaaagttaaacctcctccacaaatttcacccagcaaatcgatgggcggagaattttgtgtggctgctatcttcggaacatccaggtcatggtttgcaaataatgcaggtctgaaaagagaaaaagatcagtccaaacaagttgtagttgagtccctgtacattatcagttgctatggcaccttagtggaacacatgatggagccgcgacccctcagcactgcacccaagattagtgacgacacaccactggaaatgatgacatcgcctcgagccagctggactctggttagaacccctcaatggaatgaattgcagccaccgtttaatgcaaaccaccctctgctcctcgctgcagatgcagtacagtattatcagttcctgcttgctggcctggttccccctggaagtcctgggcccattactcgacatgggtcttacgacagtttagcttctgaccatagtggacaggaagatgaagaatggctttcccaggttgaaattgtaacacacactggaccccatagacgtctgtggatgggtccacagttccagttcaaaaccatccatccctcaggccaaaccacagttatctcatccagttcatctgtgttgcagtctcatggtccgagtgacacgccacagcctcttttggattttgatacagatgatcttgatctcaacagtctcaggatccagccagtccgctctgaccccgtcagcatgccagggtcatcccgtccagtctctgatcgaaggggagtttccacagtgattgatgctgcctcaggtacctttgacaggagcgtgaccctgctggaggtgtgcgggagctggcctgagggcttcgggctgcggcacatgtcctccatggagcacacggaggagggcctccgggagcgacttgccgacgccatggccgagtcacctagccgggacgtcgtgggatccggaacagaacttcagcgagagggaagcatcgagactctgagtaacagctcaggctccaccagcggcagcataccaagaaactttgatggctaccgatctccgctgcccaccaatgagagccagcccctcagcctcttcccgactggcttcccgtaggtaccagcaacctgcttctgactggccagccccctcccctgctggaggaggggagaagccccgctctggtcctacccttcagtctctgctcttccttcatcaaccaccttccccaagcttagtgacagcagccgcccatcctacctggatggagaagagacccttctccaagcacctcagcgcacttgccctctgccacacctgtcggtggaggctgtggccaggagagactgtagaagctcggtccctgtgtatgtttgcatatgacatcctgcattggatccgcttttgtattttttaaccatacccacggtggggcgggtggggggagcctggaacagtgaccagatctgggggcctgagtggggacagagttgatcgtccacctggccattttgaccctgagtggacagtcacagcctcagctcatgtctggctgtgacacacactgcccccagcttcccttggtcagccccactccagcacggggtgaacggaggcccagagtactagggaaggaggaagggaggacatgcctcttcttcctcctttctttccccatctgttcctgggaagagtttgtctttcttatctttaagcccctttaccctggtcctgtactgatcagtgaaggaaaccgtggttactgaggccctgttgaaaagtgcacgtcttgtccaataaatcacgctgcagttggtgtccaaaaaaaaaaaaaaaaaaaaaaaaaaaaaacccngggggggg

SEQ ID NO: 2603 - DNA, 1753 bp, Homo sapiens
  misc_feature (909)..(909): n equals a,t,g, or c
  misc_feature (1063)..(1063): n equals a,t,g, or c
  misc_feature (1151)..(1151): n equals a,t,g, or c
ggcacgagtttttattcataggagaaatatatgtgtgcacatctacccacacagatactgttttagtttcactgggacatttgcccaaaggcagaagacagattgctgttgcagagttgtagattattattatatttagcaagatagccagctaaatcctaacttactccactgggtgactccctgggatgttattttctctatctctgaagttatttgagcaaggaaagcatttcttttatgctgtctatattctgttttatttggttcatatatttccttggattctttatgcatattttatggcactgactttcaagaataaagatgtagttgagaggcatgtcagagtcgatggtttgttgttaattgatagtttgattgattaatatagtaggatttttctgcttgatcctgacctaacccattggctttctttagtggacagttttacaaggacagtggcaggtgcagggaattgcccacttcagcagggctctgacatacttgatctgtttctccttccctcaggaaaagctttgccagcagaagtataatgtctcctgcataatgatcatgccccagcaccaaaggcaaggatttggacggtttctcattgatttcagtaagtgaagtactttatttactttcatgatccaggaagctgatggccgttacaggaaacagtaaaatataaaactttatttaacctgcattgttgtttttatcaatagataatgggctttctatttatatttacataggttagaacatcttcctcaagtgaaaaatgtactgctgctcagtgattgtactctaggaaattgagactagatctctcggcagcaggcctcatgcacaaagctattaccctgaatgaaccgacagaattacattccattttggggngctcatgctcattagcaccaaaagaggcaattatttgtgattaaagctaaaggaagtattatttgaaaggattttcagctctctgaaattttgcctataatcttgtacagtacaaagcagaaaaggtatatttccatttagaaaaataattttntaggcagcttatcctgggccttgctagtagaaataactcttaccttattttgttaatttcccttttctattatggaaattaatacagngtttgtatctagaggtttcccaagaaatatttatcttatatgcactcatatcttctgaaccttctcagttaaaaccggcataatatataaaagtatgcacatggataatgtttttaaaaatggtagttttttttttcctccttgtttatattatactggatgtgtaaatgttgtgttaggggtacatttggagaatcaattcaaaatatctagataacatgatgaccagataacccatgataatagtcatttctcgtcatgtaaaaatctgtcactggccgggcgtggtggcttatgcctgtaatcccagcactttgggaggccaaggcaggtgggtcacaagatcaagagatcgagaccatcctggccaacatggtgaaccccatctctactaaaaaatacaaaaattagctggatgtggtggcacacacctgtactcccagctactagggaggctgaggcaggagaatcacttgaacccgggaggtggaggttgcagtgagccgagatggtgccactgcactccagcctgggtgacagagtgagagactctgtctcaaaaaaaaaaaaaaaaaaaaaaaaaaaaaaaaaaaaaaaaaaaa

SEQ ID NO: 2604 - DNA, 1501 bp, Homo sapiens
ggcacgagcttccagcttagaccaagccaacatcttctctcatctggaccactgcattagctttccagctgatctcacagctttcagtcttgccccacccgccaacactacagccaaagcagtccttcaaaaatgtaaatcagagtatgtctgaagcttgcttgaaaactttccagtggcttctcatcacactgaggaaaaagtccaaactcctttccctggccaggaaggtcctccatggccctacatttcagcctctgatccccagcctgataactcacatgccagagttattcttgttggtccctcttcctggcacgctcctccttagcctttcacatggctggcctctctcacatagtccctcttcatattctgagaccactttctgaagttacctcatttctcacttcacttgtatttccatgaccttgttttatttttcattatagtactatggctattgaaattatatacctgtctgttcttgcctactagaatagcataaggcttcatgagaacaaggactgtgtctgtcttggttcccactatagcccagagacatactacattggacgtatatattaagtactaaataaatgttcacagaaagcatgaatttaaaaattaaggatagattatgagaaaagaaaaaagttctggagccaagacattgctttttttttttttttttttgggacagagtattatctctctgttgcccgggctggagtacagtgatgcagtcgccactcactgcacgcagcctccgcctcctgggttcaggtgattcttatgcctagaccacccgagtagctgggattatagacccacgctgccacgcccagctaatttttgtgtttttggtggtgatggggtttcgccatgttggctaggctgacggtctcaaagtcctgaccccaattgacctgcctgcctcggcctcccaaagtgctgggattatgggcctgagccaccacacccggccagcactgctttctaatagaaaaagaaacaacttggaagaaattagaagaaatgcagtatgttgaaccaaaacatagcaaaggattattagaagggcagctgatgctggataaaggaaaagatattatgcatcaaccacctcatagtgctggagcagtagtttgagggttgaaggaacagtgaggatttaactagaaatataatcttagtactcaagacctagaaaaaagagaatgatagtctgccaccagattggtttcccttaactctttaatttgtatcttcaaattctctctcacctagcctggccaacatgatgaaaccccatctctgctaaaaatacaaaaattagccgggcatggtggcgcatgcctgtaatcccagctacgtgggaggctgaggtaggagaatcgcttgaacctgggaggaggtggttgtagtgagccaagatcacaccactgcactccagcctgggtgacagagcgagactccgtctaaaaaaaaaaaaaaaaaa

SEQ ID NO: 2605 - DNA, 1450 bp, Homo sapiens
gctcaaactatgcattaattttgcgtgcatagttctaataattttaattgtctcatccagtcgaggggttgacagactagaacagaccaggctcagttcacatgctgcctatttttgtaacacttttttttgtttgttttgttttgttttgtttattttgccctacaaaaactgatttgagtagttgtgacacaactatgtgagactgtattgagactacatggcctgccaagcctaaaaaatatttacacctgaccctttacctgaaatgtttgctgacctctgaatccgagagttgaagggaatctataaaagtggctcatattaccaaactcgtagagcttgtgaagaataatgcaaatctattcatttatatattcttttccagtgtttttagaaggctcactgagcacagtacctcatattccagatccaaggattcctgaggaatccaaattagtatccmsaaggttcattggtagtcatggttataaaccagagcaaaagttaatgggaagaaatggtaaagagtyactkyattgcagctgacacctgggattttaaaatctttttttcgtttttgagatggagtcttgctctgtcgcttaggctggagttcagtggcgcgatcttggctcactgcaacctctgcctcccaggtgcaagtgtttctcctgcctcagccttccgagtatctgggattacaggcacgcgccaccacgattggctaattttttatttttatttttatttttatttttgagacggagtcttgctgtctcgccaggctggagtgcagtgacatgatttcggcccactccaacccccgcctcccaggttcaagtgattctcctgcctcagcctcccaaatagctgggactacagcgtgcgccaccacgcctgggtaatttttgtatttttagtagagatgtggtttcaccatgttggccaggatggtctcgatctcttgacctcaggtgatccgcccgctcggcctyccaaagtggtgggattacatgtatgagccaccacgcccggcccacgctcggcaaagtttttgtatttttggtagagatggggtttcaccatgttggtcaggctggtctcgaactcctgacctcgtgacccgcccaccttggcttcccagagtgttgggattacaggtgtgagccaccgtacccggccaaaatccctttagttctagtcagtagaggaataaagcactgttctttcaaatgtgaacccctcttgatcagtattgtccaatctggcctgttctttaaccagtcagcctcttttcctgcctcttgcatgggctttttgttgttgtttctttgtttgttcatctatcatctcttgctttaatcataacctaactttccctgatgtggcacgtgtaaaactgaaaaacagaaactctatctggtaaaaaaaaaaaaaaaaactcgag

SEQ ID NO: 2606 - DNA, 2329 bp, Homo sapiens
ccgggcctgcaacctgccggggcggctccgctacgcgcaccgcctcagtggcttcctccacagccacctccggaggatctggctgaggaggaagtggaggtgtcactggccccggcctttgccccaatcttgtgtgggcactgaagggggactacaggttcgagatacttcctcgcgtattgctaaaggaggagttgaccacaccaaaatgagtctacatggtgctagtgggggacatgagagatcaagagatagacgaaggtcaagtgacagatcacgagattcatctcatgaaagaacrgagtctcagctcactccttgtattagaaatgtgacttctccaacacgacagcaccatgttgaacgagaaaaagatcacagttcctctcgtccaagcagtccgcgtcctcaaaaagcatccccaaatggttccattagcagtgctgggaacagcagcagaaacagtagtcagtcaagttcagatggtagctgtaagacagctggggagatggtgtttgtatatgaaaatgcaaaagaaggagctcggaatataagaacgtcagaacgagtgacactaatagtggataacactagatttgttgtagacccatccatttttactgcacagccaaatacaatgttgggcaggatgtttggatctggccgagaacataactttacacgacccaatgagaaaggagagtatgaggtggcagagggaattggttccactgtgtttcgagcgattctggattactataaaacaggaataatccgttgtcctgatggcatatctattcctgaactgagagaagcatgtgactatctttgtatctcttttgaatatagcactattaaatgtagagatctcagtgccctaatgcatgagttatcaaatgatggtgctcgtagacaatttgaattttatctggaagaaatgatcctccctctcatggtagctagtgcccagagtggggaacgggaatgtcatatagtggtgcttacagatgatgatgtggttgattgggatgaagaatatccaccacagatgggagaagaatattcacaaattatttatagcacaaaattatatagatttttcaagtatattgaaaacagagatgtggccaagtcagttttgaaggagaggggtcttaagaagattagattgggaatagaaggttatcctacctacaaagaaaaagtaaagaaaaggcctggaggccgcccagaagtgatctacaactatgtccaaagaccctttattcgaatgtcctgggagaaggaagaaggaaagagtcggcatgtagactttcagtgtgtaaagagtaaatctatcaccaatcttgcagcagctgcagcagacattccccaggaccagctggtagtcatgcatccaactccacaagtggatgagctggatattctccctatccatcccccttctggcaacagtgacctcgatcctgatgcacagaatccaatgctgtgatgctgatcttccttgaaaccatagcatgctactcttcacagtgacgttgtactctcctcattctgcactgcaaggccactcttcttcattgtgagatgcacataacaatgtttaggatattgcagtgtaggcttttttaaagaccaaaggtagctgaatggtttttttttaaatgagtacaactctagcattttgaagttccagttgtaaatgtatttgtttaccagtaggtttgtgaaattggttctttgtatgggggatggtcctttttcacacagctaggtcttttcagaagtggtggaaattggcagctggggtactttcagtttggactgatattcatcacacctcagataaaatgcagagtaatatatagttgcactttataaatggtggttaaatggaaatgttcaagccattttatagttgtgatgcacaatataatttaagtgcttctgtcaaagtattcctccagtacaatttgtatagtttgctgcccttgatgagcaaaaagtatttatcttgggcttatctgaatgatcaggatgagatttaatgcccatatcttaccagttcagttatctccagagccatttcaccctttagagtgagtcacatgcagggagtgtgaatgtcagaggtggtttattatccagtctgccttacccttaatctgttcacagatatttatttactaatgctttttttttcttaagagttatgggataggaaaatgaagtgtttgctcttcatttactaaatgattgtaaacttgagtttttcatcaaaataaaattccattgttttaaaaaaaaaaaaaaaaaaaaaaaaactcga

SEQ ID NO: 2607 - DNA, 1593 bp, Homo sapiens
  misc_feature (322)..(322): n equals a,t,g, or c
  misc_feature (1131)..(1131): n equals a,t,g, or c
gaattcggcacgagaaaacattagcctgaggaacaagctgcgtgagctctgcgtcaagcttatgttcctgcacccagtggactatgggagaaaggctgaggagctgctgtggagaaaggtatactatgaagttatccagcttatcaagactaacaaaaagcacatccacagccggagcactttggaatgtgcctacaggacgcacctggttgctggtattggcttctaccagcatctccttctctatatccagtcccactaccagctggaactgcagtgctgcatcgactggacccatgtcactgaccccctcataggtcantggaacctgaaagtggacttgagcaggttctcatgcttctacctctggccttatccctcaggkttcatgtagcttgcgacccagccaggcagagagagttctagcagaactacatacaaatggtttatgaagtttggatttatccagacaatcatatgagttagggtaaagatcttaaggaaagagagaggcctgggattgtggactaaggcagaggagggacagaaagacctagagtaggtctggcactggaaggtggtattaatacatttcttttcttctcccagttgaatttggccagcactgtttcttttgactttagagattatttcccaatgtttgatgaaagttttgaaatctttagatatgttgggaaaattgtggacagtctttcaacatagtacaagttccttttccaccagctgaggtactggcagctataattttaattccttttctagttggtaagttttctcttcagttcagccatcctttagagctccttcacccagctctctctgctctctctgtccccttcatcaccaagacagacattctgggtcagagatggaggttgtgtccttgtcaccacatggaggaattctgtgatcagaagcagagcacctgtgttttatgcatttaaaaacatctagaccgggcacggtggctcatgcctgtaatcccagcactttgagaagccgaagcaggtggatcacctgargtcaggaatttgagaacagcctagccaacatggtgaaactccatctctattaaaawtataaaaattagctgggcatggtggcgtgcanctataatcccagctactcagraggctgaggcaagagaatcgcctgaacccggcaggtggaggttgcagtgagccaagatcacgccactgcactccagcctgggtaacagagtgagactctgtctcaaaaaaaaaaaaaaaaagccaaacctctagaccaggcgtggtggctcatgcctgtaatctcagcactttgggaggccaaggcgggaggattgcttaaggccaggaattcaggaccagcctgggcaacatagtgagatcctacatcatctctacaaaaaataatttaactgggcatggtggtgcgtgcatgttgycctagctacatggaaggctgaggcaggaggatcgctgaagcccaggagttcgaggctgcagtgagccatgatttcatcgctggaactccagccggggcaatacagcaagaccttctctccaaaaaaaaaaaaaaaaaactcga

SEQ ID NO: 2608 - DNA, 1583 bp, Homo sapiens
ggcacgagccttaacaggagtatttgagaattaccttataaatgcagagaatgaacatgaaaagcatcagactttatctagacttaagatattattagaaaattcactgaacactagataaagttaagtcctaaattgtttcttaatttattcatgaattctttgagtttctgagatagaaatttggagatcttggtaatgggcagtggtatactttgggaagtaggaaggccagttgatttgtgctttgatggttgttggaggtcattccatgattggaatgtgttgattttcttgatttatttgttattacaacaaagcagttattcttggacagttgacatttcagaactaaacaatccttaaatatacttggaattacagaaatggaattacttggcacgtttgtttaataatcaacagggcagtcctgtttaattattttcacacatttgggtcacctgtaatctcccccctaatctcttctatgatcttaaatttgcatcatgcttgacatcatgaggaacattgttgctcagaaacatatcctttgtcctttaataggcagtgctagctaatcagtctggttgctgaatgaatgatccatcttctgtagggccatgttttaagcctgtgttagtcagctcaagatgccgtaacaaaatgtagactgggtggtttgaacaacagaaatctatttcctcacagtccttgaggcagaaagcccaagatggatgtcagcacagttgggttctggtgaggccctcttcttggcttccagacagccaccttctcaatgtgtgctcacatggccttttgttagcatctatgttagcagagagaccaagagcaagctctctggtgtcttttactataagggtactaatgtcatcagactaagctctgcccttatcacctaatctcctcccaaacaccccctctccaaatatcattacactggggggttaggccttcagcatatgaatttgagtgggaacacattcagtccataacaaagcctaaacagtactgagcctttaataatcagatatgatctctcttaagtttcatactagttaatgaattccagttagactaacttttgttccattagtagtagtgctttaaacctctatgtgaagtaactcattaaccaattccaagtcctaaatttcccatacccattatgaatgcgctataagttataaacattctccaggttaccagttttaaatagcaattgtgaaagactaatgcaagtataaaaacactttgtgaggctgggtgtggtggctcatgcctgtaatcccggcactttgggagaccaaggcaggcagatcacgaagtcaggagatcgagaccatcctggccaacacggtgaaaccccgtctctactaaaaaaatacaaaaattagctaggcatggtggtgcgcgcctgtggtcccagctgctcgggaggctgaggcaggagaatcgcttgaacccgggaggtggaggttgcagtgagccgagattgtgccactggactctagcctggtgacagagcgagattccatctcaaaaaaaaaaaaaaaaaaaaaaaa

SEQ ID NO: 2609 - DNA, 1434 bp, Homo sapiens
gctttgtcacacaatgtaatcttgtaatcctctgtccatctgtggccggcctgcttctctaaacgggaagactactgcttcatgctgctctattgcttgttgcctaccatctctgcctcatggtctgtcagtcattattgctcctagaccagctaagttgccccagtgtctcatttctgggtcttctgtgtgggctgttggtctgtaagcatctgtcagtatctaagcctgctgtgaggtcatccctcacaattacagaatacacttggtatacaaaaacacatgtagaggaaaagaaaattactgaagttccaaaaaacacctacaattggaccaagaattggcttatttttttttttaaagaaagagcagcttctgtatattatttacaaaggtcatcatttcattgattgcactggacagactaataattttttacccataaaattgtttagggttagtaccctgttaggacctttttgaacgtaaagaaggttttactttccatttaagacaccaggtttgaggtcaaaagataaacataagcccagagaagcaagcaattctatttcttctcatccctgttgctgagattgctgtaggtgaaatattaagtatccctggacagggcagaagtatgtaggataggaggcttgtgtgtagtgaggcttttatgaataaatcagtgaaatctgacacagaagccagggctcttcccctgatcaaatcaacaagatggccttaagtgctccgtcaactgtggacactgtggggagaggctgatcagttggatttggagccagagataagagtcaggagggccttgktcctctttacaaaggaattgacatgactaaattgaggaagtctcaccctaaggtgagatgccaaggaagatggcttgctgkcttactgtgkacccacatycaccatttcttataacttcaacccactatctagcatttgactggtctctcaaaggaactgaggcttttttawttctattataattgatagkcctattttacctagtcataaaataagtcctcaaaatatactggtwtgaawtagkaaacaaaataaaagttgtgttgacattttagatcctatttccaaaaaaagtaccattttattgkagwatgkggktatttaaaaccttaatttattgtcatttttagccaatacactattttatcaaaaagaggcagattgcagtagaagaatgaggaaaatgaaataccattcaggatttaggctgtgtcctatgctgcttctcctacacctctggacctctggtacacacacacactctctctctctctctgctataaaatgaggctcgcttttcaaaatgattatactgaaatttcagatgtcaatgaaatataattatgagtgtttgtgtatacttatgtatgtgtgtttccagagtag

SEQ ID NO: 2610 - DNA, 1710 bp, Homo sapiens
  misc_feature (1705)..(1705): n equals a,t,g, or c
gatttatgcatatggtttattatgcacacagtctagatttatggttgacttcaattatttttctattagaggagatctgagtagcataatattttggagaaaatatgaaatgaaattttttcttgtgaaagatatagtgtatattagctttatttctgactaacctatggataactataatcaaacatgtatcaagtagtaccactgaagaagtgtttgagcttactgggaacacttatgactcagcctattaccctggcataattattaataaagagctttttgtccttcttagaagtgagccatttggggtaacaccttacactgtcatactatgtttaggtaattaatttgttcttctgaataaactctcaactcctttcttacacccaattttacacaaatttagttttaattactgctttaagagctctctgaaaccaggaattcatttctgaggcatagtaaatcctgagaccaccatgctcacacagtgctatcatgtactgtatgaactttgtaaaatagagcttaatcttattttataatttaagatgattcagtgattaccttggtccatgtcattcacctggtaagtggtgtctgcattatttaactattttaamcattcattcatttgtgaaatgttgggtaccaatgatactcatgtactgcagttgcagagatgaatamcatgtaatctaggaactcaaaaagtttagcatcattgtgtgggtgacatatgatttgaattaaagcttctgtttctttatctagcattcttaccaccatacacatcgcttctttaacttatttcaaattamcmcamcaaatactaagaattttattagctgtggtgtacatcctaggtttatgaagtaaaatatactgtttcttttctcccacggtgtattattttttatatcagaatgcatgaccctgtagtatttttgtagcacatttactagaactataaggtattatatttaatgtatatgtttttaccatatttataagctatctctttctacacaattttaacatgtgctctcacacacgtacacatctgcattttatcttccataagagaagtactgattatatatgaataataatatacaaaagtaatcataattaccacataaatgagcagtattagatttagtaataaaacattttgaattttttgttcgtaaataggtatggtactgatagtcacacatgtgtattattatctttaaacaaaaacctcttagaattcatgagatataatattttcaaattttatgttttcaagagagatatttgcctccaaaattcactcttatattgttgcgtttttaattttatcaagataaccagttgaatttaatgcatatatggtgccatttctttcagataaaattgttracatcgctttaaaaagattagaaatttgaggccaggcatggtggctcacacctgtaatcccagcactttgggaggccaaggtgggcagatcacttgaggttaggagttcgagagcagcctggccaacatggtaaaacctcgtctttactaaaaatacaaaaattaaccaagtgtgatggcacacgcttgtaatctcagctacttggaatgctgaggcagcacaatctcttgagcccaggaagtgaaggttgcagtgagccaagctccagtttgggtaacagagcaagacttcatntcgag

SEQ ID NO: 2611 - DNA, 2279 bp, Homo sapiens
  misc_feature (194)..(194): n equals a,t,g, or c
  misc_feature (409)..(409): n equals a,t,g, or c
  misc_feature (413)..(413): n equals a,t,g, or c
  misc_feature (2263)..(2263): n equals a,t,g, or c
acacgcagctgtacccagcctcggggcgcctttgctgatggccacgtgctagagctgctcgtrgggtaccgctttgtcactgccatcttcgtgctgccccacgagaagttccacttcctgcgcgtctacaaccagctgcgggcctcgctgcaggacctgaagactgtggtcatcgccaagacccccgggacggnaggcagcccccagggctcctttgcggatggccagcctgccgagcgcagggccagcaatgaccagcgtccccaggaggtcccagcagaggctctggccccggccccagyggaagtcccagctccagcccctgcagcagcctcagcctcaggcccagcgaagactccggccccagcagaggcctcaacttcagctttggtcccagaggagacgccantggnaagctccagccccacccccagccgaggcccctgcccagtacccgagtgagcacctcatccaggccacctcggaggagaatcagatcccctcgcacttgcctgcctgcccgtcgctccggcacgtcgccagcctgcggggcagcgccatcatcgagctcttccacagcagcattgctgaggttgaaaacgaggagctgaggcacctcatgtggtcctcggtggtgttctaccagaccccagggctggaggtgactgcctgcgtgctgctctccaccaaggctgtgtactttgtgctccacgacggcctccgccgctacttctcagagccactgcaggatttctggcatcagaaaaacaccgactacaacaacagccctttccacatctcccagtgcttcgtgctaaagcttagtgacctgcagtcagtcaatgtggggcttttcgaccagcatttccggctgacgggttccaccccgatgcaggtggtcacgtgcttgacgcgggacagctacctgacgcactgcttcctccagcacctcatggtcgtgctgtcctctctggaacgcacgccctcgccggagcctgttgacaaggacttctactccgagtttgggaacaagaccacagggaagatggagaactacgagctgatccactctagtcgcgtcaagtttacctaccccagtgaggaggagattggggacctgacgttcactgtggcccaaaagatggctgagccagagaaggccccagccctcagcatcctgctgtacgtgcaggccttccaggtgggcatgccaccccctgggtgctgcaggggccccctgcgccccaagacactcctgctcaccagctccgagatcttcctcctggatgaggactgtgtccactacccactgcccgagtttgccaaagagccgccgcagagagacaggtaccggctggacgatggccgccgcgtccgggacctggaccgagtgctcatgggctaccagacctacccgcaggccctcaccctcgtcttcgatgacgtgcaaggtcatgacctcatgggcagtgtcaccctggaccactttggggaggtgccaggtggcccggctagagccagccagggccgtgaagtccagtggcaggtgtttgtccccagtgctgagagcagagagaagctcatctcgctgttggctcgccagtgggaggccctgtgtggccgtgagctgcctgtcgagctcaccggctagcccaggccacagccagcctgtcgtgtccagcctgacgcctactggggcagggcagcaggcttttgtgttctctaaaaatgttttatcctccctttggtaccttaatttgactgtcctcgcagagaatgtgaacatgtgtgtgtgttgtgttaattctttctcatgttgggagtgagaatgccgggcccctcagggctgtcggtgtgctgtcagcctcccacaggtggtacagccgtgcacaccagtgtcgtgtctgctgttgtgggaccgttgttaacacgtgacactgtgggtctgactttctcttctacacgtcctttcctgaagtgtcgagtccagtcctttgttgctgttgctgttgctgttgctgttgctgttggcatcttgctgctaatcctgaggctggtagcagaatgcacattggaagctcccaccccatattgttcttcaaagtggaggtctcccctgatccagacaagtgggagagcccgtgggggcaggggacctggagctgccagcaccaagcgtgattcctgctgcctgtattctctattccaataaagcagagtttgacaccgtcaaaaaaaaaaaaaaaaaaaaaaaaaaaaattnctgcggccgtcaaggg

SEQ ID NO: 2612 - DNA, 708 bp, Homo sapiens
gaattcggcacgagccctgcgggtggtcccgggcctggccagggctcagtgctcctcttccccctcctccctgttcccacccctcatgaagcacactgcgtgtccatcccatgtacccgtgggtcgacgcacgctcttgccacgccctgagcgtgtacacatgatgtgttctatgcattcaccctgccccccagcccgccctgcagaggacaagatgggtggccccggctccctttcccctaaccgcccctgcccgctgtgcagccgtgtgcgttggcgtgtgtttctgtgtcactggcgtgtcacgtgatgtagccgtgtttgctgacatgagcccctgcccccttctctgtttctccgttggtttctagagctctctccctccccttctcagaggggactggactcctggggcctggctggggcccagagccaggccgccctctcctgttagccctcagagtcccatttctgttagccctcagagtcccatttctattggtgaccaacttgcaaatggataaaacacaggaaaatcctgccccccccttcctccctgcatgtcctgtccccagagccccccaccccaccctgggccaggtcaggccctgtgggacgggagaaatagcaaccaatccaacagcgggaaaaaaaaaaaaaaaaaaaaaaaaaaaaaaaaaaaaaaaaaaaaaaaaaaaaaaaaaaaaa

SEQ ID NO: 2613 - DNA, 1297 bp, Homo sapiens
acgcgtccgttttttcaaaatccaaaaagaaatgatgttggagaagggaagttgaacgagcatagtccaaaaagctcctggggcgtccaggccgcgccctttccccgacgcccacccaaccccaagccagcccggccgctccaccagcatcacctgcctgttaggagaagctgcatccagaggcaaacggaggcaaagctggctcaccttccgcacgcggattaatttgcatctgaaataggaaacaagtgaaagcatatgggttagatgttgccatgtgttttagatggtttcttgcaagcatgcttgtgaaaatgtgttctcggagtgtgtatgccaagagtgcacccatggtaccaatcatgaatctttgttcaggttcagtattatgtagttgttcgttggttatacaagttcttggtccctccagaaccaccccggccccctgcccgttcttgaaatgtaggcatcatgcatgtcaaacatgagatgtgtggactgtggcacttgcctgggtcacacacggaggcatcctacccttttctggggaaagacactgcctgggctgaccccggtggcggccccagcacctcagcctgcacagtgtcccccaggttccgaagaagatgctccagcaacacagcctgggccccagctcgcgggacccgaccccccgtgggctcccgtgttttgtaggagacttgccagagccgggcacattgagctgtgcaacgccgtgggctgcgtcctttggtcctgtccccgcagccctggcagggggcatgcggtcgggcaggggctggagggaggcgggggctgcccttgggccacccctcctagtttgggaggagcagatttttgcaataccaagtatagcctatggcagaaaaaatgtctgtaaatatgtttttaaaggtggattttgtttaaaaaatcttaatgaatgagtctgttgtgtgtcatgccagtgagggtcgtcagacttggctcagctcggggagccttagccgcccatgcactggggacgctccgctgccgtgccgcctgcactcctcagggcagcctcccccggctctacgggggccgcgtggtgccatccccagggggcatgaccagatgcgtcccaagatgttgatttttactgtgttttataaaatagagtgtagtttacagaaaaagactttaaaagtgatctacatgaggaactgtagatgatgtatttttttcatctttttttgttaactgatttgcaataaaaatgatactgatggtgaaaaaaaaaaaaaaaaaaaaaaaa

SEQ ID NO: 2614 - DNA, 1434 bp, Homo sapiens
gaattcggcacgagggggcgggggggacgagagtagtatctttggttctttggccctgacgctgtgttcctcttctcccagggcatcagcagcctgttcagctctctaaaagttgtccggctgctccgtcttgggcgagtggcccgtaagctggaccactacattgaatatggagctgctgtgctggtcctgctggtgtgtgtgtttgggctggctgcacactggatggcctgcatctggtacagcattggggactatgagatctttgacgaggacaccaagacaatccgcaacaacagctggctgtaccaactagcgatggacattggcaccccttaccaktttaatgggtctggctcagggaagtgggaargtggtcccagcaagaattctgtctacatctcctcgttgtatttcacaatgaccagcctcaccagtgtgggctttgggaacatcgccccatccacagacattgagaagatctttgcagtggccatcatgatgattggctgtaagtatgacagtgctggggtggggttggccatctcttctgttagctggaaacagggaaatggctacagtgccagcaggatcaggagaataataacttaaaacaaggaagagtttttttaagactaggcttacagttaccctgataattaaagcagtatatgcttactgcaaaaaaatttagaaaatacaaaagagtgcaaagtagaaagtaaagactatccataattctgcttttcagagataactactaatactgttggtgtcttctcttacagactattttctttgcatatctgaatacatatagatttttataaacttaaaatgagatcttgctgcatacgcactttagtaaactactcatagaacagtgaattatggaagtcttttcatgtcaatttttttctttttaataaaaattgtatatatttaaagtatgaaatgagattttgatatagtgaaatgattatgacagcaaagcaaattaacatatccattcctttacatcattaccttttttttggtgaaagcacttgaaatctgctctctcagcaaatttcctgtaggcattacagtattattaactatagccgtcatgctacatgtcctacatgtcaatttgaacatagctgtagcttggcatatagtctaatgtagtatgagaaaaagaatgtatgaaaaatgaatgcaaaacatctcattaattgtattttatattgattatatattgaaatggtaatatttctgatgtatcggttaagtaaaatattctcttagaattaatttaatctgtttcattttccttttaaaagtagctcctaggaaaaatttaaatttaatcatttggacggtgctggtctagataaacatttttgatgtcttgctwgatgggaaattttccaactcaaaaaaaaaactcga

SEQ ID NO: 2615 - DNA, 1501 bp, Homo sapiens
  misc_feature (795)..(796): n equals a,t,g, or c
  misc_feature (823)..(823): n equals a,t,g, or c
gactaacagggactataatcttgcagcaccatgccgagctaattttattttttgtagagatgagctctcactatgtcacccaggttcgtctcaaactcctgaaccctagtaattctcctatctcagcctcccaaagtgctagggttacagacatgagccactgtgcctgtctagacttgtactttcaactgtccatttctccctgtctgtcccatgggcactcatgaaaaaacagaatgctcccaactttattcatcttccaagcctgtagctcttggtatactcactgttgcaagtcagaagcttgatttcatcattgatgtttttctcacgtttcacatctcactcatcaccaagtcatgttggtgttaatttctgattaacccttgaatttaccgtcttctcatcctctgtacaaaagcctcaagtgagggtcaaattcaacattatcctgatctagacagcccccattctcaatccacccttttccaagttgattgcccaaggacttctaacaataaactctcttttgcaccacagacttctttgaaaatatacatgctgttgaccctctctgtagaaaaccgcacacataaaacttaccaacagatttcattggttcttgggttctcccgaagcctatccatggtttatagattaagaattgatgaggtagctgggcacagtggctcacacctacgatcacagcacttcgggaggctgaagcaagcagatcacttgaggtcaggagtttgagaccagcctggccaacatggtgaaaccctgtctctactnnaaatacaaaaagtagccagccgtgatnacaggcacctgtaatcccagctactcgggaggctgaggcatgagaattgcttgagcccgggaggcggaggttgcggtgagcctggatcatgccactgcactccaacctgggcagcagagcaagactctgtctcaaaaggggaaaaaaaaaattgctgatgtgacccatgaagggaactcattttcctcgtaattttggactgccacacattggtacctttagttctctgaaggcccacgtttttatcattaagacctatttgttagctagtagagctttatgttcgctgtccatgaaaccttctgtaaccacagtgactacaagtagttctttctctattgaattattaggtccagaatagaagatgtcattgtacactttatttccctcacactgtgttatgctctgatgtgctatgcttagctatctgtcagagattagtaaattataaaactcatgtgtactacttaagtttatatcttatgctagtttataagaacaattaaaaggacttagaagattaactttggtttcatggtctctgaagtcactgactgctatttcagcttgtttacccttacctagcattaagactccatctacttctgtacagtatatgaaaatttttaaactttcatttagactggtgggatagggctgaccattacaaattgtcgt

SEQ ID NO: 2616 - DNA, 4416 bp, Homo sapiens
gaattcggcacgagggagccggcgcccggaggagcaagaggaggaggaggaggagaggtcggagccgtctccaggagcccttagagaccgagtcccggcggcgacggcggggcagcgcaccggcaggcggattcattccacttaaaacctgaaaacattggaccacacaaagtcttactgatttcaggtaaaaacaataattgaagatgtccagcaaaacagcaagcaccaacaatatagcccaggcaaggagaactgtgcagcagttaagattagaagcctccattgaaagaataaaggtttcgaaggcatcagcggacctcatgtcctactgtgaggaacatgccaggagtgaccctttgctgataggaataccaacttcagaaaaccctttcaaggataaaaaaacttgcatcatcttatagtggaatagagaaacagctcctcgcctcttcccaacaacgcaaattatgagcagctccttgaagagatttaccttcagcttatttggtaaccactgctaataactaaaatgttctcagcttggaataatggactctgaagtctctattttccaagttgtcctttctcttaaaataccctttactgatttaatacagaataacaatcttattttccacttggtaactatggctttatgttgggttactgtttaaggaaagttgatctgggcctttttaaaaacataattatatactttagaaatacaaggsattccgatatgtcaggacctaaatggcctaagcacctgtcaaattaaaattccaaaattcattgaaatcctaaagccttgatattatattctttataaggcgtgtgccagcctgtatagtatataagagagaggggtgtttgtgtgtatatatatatgcctttgtgtatacacttatcaaagctattttcttatgaaaacgtccctctctccataccatcagtttctcagttccagaagttatacctttattttgagctgtgtataggtagaataaaaaattcctttcatatcgttattgtacaaaaagtaaagagtatcctaaagattgtattcattgtaatcaagtaatgcaatcatctctcctctcttgaaatcttgctggacctcttaggctacaataaactgtaccaaactaaactgacagtccttcgataatatgaaacattaatttacaaggacccgttagggcttcaatgatgctgagtctggaaaaggggaggagacccttgggaggactccaggcagctgtgctcccagggctcatgttctctactggattagggatagtcacctctgaaatctccaccctgatgattggaatgaaacggagtgaacatgagcccagctgagagaggagcaggaatgtgtgaaaaacagctgctctccttgtcccagctttgtgattgagccctctgtcttgctctctctgccttccctgtgtctttcttctcttaccagagcatctgtttgcagaggtaacattaccttccccagccacaggtatgtggaatacggtgaggaaaaaaaaaattaaaaaaaaaatgcaagctgtcaggatgcttaagctcttttcagacatctgcagtttcatccctaccttgttcacataccatccaagaggcacataggctacccaagagagccttggattcagtggtacactccttgggcccaagggctttagcagctggatatggggttccttgattttcctctgggcccaaatatagccctcacactcttggaatttccaggtatgggggtagccccaaaaggaggaatctcctatggccaataaggtatcttgactttatcaaagtagaagagagggtcacttcggagtcaaatcatacactaggcctttgatgctttaattcttcttcagttcattaaaagtaactactaaggaaaggttaaaaacttcccctcaaaaaggaatcaaccccaggaagtaattatttacaacgattttcccaaattttgtacaatctgtcctggaaagcaaaccccttttaaaatctaatgtctgggctttgagtattagctcatttagggtggacaaatgcattactgttttcaaactgctcacatttattcagtatttctccaagttgctatctactcagccttatgaatgcccctcgcttttctaaggccatgtgaaaatcacggcactgcccttagccttgtgtcatctgctttttcgttctgcgatatgcccagttcccaaatcaattataggtacctgtttaggagagaggaagattttacctctcaaagggtgagatttgaaatttacactaaaaagacaactttacatttaatgcttcacttaatgagacattcttttttttataagtctatttttctactcagtttcagaacactaatctgattttcactctgatttttaacgtttctttaaatatttataatgtagcttctttcaaaatattttcatgaaaaattacttttattataccattatgtgcatgttattggtagcaggcatagtttattatttagtactgaaacatgctcttttacctaacagtaaacaagtatgttttgatatatatctgttaatatgcttatagtggtaagaaatggacttgaggtcccaggagatttcattttattcaccctggtcagatacaataaaggctatgagtataaatacataacttcctaaccaggtgtagggcatgttcatgaatatcaaatcttttgatgctggacccaagagaggaaaagttgtagctaaatgttgatttacttataactagacgtctatgtgagaaaatatatgtatacatatatatgatatgcagaagtcactttttttatcaggctttattctccttacaaagccacagtttaactgtctgcaacagttggtttatgttaatgatagacaaatacccagtgtttgttactttttccaactaccactgtaatgataatctttctcacgtatatacatgcaacttcttggcttcatttccatgaagctgtttcaatatattcagtatactttgtccttaatgctgcttctgttaacagtgatctctttctttttttcattcttatatcttcattagttcatcataaatctgtccagttgaggcctcaggaccacggcatgatttcatgactccgaagtattttacagaaacattttttaaataagggaaatattttatataccagatggttcacaagtgatggctcatagctagtttttttttttcttctaaaaaatgtcaggtttttaaaatcatttaccttattaaaatgaaaagtgccatacttaacttttaaaggaaagacctgacttgctttttctctatttagactgtttttgtactttactaatctttaaactatcaggaaaaaaaccaaaactttataccaatgatttagtaattttgaggcatagggtagcttacgtagtggaggatgtgccaaatattctcttcaaatgccaccttctcaatttataactaaaatagtgttatctgactaattcctctgaattttgatgtaagatctatataggcccccaaaatgatcgtagtacatgccagtcatttctcagtgaaataaatacaataccagagtacattatgggttttattgctttcttttatggtagacctgttaatggggaaaaaatacatcaaatcaaatagaatcttatatctgtatgttaaaatagagcacttacctgaagtcagtggcctggatcatagccctggatcatttcccagtctgtcctgtgctgtgtgaccttggacaaggcgcttcatctctctgggcctctatttctccatttgtaaaacaagtggctgcagtagatgatggctgagagcccttcctgttcccagatgccttggtccaaagaccccacccctctgctggtcctgccaacgtgttggtgctataagctgcttcagatataaaattggtttatctataatgtttgttcatttaatagcttctaaaaggcctttttgttatacagtgctttttttctagttttatggacttgrttactgtaataatgtcttgtttttagccatgtaactacaaacagatattctcttgatgtcttagtaaatttgcatttgatatatcattgatgagattttgttgttatgtaatattctttgstacgcatctgtccagcatcttattaaccataatactgtgatcattatttggaaatatgtcctatggaaagaataaaagcatgtacttcacagctagcatgttcacagatttgaaagaagtttcattaaaagcaccattgctttctgtactgcgtcagtgcctcattgtatcatcctacttgtgttttgctcaataaatgaataaaagaccaaaaaaaaaaaaaaaaa

SEQ ID NO: 2617 - DNA, 1287 bp, Homo sapiens
  misc_feature (1287)..(1287): n equals a,t,g, or c
ggcacgaggcamgatggccaccaccaagcgcgtcttgtacgtgggtggactggcagaggaagtggacgacaaagttcttcatgctgcgttcattccttttggagacatcacagatattcagattcctctggattatgaaacagaaaagcaccgaggatttgcttttgttgaatttgagttggcagaggatgctgcagcagctatcgacaacatgaatgaatctgagctttttggacgtacaattcgtgtcaatttggccaaaccaatgagaattaaggaaggctcttccaggccagtttggtcagatgatgactggttgaagaagttttctgggaagacgcttgaagagaataaagaggaagaagggtcagagcctcccaaagcagagacccaggagggagagcccattgctaaaaaggcccgctcaaatcctcaggtgtacatggacatcaagattgggaacaagccggctggccgcatccagatgctcctgcgttctgatgtcgtgcccatgacagcagagaatttccgctgcctgtgcactcatgaaaagggctttggctttaagggaagcagcttccaccgcatcatcccccagttcatgtgccagggcggtgatttcacaaaccacaatggcactgggggcaagtccatctatgggaagaagttcgatgatgaaaactttatcctcaagcatacgggaccaggtctactatccatggccaactctggcccaaacaccaatggctctcagttcttcctgacatgtgacaagacagactggctggatggcaagcatgtggtgtttggagaggtcaccgaaggcctagatgtcttgcggcaaattgaggcccagggcagcaaggacgggaagccaaagcagaaggtgatcatcgccgactgtggggagtacgtgtgaggcggcactctctctgcttccccctccgctcttgaccctgcatatccaggaaggaactgccagcctcagaggaggcagcaccgagggtgcctgtttgaagcaagcagcatttgggatatgtgcccttcctcagggtctgcttggagcagctcctctgcaggcacagcctggactattcccaggcacagctgtgggcccaggagccagctcaggtgctcccctccaccatgggcaggctgtgcaaaaagcactggcttttctcagcatttgctgctgggcctctcctgggactaccagtgtggctcttacgtgttttctttgctaaaataaaccctagttcttawaaaaaaaaaaaaaaaaggcggccn

SEQ ID NO: 2618 - DNA, 1544 bp, Homo sapiens
  misc_feature (1534)..(1534): n equals a,t,g, or c
ggcacgacggcccacctgctggcagccatcccacctccggagatcctcaaccccaccgcctcgctgccaatgctcatctgggactctgtcctggcgccccaagcccagccaattgcctgggcctcccttcggctccaggagagtcccagggtggcagagctgacctccctgtcagatgaggacagtgggaaaggctcccagccccccagcccaccctcaccggctccttcgtccttctcctctacttcagtctcttccttggaggccgaggcctatgctgccttcccaggcttgggccaagtgcccaagcagctggcccagctctctgaggccaaggatctccaggctcgaaaggccttcaactgcaaatactgcaacaaggaatacctcagcctgggtgccctcaagatgcacatccgaagccacacgctgccctgcgtctgcggaacctgcgggaagcttctctaggccctggctgctacaaggccatgtccggacccacactggcgagaacccttctcctgtccccactgcagccgtgccttcgctgaacgctccaacctgcgggccacctccagacccactcagatgtcaagaagtaccaatgccaggcgtgtgctcggaccttctcccgaatgtccctgctccacaagcaccaagagtccggctgctcaggatgtccccgctgaccctcgaggctccctcttcctctccatacctgcccctgcctgacagccttccccagctccagcaggaaggaccccacatccttctcactgccatggaattccctcctgagtgccccacttctggccacatcagccccacaggactttgatgaagaccattttctggttctgtgtcctctgcctgggctctggaagagccttcccgtggccatttctgtggagggagggcagctggcccccagccctgggggattcctgagctggcctgtctgcgtgggtttttgtatccagagctgtttggatacagctgctttgagctacaggacaaaggctgacagactcactgggaagctcccaccccactcaggggaaccccactccctcacaaaccccccccacaagaacctcaggccaccctccacgaggtgtgactaactatgcaataatccaccccccaggtgcagccccagggctgcggaggcggtggcagactagagtctgagatgccccgagcccaggcagctatttcagcctcctgtttggtggggtggcacctgtttcccgggcaatttaacaatgtctgaaaagggactgtgagtaatggctgtcacttgtcgggggcccaagtggggtgctctggtctgaccgatgtgtctcccagaactattctgggggcccgacaggtgggcctgggaggaagatgtttacatttttaaaggtacactggtatttatatttcaaacattttgtatcaaggaaacgttttgtatagttatatgtacagtttattgatattcaataaagcagttaatttatatattaaaaaaaaaaaaaaaaaaaaaaanaaaaaaaaaa

SEQ ID NO: 2619 - DNA, 1225 bp, Homo sapiens
ggcacgagcccgcggcccggctgacggggaagggctcagcaccccgggcacaaagctaggaagggtgggacacagtgaaggtgggaggaggagggggctgggggcaaccaggcgccgtggagctgccgctcgctgccccgggcaggggcacaggcttcatccagtgaatactagagggatcgaacagttgcaaccaaggcaatgtcttactacctcagctcagaaaaccacctggacccagggcccatctacatgcgagaaaatgggcagctgcacatggtcaatctggctctggatggtgtcaggagtagcctgcagaagccaaggcctttcagactgttccccaaaggcttttctgtggagctttgcatgaacagggaagacgacactgcacggaaagagaagactgatcatttcatcttcacatacacccgagaggggaatcttcggtactccgccaaatccctcttcagccttgtcctgggtttcatctccgacaatgtggatcacattgattcccttattggctttcctgagcagattgctgaaaagctgttctctgctgctgaagccagacagaaattcactgagccaggtgcagggctgagggctttacagaaattcactgaggcctatggaagtttggtgctttgctccctgtgtttgcgaaacaggtatctcgtgatttcagaaaagcttgaggagattaagtctttccgggagctgacctgcctggatctttcctgttgcaagcttggagatgagcatgaacttctagaacatctcaccaatgaagccctgtctagtgtaactcagctccacctgaaggataattgtttatctgatgctggggtgcggaagatgacagcaccagttcgagtgatgaaaagaggccttgagaatctaacattattagacttatcatgtaaccctgagatcacagatgcaggcattggatacctcttttcttttaggaaactaaactgcttagatatctctgggacagggctcaaggacatcaaaaccgtcaagcacaagctccagacccacataggccttgttcactccaaagtgcctttgaaggaatttgatcatagtaactgcaagacagagggctgggctgaccagatcgttctgcagtgggagcgtgtgactgcggaagctgtgaagccacgggagacctcggagcctagagcagcagctcagcgcttctatgggaagcggt

SEQ ID NO: 2620 - DNA, 1913 bp, Homo sapiens
ggcacgagcttgtggcagctacactctgtgggaggaagatttgaaatgtatcaaacagcttggattgactcattaccgcttctctctttcctggtcacgtctgttacctgatgggacgacaggtttcatcaaccagaaaggaattgattattacaacaagatcatcgatgatttgttaaaaaatggggttactcccattgtgaccctctaccactttgatttgcctcagactttagaagaccaaggaggttggttgtcagaggcaatcattgaatcctttgacaaatatgctcagttttgcttcagtacctttggggatcgtgtcaagcagtggatcaccataaatgaagctaatgttctttctgtgatgtcatatgacttaggtatgtttcctccgggtatccctcactttgggactggaggttatcaggcagctcataatttgattaaggctcatgccagatcctggcacagctatgattccttatttcgaaaaaagcagaaaggtatggtgtctctatcactttttgcggtctggttggaaccagcagatcccaactcagtgtctgaccaggaagctgctaaaagagccatcactttccatctggatttatttgctaaacccatattcatcgatggtgattatcctgaagttgtcaagtctcagattgcctccatgagtcaaaagcaaggctatccatcatcgaggcttccagaattcactgaagaagagaagaaaatgatcaaaggcactgctgatttttttgctgtgcaatattatacaactcgcttaatcaagtaccaggagaacaagaaaggagaactaggtattctccaggatgcggaaattgaattttttccagatccatcttggaaaaatgtggattggatctacgtggtaccatggggagtatgtaaactactgaaatatattaaggatacatataataaccctgtaatttacatcactgagaatgggtttccccagagtgacccagcgcctcttgatgacactcaacgctgggagtatttcagacaaacatttcaggaactgttcaaagctatccaacttgataaagtcaatcttcaagtatattgtgcatggtctcttctggataactttgagtggaaccagggatacagcagccggtttggtctcttccacgttgattttgaagacccagctagaccccgagtcccttacacatcggccaaggaataagccaagatcatccgaaacaatggccttgaagcacatctgtaggcaagatggctgagaaatacaggagaggcgtctgcttttggaaaggaaatctgctttggtgatgatctttcaggcaatctcaacttacttctttaatcaacatttaatatcaatggatctgtgattaaatgtctgaatatgtaatgcctcgtgaagtatttaataatggcctttatttgtatttggatcaatgaggtttttaaaaaaaatggaagagaaaaccactaaccttgatttttgtattgcaaaatcagatagacctggaaacataaatttaaatccttagacatttttctagaaaaaaatgcaaagtttataaagatgatacaaccatgatttgcaactgtaacaggagaccatttattataagcgtacctgtttgtgaacttaattattctgattccataagctgtttttgcttaggtgatccactgccatgtgatccataatttttctacataaaaaatcaaagttaaaagtcacattatacagttatgcattcatttcaacaaaatagtgaattgataatctacttgttaatatattcggcccatattttgtgtgtttggacaagtacatctcccttttgcctaatgaacttttgaaaaataataaaataatagaataaattaaaaaaaaaaaaaaaaaa

SEQ ID NO: 2621 - DNA, 2192 bp, Homo sapiens
ggcacgaggcaatttgaaggaatttcttttttcataaatttatttactaagaaataacactgaaatttcttctatgggcctggttagcaattttgtaatatttcttgtgtttgtgagtgactttctctttaaaaacaaagtcttatctgagtgttttgatttcccagtaactacaaagtttttgtaagacagttttgagttattttccctcaaatgcaatattgtgttgcatatattttaacaagtataaagatgtggataaaattgataccttttagaaaataaaggaaaacattgtcttttctttgtgattctgtttaacttctcagcattaagtgaaagataaaaatttgagtgatccttttcaatattttccacagggaagagacttccaccttaggatagtgttgcctgaagatttacaactgaagaatgcaaggtgatatggtgtttagttataaacgtgcatttttgcattttggtgggacaggcagtacatttggtataaattgattctagtgactagagttttgcctaaaatgcttattagtcatttgccccaaaagaaacatttctgatttttccaaaccaatgcagcatttgtaaatatttacctgttactaaagtgcttttaaacattagttctctcatttttaaaaaaatatttaaagcagtaaacagccattgtgtacacttcactaacaaatactgaacaggtatataaagggagaacaaaaggattagaaaactttttttccaacttttgactgatattattaatgtgtatattcattatatgagaagagtcacatcagttcagtcctggcttaaattaggtaccaacattgagtgctggtagatacaactagtcaggatatgagactgaaaatttaggtaccaccccaaatctcaattctgcctctaaatatttctggagaagaatggaggaaaaggaatccagagatatttatgagtagaattgagaggattttgtgaccaacagaagtgtagttaagagggaaaaaggaatagaggatgcttttcaaattcccggctcagatctctaagctagagaagaggtcacagatggaaaagtagaagagagattgttttaaggcatatttggtgtgaaataccaagaggagctatttagtaggtagtaatgtagtggtgtggaaatagagtgtgagacctggagtgcagatgtgtgtggaagttacaacagatgaaggatttgagaccttgattatgaatagactttttggtgctgtgtctagcggggtagaagagaaagccagtgacaagaccttggggcgtaccaacatttaaaggactggtcactaaagaggaacttacaaggagactaaggattgaccagagaagaggaaaacttgggcagcagagtctttcaagccaaataaagagaggcttaagcaaggcatggttagcaatgctgaggattacaaagagataggttagatgcaagtaagttttgtgtggtggcagaagccatttgtgttggatgagtgggaggaaagtataaagtattttgaagaaaaagaggtggttagagaatggtatgcattcaagaaggagttatgatgttctttaaagatatatatttgagcaagttaattcattaaggagaaaaaaactagcagaacataaattaaggataccacaataaagggataattaattgaagtcaccaagttggtagcaggggagagaaagcacattttgagcaggggttaccaatggacatttgaatgaactactctgccactaagagaggagatagggatggttatggggatttgaagaccaagaatggagagagttgtgacagtttgaaaaggccatgttggggaaaactcagagaggcttcctacttgtaggtaactaaaagtaattccttagaagagttacttaatagtatcgggagcacaacagaggtcagccagtaagtggatgaacattaacttatcacttcttatacaattaattagaagtatgtatctttctagccaggcttggtggtgggtgtctgtagtcccagctacttgagaggctgaggcgggagggtttcttgagcctaggagttcaggttgcagtcagctattctactgcactccagccagcctgagtgacagagcgagatcctgtctctaaaaaaaaaaaaaaaaaaaaaa

SEQ ID NO: 2622 - DNA, 1385 bp, Homo sapiens
  misc_feature (1347)..(1347): n equals a,t,g, or c
  misc_feature (1353)..(1353): n equals a,t,g, or c
acaaaagctggagctccaccgcggtggcggccgctctagaactagtggatcccccgggctgcaggaattcggcacgagtgtggctgagaatggctcacagcacggccaggtggctgtggtggttgcctcggatgtggacaccagtgcccagctggagatacagcttgtgaacattctctgcaccaaggccggggtcgatgtgggcagcctatgctggggctggttctcagtggcggccaacggctctgtgtacatcaaccagagcaaagccatcgactacgaggcctgtgacctggtcacgctggttgtgcgggcctgtgacctagccacggaccccggcttccaggcctacagcaacaatggaagcctcctcattaccattgaggacgtgaatgacaatgcaccctattttctgcctgagaataagacttttgtgatcatccctgaactcgtgctgcccaaccgggaggtggcttctgtccgggccagagacgatgattcagggaacaatggcgtcatcctgttctccatcctccgagtagacttcatctctaaggacggggccaccatccctttccagggtgtcttctcgatcttcaccgtggaccagagttaccgctcgcggctgcagttctccacaccgaargaggaggtgggcgccaacaggcaggcgcaagtggacagctggaggggccatcctacaccaacgctggcctggacaccacggacctgtgacaggggcccccactcttctggaccccttgaagaggccctaccacaccctaactgcacctgtctccctggagatgaaaatatatgacgctgccctgcctcctgcttttggccaatcacggcagacaggggttggggaaatattttattaccaatgtatactgtgacagtttgtagccaaaaactgcggctggaggggtggggacgggacactgagtggtcacaagggacttgggctcacagcacaggggggacaaggggctggagagggtggcctttaaaagacaactgtggttatagaatgagctctctgtcctgtccccaatacccaagaacaccggtcacccaggatgccagggcccaagagcttctgtgagcccagctgtgacctccagaccttcctgagaccctctggcctttctgtgactctctctcagctgagcccccagggtacttcctgtagctgtctttggcctctctgggaatctcaaacctgtgactcagtgggagaggggatggggctggaaccaggcgggtgggagataggaactggggaaggaccaccaacagcatgcaagagacgccccgkccacggggccaagcctgcgtggagangcttanactcgttctacctcacgtgctgcccgagacct

SEQ ID NO: 2623 - DNA, 556 bp, Homo sapiens
cagccaccatgcctgcctgaaaccttttttaggtaaagttgaattccatccttaaaagtttctgttatatcctatttagccattttctattgtctcccaaagaattcacatcaaaaaaacagctttgaactcccccttcaaaggaaacagtcgactttcataattagcatctaccattatccccaaatcttattttattcattgacttgaaattttttccaattgctttttttttttttttttaaggttaagagcagaggtttactaggccaaagaaagagaatagctctctgttgcagagaggggtcctggagaaatgggttaccccagttgtcttatttaaatggttacccatcagattttaattttatcttctctttgagagcttggtaataagaagcacttaaatcactccaaagaagactttaaaaagggagcagtgaaaaggtcttaataatttattgattgaattaagaaatactagctaattaagaatctgagtctaaacagcacagattttttctttctgcttttaaattgtggttttaaaaaaaag

SEQ ID NO: 2624 - DNA, 789 bp, Homo sapiens
ggcacgagaggacatgtcgctttgcaggaaacaatctggttaagccagaggacccggccatttattggtgggttctggcgctttcaagaatgtgaagaatgagtggccaaagttaacaaaggagcatgcacagggatgggggtcacacccactttgtagagtttaagaatagtaagggacctacgggaacttctcaaggtaataggtggcatgtcttctttccttggcatgacacagaatgtaaagataatgggaggatgaacctccaagcctggaactttgggagaagcttctcctcttggaagtgccagtagcagaaaagttcccaaatagaacagattccttcattccacctgaattcagagagagatccatgtggacacatgtgcctctccatcagagactgctatccagacattcatcttccacctaaaaatgcacttctgctgttgactgcaggccaatgttcccaggataaacagggtgacatccaactgttacttgcctcaacttgcctttggggatcaagaaggaagttcccccgggtgggtggtagaactggaagtagtgtcacaggccatgggctcttttgcatttctcttactgtctctcacttggcctgaatgatttatcacacgatcagttgcaactgccaaagtttgggagcactacattgatgtgaagttctggagacaaaaaggaacacaaacagataaaggtagagaagacaaaagggtgaaagagagggctaacgactgggagaaagagagcagaaaaaaaaaaaaaaaa

SEQ ID NO: 2625 - DNA, 1691 bp, Homo sapiens
ggcacgagcaggcctccaagaaccatgtccccttcagagaggattcctaagcttcctcctcttcctcctcttcttactgcaagggaaatacaagatcagtctggaatgggcttccagattcatacaacctcccccaggacacagattccgagagagagaagaggaaggcaggtttggagcctccaccaccaccagtttccctcacgccctcctctctcccttcccctctttctcaacttcctcctttccctctcttccttctatgatctgtccctgcccctctgtctcctcttcctttccttccttcctcccttttctcctcccttccttagcaggcagcaatgagcaggtggcactgaacttagattccaccatcacaggtgggtagatcttggctcacaagcctgtcattgactagctaagtagccctgattggaggagtcattttatttccctgagcctttgtttctcatctgcaacatggagattttactcaccaccgtggtgcagacaaagtaggacaaagtatcctttaacccagggcttgacacgtgacactcatcaaacattgctgagctctaatctgcatcaggatatggtaagtgtctactgggtgctgggacaaaaggtacagatgggagcaaggcagagatccctaaacagacctctgttggatctttgtgaatacatggtaattatttgtttccaaaaagaggtggaaggagacataaatagcttctaccgccaggcattcaggcaccagctgtgaagccttctgcacattgaaaaactcagagtagcctggtggctggaatgaaaagtcaacaccagttcccccagcaaaatatttctccattcagccttttcggctcattggtttgcctgaaatcagttgtttctccctggggaagcaatctttaaaatggtgaggagagtgtgcatctgatgtgcctgcacttgtgcctgtggaacagggtaggctcagagctccgtgcaggcccatgaagtcccctcagagacaccagtgttgggttgtcatagggtcccagaaaatgcctgtctgcttcgtgagatttaggctgggtgcacagaggtttcacttggtgtgcctgacttatttaggggctgcctgatgttaaagaatcaccacacaaatagacaaacagacattggagcagaagacagggaacagaaagacgctcatatgtatctggataacattgacaggaaaatcaaattgtaatgtcacatacaggagtcttcatgaaggtaagatgtttaaaaacatttttaaaagtataaaacattgtttagaaatatacgcctttgtagtaaatgtgtaaaaacacgcattagaatgatgaacaccaaattccagagaaagggaatggatccctgtggggcacagagtgtgcattaactatgtttatgtctttaaaggaagaaaatatttgaagcagatatggcaaacggagaagattcatgaaagctggatggccggcgcatgagcgtttgcggtgtcatactttgtttccttatgtttgaaatattagcatggctgggcatggtgctcacgcctgtgatcctagcattttgggaggctgaagctgggggaacacttgaggtcaggagttcaagactagcctgggcaacatagtgagacctcatctccaaaaaaaaaaaaaaaaaaa

SEQ ID NO: 2626 - DNA, 2148 bp, Homo sapiens
ggcacgagtcttaatactgttgaaaataatttaccataaatttaagggtttatttctggactctgatttctatttcattggtctgtgtctgtccctatgccattactacattatctttaaaacatttttttacccaatgtcttgattattgtttctttgtagtaagatacagtagggaagtatgagtcccccagcgttgtttttgtttatccacgttctttttctttatcaatattgttttggctatgtggagtcccttgcatttctatataaattttaggaattcagttttaggaatttaggattcagtttgtccatttctgcaaaaaaggcagttggaattttaataggggttgcattgagtctgttgatcagtttagggagtattgctctcttaataatattaagtcttccaagctgggattactggcatgagccactgcaccagcctcttaaagcgcctttaatcaataggttccctgcctcttttcttgtttatcccccctacctcttttttatttgtggaggagactagtcatttgttccccggagcttcccacatgctggattttgctgactgccttcctgtggcaatctgcgtcttcatccccagaatttccaggacacttgtagttaggtctagaagctggacttgattcaggcttaatattttttagtaagtatacttgatagcaggtggtgtacacatccatcaggaggcacacaatgttcagttgtctctcttttatgacacaaacagtcactgatgatcattaactggatctattctttcaataacggtttgtaaaatggtaaaattctatcattccctcttcatctataagctggtatattgattaccttttactctgacctctggctctgcctcccaggtatctccagtatacattcccctagtctaagggaaaggagtttcccaccaacccagccctcacaggaatttgtgcccccagcgacaccccctgccaggcaccagtgggtaccggatgagactgagagtatctgcatggtctgctgcagggagcacttcaccatggtaagcagcatcggtctccactgtcaccctcaggagaagtaaaggagaattctagttcatgagcctgagtttacagtcaccgcctgtccccaggagaatatcggtattttcagaactgccaaatctaagactttgggttcatttttgacctgaccagaatgtattttctggattcagacaggtagtagacaccctcaaacagccataaattctaaaatctttgccattgtcatgagataataaaaaagaggcaggaggagtcaccaggtgtcagtggatcttgtttctggctcccatgtctttgacagtaagactggtgacccagcagtggttatatgcactgactcaggagacagagggcctgggttctaatcctggctctgcctcttaatgacagtgtgactatacactattttggtctcatgtgcctacttgtaaactaaggatgatatattcttaggctcatggagctgttaggattaaatatgataatatgtgtcaccatacttaacgcagtacctgcccagtatgccacatcagctcaacgctgatgaaaacgatggtgatgtaattgctctgtgtctgtttcctcctcatctataaaagaggtgtaatatttctattagaatgaaatgaagcagtactttaaagtcactttgatgcccatccactgtagactggataaagaaaagtggtacctatacaccatggaataccatgcagccataaaaaagaacaagatcatatcttttgcaggaacatggatggaaccagaggtcattatccaaagcaaactaacacaggaatggaaaaccaaataccacatgttctcaattttaagtgagagctaaatactgagaacacatggacagaaaaaggggaacaacagacacggagtgtacttgagacagaggagggtggaaggagggagaagttcagggaagaaaaactgctaggtaccatgcttactacccaggtgacaaaataatctgtacactaaacccctgagtcacgagtttacctatgtaacaaacctgcacatgtgcccctgaacctaaaataaaagttgatttaaaaaaaaaaaaaaaaaa

SEQ ID NO: 2627 - DNA, 1111 bp, Homo sapiens
ggcacgagatcatgttttggttggagataagaaccagggatggcaagtaccagtgtgtacaaatgtatttcacggagtttgaaggaacgcataatcaagagggaaaacaatttgtccttcattggacgtattatttggatttgggtgagcaacaaaatggaatgtggtctgttaggagcattctgtttgttcttttgtccctgatgtgatgaatcattgccacatgctagatggactcttcatatccaggttttgtccctcagggctgagcactgtattaaagagtttttgttgagtcatttaaccttagtgtccacatccagatcagctgtaaaatggggaagacgtgtgctgatttggaatgaatgcaaaatatcactatcattttcctaattacagaggagcaaaggttatcttcagccctttcagttctatgctcacatattcaaatatcaaatgtaatttagctgaagttatttaataatcaagtctttcaatatctgttcaaagaaaaagaacacactttgaaaattctgcaaagctgtctcccagtctttaaaatgtctggaagcactctccttctttacaataccaacatcactggcccagaatcttccctgtgctaggttgtaaatataaataaattacttgttttgtaaacttttgtaaagaatattttggtagaaatacttcaaacatattctttgggttatatttatacatatgtgaaataaatatactatcaaaaggttatattttatacaaaaagtaaattgctaccttttgtatgctaatatgcaaagttttgtataatatgatggtttatttttagctctacacttaaaccataggtggttgagtgggaacttttgaaaactatcaagaggcttgttagacaaatttatattctgaaacctcaataagaaagcattccaggtttcaatccttgttttttgtcctgctcccaaattcttttttaaacccatagttcttgtgtcttatttgattcttctgctgtgcacattgtattggtccttgttgcatgtagtctactgtgtgttttccgattttataaggcagcatttctccatacaaaaaaaaaaaaaaaaaa

SEQ ID NO: 2628 - DNA, 2150 bp, Homo sapiens
gcggacgcgtgggtcgacccacgcgtccggtttgacccgtcggtcgtgcgtgagaggaaagggaaggaggaggtcccgaatagcggtcgccgaaatgttccggtgtggaggcctggcggcgggtgctttgaagcagaagctggtgcccttggtgcggaccgtgtgcgtccgaagcccgaggcagaggaaccggctcccaggcaacttgttccagcgatggcatgttcctctagaactccagatgacaagacaaatggctagctctggtgcatcagggggcaaaatcgataattctgtgttagtccttattgtgggcttatcaacagtaggagctggtgcctatgcctacaagactatgaaagaggatgaaaaaagatacaatgaaagaatttcagggttagggctgacaccagaacagaaacagaaaaaggccgcgttatctgcttcagaaggagaggaagttcctcaagacaaggcgccaagtcatgttcctttcctgctaattggtggaggcacagctgcttttgctgcagccagatccatccgggctcgggatcctggggccagggtactgattgtatctgaagatcctgagctgccgtacatgcgacctcctctttcaaaagaactgtggttttcagatgacccaaatgtcacaaagacactgcgattcaaacagtggaatggaaaagagagaagcatatatttccagccaccttctttctatgtctctgctcaggacctgcctcatattgagaatggtggtgtggctgtcctcactgggaagaaggtagtacagctggatgtgagagacaacatggtgaaacttaatgatggctctcaaataacctatgaaaagtgcttgattgcaacaggaggtactccaagaagtctgtctgccattgatagggctggagcagaggtgaagagtagaacaacgcttttcagaaagattggagactttagaagcttggagaagatttcacgggaagtcaaatcaattacgattatcggtgggggcttccttggtagcgaactggcctgtgctcttggcagaaaggctcgagccttgggcacagaagtgattcaactcttccccgagaaaggaaatatgggaaagatcctccccgaatacctcagcaactggaccatggaaaaagtcagacgagagggggttaaggtgatgcccaatgctattgtgcaatccgttggagtcagcagtggcaagttacttatcaagctgaaagacggcaggaaggtagaaactgaccacatagtggcagctgtgggcctggagcccaatgttgagttggccaagactggtggcctggaaatagactcagattttggtggcttccgggtaaatgcagagctacaagcacgctctaacatctgggtggcaggagatgctgcatgcttctacgatataaagttgggaaggaggcgggtagagcaccatgatcacgctgttgtgagtggaagattggctggagaaaatatgactggagctgctaagccgtactggcatcagtcaatgttctggagtgatttgggccccgatgttggctatgaagctattggtcttgtggacagtagtttgcccacagttggtgtttttgcaaaagcaactgcacaagacaaccccaaatctgccacagagcagtcaggaactggtatccgatcagagagtgagacagagtccgaggcctcagaaattactattcctcccagcaccccggcagttccacaggctcccgtccagggggaggactacggcaaaggtgtcatcttctacctcagggacaaagtggtcgtggggattgtgctatggaacatctttaaccgaatgccaatagcaaggaagatcattaaggacggtgagcagcatgaagatctcaatgaagtagccaaactattcaacattcatgaagactgaagccccacagtggaattggcaaacccactgcagcccctgagaggaggtcgaatgggtaaaggagcatttttttattcagcagactttctctgtgtatgagtgtgaatgatcaagtcctttgtgaatattttcaactatgtaggtaaattcttaatgttcacatagtgaaataaattctgattcttctaaaaaaaaaaaaaaaaaaaaaaaaaaa

SEQ ID NO: 2629 - DNA, 2238 bp, Homo sapiens
ggcacgagccggcwckagcaggccggcttctctgtccaatgcccacccggagctgggaggaggagtctgcgtaatgtgcgtgtgaagagactgggggagctggccggggctcacggtgtttgacccgtcggtcgtgcgtgagaggaaagggaaggaggaggtcccgaatagcggtcgccgaaatgttccggtgtggaggcctggcggcgggtgctttgaagcagaagctggtgcccttggtgcggaccgtgtgcgtccgaagcccgaggcagaggaaccggctcccaggcaacttgttccagcgatggcatgttcctctagaactccagatgacaagacaaatggctagctctggtgcatcagggggcaaaatcgataattctgtgttagtccttattgtgggcttatcaacagtaggagctggtgcctatgcctacaagactatgaaagaggatgaaaaaagatacaatgaaagaatttcagggttagggctgacaccagaacagaaacagaaaaaggccgcgttatctgcttcagaaggagaggaagttcctcaagacaaggcgccaagtcatgttcctttcctgctaattggtggaggcacagctgcttttgctgcagccagatccatccgggctcgggatcctggggccagggtactgattgtatctgaagatcctgagctgccgtacatgcgacctcctctttcaaaagaactgtggttttcagatgacccaaatgtcacaaagacactgcgattcaaacagtggaatggaaaagagagaagcatatatttccagccaccttctttctatgtctctgctcaggacctgcctcatattgagaatggtggtgtggctgtcctcactgggaagaaggtagtacagctggatgtgagagacaacatggtgaaacttaatgatggctctcaaataacctatgaaaagtgcttgattgcaacaggaggtactccaagaagtctgtctgccattgatagggctggagcagaggtgaagagtagaacaacgcttttcagaaagattggagactttagaagcttggagaagatttcacgggaagtcaaatcaattacgattatcggtgggggcttccttggtagcgaactggcctgtgctcttggcagaaaggctcgagccttgggcacagaagtgattcaactcttccccgagaaaggaaatatgggaaagatcctccccgaatacctcagcaactggaccatggaaaaagtcagacgagagggggttaaggtgatgcccaatgctattgtgcaatccgttggagtcagcagtggcaagttacttatcaagctgaaagacggcaggaaggtagaaactgaccacatagtggcagctgtgggcctggagcccaatgttgagttggccaagactggtggcctggaaatagactcagattttggtggcttccgggtaaatgcagagctacaagcacgctctaacatctgggtggcaggagatgctgcatgcttctacgatataaagttgggaaggaggcgggtagagcaccatgatcacgctgttgtgagtggaagattggctggagaaaatatgactggagctgctaagccgtactggcatcagtcaatgttctggagtgatttgggccccgatgttggctatgaagctattggtcttgtggacagtagtttgcccacagttggtgtttttgcaaaagcaactgcacaagacaaccccaaatctgccacagagcagtcaggaactggtatccgatcagagagtgagacagagtccgaggcctcagaaattactattcctcccagcaccccggcagttccacaggctcccgtccagggggaggactacggcaaaggtgtcatcttctacctcagggacaaagtggtcgtggggattgtgctatggaacatctttaaccgaatgccaatagcaaggaagatcattaaggacggtgagcagcatgaagatctcaatgaagtagccaaactattcaacattcatgaagactgaagccccacagtggaattggcaaacccactgcagcccctgagaggaggtcgaatgggtaaaggagcatttttttattcagcagactttctctgtgtatgagtgtgaatgatcaagtcctttgtgaatattttcaactatgtaggtaaattcttaatgttcacatagtgaaataaattctgattcttctaaaaaaaaaaaaaaaaaaaaaaaaaaa

SEQ ID NO: 2630 - DNA, 1750 bp, Homo sapiens
gcttagccctcacttctaagagtctgtaagatattcccacttgaggagcttgtcttcttcaatgctgtatctcagaaattaaactcctccttttctcacgccaaaccatctctcctcctggcttctctcctcttcatggggttgttcatctcccacacactcaggtcagaaaccttgctattgcctcccctctttccacgcccccacttttttctgctcatatcttgcccatcactcaatcctgcagattctttcttcatgcctttcattccttccttcccgtttctatggcccctactctgacccaaatcatattacctaatattgcttcatatttttacccaagagcttcgtcctatctctggttcccttggaagctccccaatgcctgcaggcaaatccagcccccttaaatttaccattcagtgcctcccataatccaacttgatctgctcttctaactaaactttccccatacccaaatgaagccccagccagcctggtgtgctccccagtctctggcaagcctctgctcaagtcctgtgttctgtttggaatgccagccccatgcacttcaccagtcctacttactcctttaaggctcagtcggtgacccacccttttggaggacatctgagctccccatggcagcttctgggcttctttgcatcctgggatctcccagaatctatttttcaacctgatgctacattcctccacagcagggagatgccttttattttgttcttcttccttataccgtcaaattccaaggatagaaaattgcatttccctgggcctgtgaaaagggatccctccctccctgcacactcatgcctggctcacacggagtgaaccagacagcgcttcctcattccccgcagtgggtgtcgcaacagccagttgcaactagaataggggccacatcccgagtctcttgaattcttgccctgtggttaggatgcccttcttgcctgtcctgaaggtggagatttcctacagccgagagagagggagtcagcagtctagggcaggaactccatcatttctttattaaaccactcctaactctctctaatctctgtgagtcttgcctttcccttttctctcctcctcctactgttgagtacaactaggccaggctgaatgagaggagaaagatggggaggaggaaagaagttaggcagccttggcagagggtgcaatgctccgggaaaatgggagagatttacaaggcagagattgacagtttttagtaacttgactttgacctccagtgtacacagacatagccttggctgctggactctgagctttctggccctgggaagctcgagatttgcaaacacttgttcgacaatcacctcgtttatctgcattgtcaccagtgcagcctctgagccctctccctgtctttacttgaccctgtatagaaaaatgctttcagggccaattgcagtgactcatgcctgtaatcccagcactctgggaggccaaggcgggcagatcacctgaagttgggagtttgagaccagcctgaccaacatggagaaaccccatctgtactaaaaataaaaaattagccggatattgtggcgcaggcctgtaatcccagctaccagggaagctgaggcaggagaatggcttgaacccagtaggcggaggttgcagtgagccaagatcatgccattacactccagcctagctgggcaaaagagcaaaacactgtctcaaaaaaaaaaaaaaaaaa

SEQ ID NO: 2631 - DNA, 979 bp, Homo sapiens
ggcacgagctcccgtggagcactcaggaaacgctccttcacccctcaattctgctctcacacaccccgtcacacatagactcacatacaccaagcagagaggagcaaagagaaggaccatgtaagacaatcacggacatggcgttagaaggaaactgagaaacgctctacaagagttcgatgtattacattatttttaatttagatgaaattcacataacacaaaatttaccattttaaagtgtacgtacacttcagtggcttttcatatattcacagtgttgtgcaaccactacccctatctagttcaaaaatattttcagttctcccctcctccagcatctgggaagcatccattcaccttccagctctgtggctttgcaggttctagacatttcatgtaaatgcagtcatataatatgtggctttttgtgtctggcttttttcatttagcataatgttttcaaggtttatccatgttgtaacatgtattcttttaaaaaaaattttaatgtgtaaaatatacatatcataacatttaccttttaatcattcataagtacacaaatcagtggcatgaggtggtcccttcccaatgttgtgctgtcatcaccactgtctgttttcagaactttgtcatcatcatccccaacagaaaccctgtacccattaaacagtaactcccggccagacgcggtgctcacgcctgtaatcccagtaattccagcactttgggaggccgaggtgggcggatcacaaggtcaggagatcgagcccatcctggccaacacggtgaaaccccgtctctactaaaaatacaaaaaattagccgggcatggtggcgcacgcctgtagtcccagctactcgggaggctgaggcaggagaattgcttgaacccaagaagtggagattgcagtgagccaagatcacgccactgcactccaacctgggtgacagagtaagactgtccaaaaaaaaa

SEQ ID NO: 2632 - DNA, 2367 bp, Homo sapiens
gtcgctgtcaggatcatgccctgtggcacagcacaggtggtgggaggtggttttctgactgagatgttgcctgatggatggaaagaartgtatttttaagttcaaaaagcattatcctgtggcattgcctggacatccactccctgacagcccagagcagcactgtctggcttcccttcatgcttgtggctttgttgtgtttgatcagaattttgggggaaatggaaagttttcctcaaggagcagctgggggcagaataggtagtatttaagcaaatacttaagtccaagcaaatcatccccattaaaaagcttttcctgtaggctagtaggatttctaaatagatgaattcaacagacttggtccccatagtccaagagtatgtatgtgaagaaagtgagcatgattcaacagtttcactctcagggattttaggatggcaaaatacttcacagaaactcaatgattaagttcccttccacacttccagagcttgaatgaacacaggtagccacctaaattgagcagtattgcaactcagagagaaaatcatctgaatagtaggacaagctcagaaggtacattgtgactgagggcttaaaaggagaccaaaacatggccccatcagggaagcttcttaatgcttggggggccagctaggtagggttgcttccaaaagctggagcccacccctgcctaggggttgtcagagagccacacctgcaggggaacaggtacctccgagggtgagagtcgtggtctctgggagttgttttctcacctctggcttagaagggtcaggcagaaaccacaggatgtggggtcacactcactgtcccaagtttgggaacctgaaaaagtctccattcagaacatggttgttctccctgtcccatgctatcttatcttcctaaatgactaatgaggaagcgggtgttctttttctgcactttgattcgccatctgggttctgtagggtgctctgaaggtgtgatctgccttctggctgatgtggaggaagagcaagcgccttcccaggccacagctgctcacctctcggcagatattttaggcaagcatccgtgtgtcttcccatcttcaggagaaaggtaaatgcaccctaagtgttcacttctggacctttttcaagttcacttgggactgtgtgacagaagggagttggagggaggatgggaatatttttaacactttgttttcctgtgcagaaacataataccagttttcgcagaaatgtgtctcaatctgtgactaccaaagccctcctcagtccttccctcagagggacacatttgctgtttctcccgcaagcagatgttgtggatgaggcgatagactccttggcaagaacgaaaggtgtgatgaaacctccctgctcggaagggtctccgtggaggtgtcctcatttcacatgctgggttttgcaagcgaggaagccaggcagtggaggaactagagagaggcaggcgtgtgtgtggacaagcgctggagccgcagccctcagactggcacgggaacgccagcgttgggtgttcagattccacgcgtatgtctgggctcactcacagcatggccgagtgtctgcagtgctggtcctgacccttccagagcagcagtggacagatgagataagactgtttcagaaacaaagatggccacagccttcctaacaagcaggtcatctggccatgtctgtattgtaactggtaaaaggcttcaagtcagattgatgatcaagaaaagtcaaaaccccagcccaagattgggaaagcaggtggtggttccaagcttttaaaaaattattgaagctctccatcctgttctgtgagtgtgtcttctctttctccttcacgtcatagccgtgacccaccgttcatctctgctcttgcgtaaagatgaccgatggagtccaaagccaagtggcttcaccagctgacaagccaccctcctgcagcctgagtttcacagtccactgggttcgttgtcatgcggtgtttgaatggttaagcccttgcagtatttcagatcgggcaaaaaatatcggatgcacatagcagaaccattggtggtatttatagctttgctttgtactcctcactgtttctgcctacgcaaaatatccatgtttcctctgagaaatctgttgtggactgaaagcgctgctggctgtgaaatttaataaagtgtgtatgctttgctagaaaattatttcttggacaataggaacagtcattgatctgtaaatcctggctcttaacagtgagtggccaaggacttgatcagcccatttcttggtccctcagtgctttaaaatttaagtagcactgcattttgtaatgttgaatatg

SEQ ID NO: 2633 - DNA, 1092 bp, Homo sapiens
aaatttagccctggagctaatgggtaactctacattgaaattccactccatttcaagttcaggaaagtaaattgagtaatgsagagcaaatacaccgtccagagaggtgccgccaacccggagtgccagacagagagggtttcaggttacatttgctcaggacagagatggcacgtggccctttacatgaacaatcgttgttatattttattttgtgctgtttttaggccttttgaaaacatggagcctggtgtctgtttacagcagcctcatgtcagtggagtcaaagctcaatggccagctctgtgaaatttcaccaggrttttaattattttggstaactaccttgaaacttccaagcccttttatgacaattgacttaatttacatgaccactggcctggttgggaggcagtgttaagtgaaagacttcaacggtgcttctgtaaaatatattttccatcattcaaaaatgataaatggtaatttcagaacataagrtwagcaagrggwgcaaaaaaaagggggtatcaytaacaatatcttctgtggaaataacgtaaaacttaaattttgattyctgkttkgkattttcatatattttatagagagatatgkatatatattcttttagcctgtcacccaggctggagtgcactggwgtgatcatagctcactgcagactcctgagctcaagcgattctctctgcctcagcctcgcgaatagctgggactaccggcacccaccacacctggctaatttttttaaaaaaatttggcctggcacggtggctaaagcctgtaatcccagcactttgggaggccgaggcaggcggatcacgaggtcaggagttcgagaccagcctggccggcatggtgaaaccctgtctctactaaaaatacaaaaattggctgggcgtggtggtacgtgcctgtggtcccagctactggggaggctgaggcgggagggcaggagaatggcttgaacccaggaggcggaggttgcagtgagccgagatcgtgccactgcactccagcctgggtgacagagcaggacaccatctcaaaaaaaaaaaaaaaaaaaaactcgag

SEQ ID NO: 2634 - DNA, 954 bp, Homo sapiens
ggcacgagggaatattctctatcttcttcaccaacgagtaagacgttttggaataatgggactctacaaaggccttgaagccaaactgctgcagacagtcctcactgctgctctcatgttccttgtttatgagaaactgacagctgccaccttcacagttatggggctgaagcgtgcacaccaacactgagacgccttcccatgaaaaattccgaagatgctcaagagggaggtttcctcctgagtgaagagaagtgattctcccttgactctggctcctgccaccacaaatgttaccctcattggcttgaaaagcatccaagggtgcacagggagtatggccaactggacctgttgtcaccttaattgtcatgctggctggttggattttggggtggcagttggactaatgtgaaaaaaacattgctgaaaacctaaaaatgaaagtttgtgagtgtttattggttttcttaagagaaatggactattttgctctcatgtgtaatgttttctatttaaatctttcttaaatataccagctgttctctttccctgaactctcccccaggttctaggacaaatttaataacatgtaattctcctcaaatacttttgtatgtctcagtgttggtgttttcctccctaaaactaacattagggctgtgccacgggcatgactttatttttgttgggctttttttccctgcttaaggagaggtgtcttttttggatatgagctatttattttgtgaaatgaaaattgttcacccaaatgattctcttataaactatttgtaaatgtcacttattcattagtgtttgacataatttttagaatatttattttgaatcaatcctttcattacgaaagacttgaagttttgtgtccatccttacaagccctggtcagtcaagtcccaataaatggtcagcacaaaaaaaaaaaaaaaaaaa

SEQ ID NO: 2635 - DNA, 541 bp, Homo sapiens
ggaattcggcacgagaaattcttgaagtctggtgatgctgccattgttgatatggttcctggcaagcccatgtgtgttgagagcttctcagactatccacctttgggtcgctttgctgttcgtgatatgagacagacagttgcggtgggtgtcatcaaagcagtggacaagaaggctgctggagctggcaaggtcaccaagtctgcccagaaagctcagaaggctaaatgaatattatccctaatacctgccaccccactcttaatcagtggtggaagaacggtctcagaactgtttgtttcaattggccatttaagtttagtagtaaaagactggttaatgataacaatgcatcgtaaaaccttcagaaggaaaggagaatgttttgtggaccactttggttttcttttttgcgtgtggcagttttaagttattagtttttaaaatcagtactttttaatggaaacaacttgaccaaaaatttgtcacagaattttgagacccattaaaaaagttaaatgagaaaaaaaaaaaaaaaaaa

SEQ ID NO: 2636 - DNA, 1142 bp, Homo sapiens
ggcacgagtcacaagctgccgctttagattctcccaaaaagtctccccgagggggctgaggagcccccgtagccctcggggcatctcagctggcagccccagcgtttccttccccatccctgtcctacagattcatgctggtcctggccagcaatctgcctgaacagttcgactgtgccatcaacagccgcattgacgtgatggtccacttcgacctgccgcagcaggaggagcgggagcgcctggtgagactgcattttgacaactgtgttcttaagccggccacagaaggaaaacggcgcctgaagctggcccagtttgactacgggaggaagtgctcggaggtcgctcggctgacggagggcatgtcgggccgggagatcgctcagctggccgtgtcctggcaggccacggcatatgcctccaaggacggggtcctcactgaggccatgatggacgcctgtgtgcaagatgctgtccagcagtaccgacagaaaatgcgctggctgaaagcggaggggcctgggcgcggggtcgacaccccctatccggagtccaaggcgagacctcacctcatggagcctggccacggacccctcctacccctgccttgccggcccctgcacatttaggatatgctcctggatggggactgggctgtgcccagggcctctgtcccccaggatgtcttgtggtggcggtcggcgttctgccccccagggcacccctgttgtaggcactggctagggaggggcaggcctccttcctgcccctcgagacactcttgggagatgcattttccgtctggctcacagggggagggtgaggctttgtaccccagcccctgcccaggccactgtgagggtgggtgctggctgagcccctggggcagaaggagtggggcaggcggggtctttgttctcggctcccacagcagagccaggtgagggggggcctgccaggactagacagaagtggggcggcctgaaccctgcttccagccatggccaggggccacggaacccggcaggggtgtctgaggccgccctgtcagctggccggtccaagcctgtggctggagctggtgtgtgtttatctaataaagtcccacaggtgcctcaaaaaaaaaaaaaaaaaaaaaa

SEQ ID NO: 2637 - DNA, 1452 bp, Homo sapiens
  misc_feature (1352)..(1352): n equals a,t,g, or c
  misc_feature (1399)..(1399): n equals a,t,g, or c
  misc_feature (1415)..(1415): n equals a,t,g, or c
  misc_feature (1426)..(1426): n equals a,t,g, or c
cattaagttttactgaccaaaaaggtggaaaaaagaacctaaattttcttccacaaagcagccgtttctattcaaatggaaattcagtaccagagaataaatgtctatgtagtcatactgaatttagatagataagggctacagcatactaaatcgacaaccaaatttgtcatgtgactaaaccgttacttcagatgaagcttacattactgttttctgcttgtgtattttctgtagagtacttttacacagattggtaaagttcaggtttcagagaactgcttttgtgcagaaaatttaggttcttttttccacctttttggtcagtaaaacttaatgaaaaaagcaaagaaaaaaatattctgaacaaagctatagggttttaagttcagcctcccaacttagtcatcctaacatgattattttgtgatttggggtgcttgccctggtgctgttccagtccatgtgcatcctgagctgtgtgatctgcctcgaggctatgatctgagcaagcaggagataacattttcttctgcatcaagtgaggaaaaatgtgcttttggccatgtctcaaagacaggaccaacttcagattcccaaagaagccagctacagagcctctggaacactatggtcttacaagcagtactaaaatcaaccctcagcctcttcaatgccaaaggtatccctattggttgagaaccacatggtaatttttaatgggacttttatcagcaaatggagttacaggaattctctgtaatgagtgattctgaagaggtactttcctggaataattgtctacctgaagaaaaaaaatttatatatacattgtgtgtgtgtgtaatacacacacacacaaccccctatacctggaagattgtcagcatgtaaatcaggaacaactttctccttattgacaatcccataataaaactcaggaaccaaggcaaaatgaattggcttctaggggtctgaaccttactgcccatacaagtgttgattcattttaatgctgtttatgatttctgcattggcagaaattttcatactttctatgtttttttaattactcagttttttattactaaaaatagcacatttgagtacatttgaaaagtagaaaaattagaaattattaactttattgaataagcaagaagtgcatcctaatcctttgattattaatgaggttgaatatttgtgtgctatcggtagctgtgtttctttgatcagatgttcctgtccttttgcccttctgttatctgttggagttgctttgtttttcgtatcaagttataggatctctttatataataaatgtaatttaacttgcatttgcttggcatttnatttcttccctcaatctgttgtaggtttacaaagggcaacgctgttncagttaattttgaggnccaaattgtcnttttttttttttgaggacggggtctt

SEQ ID NO: 2638 - DNA, 1452 bp, Homo sapiens; identical to SEQ ID NO: 2637
  misc_feature (1352)..(1352): n equals a,t,g, or c
  misc_feature (1399)..(1399): n equals a,t,g, or c
  misc_feature (1415)..(1415): n equals a,t,g, or c
  misc_feature (1426)..(1426): n equals a,t,g, or c

SEQ ID NO: 2639 - DNA, 1452 bp, Homo sapiens; identical to SEQ ID NO: 2637
  misc_feature (1352)..(1352): n equals a,t,g, or c
  misc_feature (1399)..(1399): n equals a,t,g, or c
  misc_feature (1415)..(1415): n equals a,t,g, or c
  misc_feature (1426)..(1426): n equals a,t,g, or c

SEQ ID NO: 2640 - DNA, 1452 bp, Homo sapiens; identical to SEQ ID NO: 2637
  misc_feature (1352)..(1352): n equals a,t,g, or c
  misc_feature (1399)..(1399): n equals a,t,g, or c
  misc_feature (1415)..(1415): n equals a,t,g, or c
  misc_feature (1426)..(1426): n equals a,t,g, or c

SEQ ID NO: 2641 - DNA, 1195 bp, Homo sapiens
ggcacgagcttacagtgtcagtgagttgtgttctctctgttcctctttagagataggctggaggcatgtatagcttggcttccataatgcagataaaaaaatatttttccctaagtgttttccttgccttagtgtcttcttgctgtttctgcctggacttggagagattacaactatcgaattgagaataccagaagcaacacaagttgtaacttagagacacagagcttacgtggctgcaaatactttgtagtgtaagcgctgacatacctcagttttggagccaaagagtcacttttggtcacttctagaggtgtgatcttaggcaatttgctcaacctctctatgcttcggtttcctcatctgaaagatgaagatcataaaagtaaccatcccacagggttatcatgagaatcaataaaagaatctatgtggagtgcattgcataggaccagctccacaatgctctatatttcattatgtcccctgcacttacaaaagatgacggactgttcggatggcacaaatacaaactatcacttccaggacttaggtccatggctctcaaccctaaagagcatttataaaactactaaggccttagccttacctcagaccagttaaattacaattactggagaacagggcctaggcctcaatatatttcttaagctccacaggtgattctcaagagcaaccaagattgagaactgctgatgcattggactctgttggttgtgtctttaggacctaatagcaatcatccagttgtgtgcttggtccgcaggggattctgctaagactgtcaggccatacagggtgtgggcctagttctgggagaatggttttcaatttgactcacacctggggctggtaaatcttcagtgggtgcatcacagagtagggcaacaaggctccctgagagttgagagaagggagtgggagcaaataggaggtaacccccctattccttaattttaaaaatgaaaaatcagagagctaagagtttggagttctaaggtaaagtccaaactggggcacatactcccacttgggtaaaaagaaggaaccaacctgcaaatcagaccaaaaccgcagatgcgcagctgggaaactagacacgaactcatcatatccaacactgaaagatagctcagatttctcttgcatggccttcaaagcaggagatggttct

SEQ ID NO: 2642 - DNA, 542 bp, Homo sapiens
gagattgcccaagccggtctcaaactcctgagctcaagtgatcctctgcctcagcctccagagtatctgggattacatatgtcggctaccgtgtctggccgttcacatctttggccactatttgcttgtgaaaaggtataatgaggtggtacttatcatttttactgtgtctcatgttttgtatatttttgtttcatcaactaagatgcactgtaacatctctgaaatctggatatattatcaatggtttatcatagttttgttagcaatacactgtcttttagtggtgcctaaaataatggtatagttgtgaggtgatcttagatttgatgaagcacagtatgcaggtaggcctaatgggggaagatggtaatataaaagcaagaagtattttttttttgtaatgactgaaagctgttctgtggatgacctaccctttcctttaaacacgattctctcacttccaactccaaacttgctcaactaatccttaaaaataaacttgagctggaatttgaaaaaaaaaaaaaaaaaaaaaaaaa

SEQ ID NO: 2643 - DNA, 549 bp, Homo sapiens
ggcacgagccaaagtctgcatctggatttgggggtgttttttggcatggcaccctcacctctctccctgcctgttttccccaaagtggaaaggaaggcctttcaaaccagagtgtctcactcccctctgacctccagaccagatggggcatgagccagccagctcagccaggctccctgtgtcctgggaggaagtgtccccatcccccatgccccttatggggagggagggcgtctgatgctctctctctgcctcccccccatcctgtcaggcacaggtgacgggggcagcccatgcgagcccttctcctgctgctctgggagggccagttccacattgagccagcctggtcccatggaaaatgatggcctgggctttctgaggccttatctgatgcctctgcagttcatgtcccccaccaggcctcgaggctcagggtgggagagggccccgggctgccctgtcactcctctaacacttccctcccctgtccccaacatgccctgtaataaaattagagaagactaaaaaaaaaaaaaaaaaaaaaaa

SEQ ID NO: 2644 - DNA, 1707 bp, Homo sapiens
ggcacgaggaccattctgtgaaagtagcagaatgtgaggagcacgcgtgagcttatgtaccgtgaagatgatcagaggatatcttattttaagagtaaaaacccacataattttatttctgcttgatagtcatggtagtctgtcatacccacctctgggactctgcgtggctgtttggctgtcacttgtagcaataacgacattagttctagtcagtgctgttttacatttttcttttgatgggtttagtcttgccctggagtgccgatgatgattctccctccagagccacgcttgggaacatgaagcaagtctggcgtgtgggctgcgtgccggccttagtgggacccgtggggttggagcatgcctttaggggcagtgtctgggccgaagcacgtcccaccacacagtgccagagccagagaaggggccccaccaccaaggccaagcttgaccaggtcagcattgccatggcccagtgtgccccgtggcctctgaagatccctctgtgcagggtctgcagggatctggattgcaagggcccaagtctgcaggtctggaagcatcttcctataagagcactttcgccttctgggtcaggactccaaggtgcagcgggcttcacagccctacaattgggttctcagctaagccccagagttctggtagaaccatcccggggcgggtggagggtgggatttaagggagacgggaacacatggggcaggtcctggaacttggtggcctgaggactgaggccattgccctggtggaaaggcctggcctggttcctgtggcttgggacctgaataggcaggtgctgctggctccgtagaaacccttttcccatcttttgctctttgccaaacctaccttgctttgggagctgcctgcaccaccccagagaaggccccaccttcttcatccctcagacccgaggaggcctcccagtaaggagtttcccaagaggggactcacaggaaacaagtcttagtgcttgggagggaggccccgctgcgtgctcagactcacagccaacctggaaggtagacgagatagcgccacccacgcccctccacaccccagactccgagtaaagcgggcggtagggccggagtcacctcccctatggcagtggccgccgctgtactccatcctcccgtcaggaagatcagctgtaaataaacgctgggctccccagagcacctgtccgcccactgcccttgctgttctgggatcttcgctgcagttcacgggaaacaagcctgagtccgctcgcacccgcggctgctctcccggctcggcccggccgcctctgtctccggccaccgggtggcgctgccgagccagagccgccgcgtcccggcgctttccaggagccccaggcccggaggaggcgaagcccgcagagcaaaggtggaaacacgtgcctacgctgtaaagaaatcctgttccagagcatacctgttgtacaaacagacactgttcctaacgagaggagtgacgtattttcatcaccgtttttaatttgttttcttacgggtttacgattttgaatttttcttatttggttgaaagaattttgattctatcagcctgagtgagttcagcctgtaaaaaggatgttaagctgtgggtaaaatatgcaaacgaaaagaaatatattgtacaaattctatataataaggtaaaaaaaaaaaaaaaaaa

SEQ ID NO: 2645 - DNA, 1159 bp, Homo sapiens
gtgctatcctactatgctgttctttggtaatggaataaattgacccaaggaccgaatttcatttggatttcaaattgtccagagtggaaaagccttcaagatgacatgatgaattactcagttcatctgatttctggtccctcctttctcgacaactataatactaacccttttctcaggataactgtctacacctggcagttttctctgacgtgctgttcactcacatccctaccttgcatggtaatataaaggactaggaagcagtcatacttccaggaaatgcttggattcatgtggacattcaggaagcttattctcatataatactaatctaaacagtactagaaattacagtgccaagagccaccaggaggcccagccaataagcatagatactatatggtatcatgggacccatctattttttaccagtggactacaggattacttgagagttatcagggctgcctaacagaccaggagatctgggggttgcaccagggaatcgccatatttgaccagcatgttttaaaagctcttggtaggattagttggttctaaggatccctctagggacctcattatttcaagaggaacccaaagtccagcctcctacatagatgctgccccacgaaggacccacaaaactaacctagttcagggttctcaggcaggcagttctgcttcagcttagagcagaacccataaaatactcaagtactgggataggcaagcatgtgtgtttactgtggattggtccctgaaggctcctttgggtgagaacatgtgaaccaggcaccctggtttgtttggagcattgctgcccagaagcttctatgggataggtggtgcttgggattgatgtgttgtggccatgcagccctccctgaggattgacttctgcactaatccagtgaaggaggctgtgtcaaaagaagggctcagaagccctcttttcagaggcaatgattcctgtcagtatgaggtcccttagttactaaaaagggacatgatttaactccagtttgatgaacctcctccgagtttactttattgtcttcaaatcttttgttttcttcctttttgtgagatttgtgggttttgtgccttataaatggaaatgtatgaacacaaaaaaaaaaaaaaaaaactcgag

SEQ ID NO: 2646 - DNA, 960 bp, Homo sapiens
ggttttccaaagacttccaactgttccagtcctctttttgatttttttctataatgtaaacaactaattcagagtctgtgaaaatttgccttgaaacccattaaaatgaatttattgtttccaaaaatattaattagacaagctctgaatatgaacaataccattgaatagcttctaaaagaatgagtattttcagatgttttaaattaccttttgtctttgaagctttccttattttccttgcgatatcctattttctcttttgtgacaaaaaaattagacaaacatgttgaaaattggttataattcctaccatcacatgctatttcagatagtgactaataaacacattacatcactgtaatgtctttcccatgtagtcctgactgttcttgatagaacagattcaccatccagatcttatctatgcattgatccctcaataaaggaataacccaagatgaagttggcagtgggtatacacacagctatgtcacaccaaacttgaaatactttttagaagttttaaatgctgataaacaaactcttaggacaaatcacwaatgagcatggaattcccatcttcttcagatttattcatcataaatggttttcacagattttatcataaaaacataatcttctctttcattcatagtttataattcacatgatttattcacattaaccagctgtgattggagaatcaggarrarctttgagtcccatattttataaatgcttctgagaagtaccatagttaatgcccctttcaaataaataattttggatggttgtggtggctcatacttgtaatcccagcactttgagaggccaaggcaggaggatcccatgggcccaggagggcaaggctgcagtgagccatgatcagagcactgcattccagcctgggcgacagagcaagagcctgtctcaaaaaaaaaaaaaaaaaaactcgag

SEQ ID NO: 2647 - DNA, 1065 bp, Homo sapiens
gcccacgcgtccgcccacgcgtccgcccacgcgtccgctttttaaaaaatatctgaaaaaagcttcatatctttacaaactcataaaatagctgattgggccatggaggagatgaggctgtttagaactggttttgtttcaagtttgtcaattttccctgtatgagaacttgggtaaagcacaaagaaacatacagtgctagtaacaggtctcctgcgccctggaactaagtgtttggaggaaggactaaaccccgggggaggtgagtataaaataattccactaagatcacctcctcagtccccagaaggctgatggtggatcctctggccatctcctgtggggtcttactgctcctctgccatttctctatgcctgaagacacgaagatgatatcaaggcagagctaccatatcgcagccagtctctaggctactgctgtgcagtggctcccactttctaatgcttttttgtttttgctttttctaacaaaacaatcttttttcaaaatgaattccaacccctgctagcttccttccccgcctccatactgttttaggcagcaccgtttatgtgatagagtccgtgtttctcaaatgcatggtgttcctcaggtggagagtgggcagaagtttttgcaacactttttttttaagttattgggtgcaaaatcccaaaccaggatatgtgtatgtctgtgtgtttatgttttttatttgaccctcccctctttcaacctacccccttttatatctaatgtagaaaaagcgaaattgaatctggaaagcaaactgttgtatatagttgcggtaacaatcatgaagagagagccgggctgtcccctcagtaattcattttaaataacaaattatttaaaaataaaattcatgccagagccagctgaagaggccttccttcatcaccactgaggccacccccaatctgggccctctgtccatctggcatgtctcctcccagcaagattcatctgttcaatgccatttgcgtttcaataaagttatctcctgtactgtcaaaaaaaaaaaaaaaaaaaaaaaaaaaaaa

SEQ ID NO: 2648 - DNA, 2631 bp, Homo sapiens
  misc_feature (2619)..(2619): n equals a,t,g, or c
ggcagagccacagtgatagaatacgtgaagccctcagacctcaaaaaggacatgaacgagaccttcagggagaagttcccccatgtcaaactgacgctgagcaaaatcaggagcttaaagcgkgagatgcggagcctgtcggaggagtgcagcctggagcccgtgacggtggccatggcctacgtgtactttgagaagctggtcctgcagggcaagctcagcaaacagaaccgcaagctgtgcgctggcgcctgcgtgctgctggctgccaagatcagcagtgacctgcgcaagagcggcgtgaagcagctcatcgataagttagaagaaaggtttcgattcaacaggcgcgacctgatagggtttgagttcacagtkctcgtggccttggagctggccctgtatcttcccgagaaccaagtgttacctcattacaggcgcctcacccagcagttctagcagaggccccacagaaggctcagggcaccgaggtgcacttgccggcctgggaggtgtcccactgaagccccgcgcctcctcctgccagcacccccagcacctgctagcaggaggcacctggcctycgctggtgcagctttcctttttgcctctttgccatttccttggaaagagacgtcgctttcatccccaagtgcaccgtccctccgaggggatttctgagaattctcctgcatttttacataaactaaatgkgaggtttgttactggtatttttttcacgtgcctgagaccagcctggtaccaggaccttttgttcacagcgtgcagcagcgagccggctgcagtgygtctcccctggcctcgccttctgcaaaccaccgcagccaccacagcgtcagggtggagatctgggtttctagacctcactgaacacactgaaatggctgagtttaacttatttaggcattcatcttggagatgtggtttttcgggttccccagcagcatctcccgacaccaactgtgccgctggctccctgccacctgaagccgagctcctccagagctttctccgcccacctcactgcatcccaagtggagcttttggtgtccagttaggccagcgggagcagtctcctgatttattttgatctcattcttggactcttggacctctctgttcttcaagcatcgtgtcactgtgaaatcctaacgcccctgtgtcctacagaccgacggcacaacagacagctgcccatcccatgccatgctctaccctctgcctctcaccaggagacactctgggcctccaggacaattgctgcttgccggctcttatttttctaagcaatattgtgatggagaaaaataacatatttattgggatttggttttttgggtcttttttttttaagggaacaaaaaatggttaaatgaggtctgctgaagttgacttgaaaacacactkgaccctcaggcaggagggcactgaccacaccccacacaacctcaaagggtcagtgcgtcagtgccttttcttctgaggcaggaaacaggtgccatcttggccacctcggccagggcagcccaccatgctaaaaggaccccaaatggtggtcgttgtcccttctgtgcaggccagcagggccccatctctagtttttccacgtctgtctgaagttcttgcaacaaattctgcatggtccagcgctccagctagctgcctcatcaaaaacactgaataaccaaggactgctgagtttttcttcatggggggtcagctggtctcaaaactggccactgcctcagccaccaagctttttcctaccactaccttataaacctgcctggccctggaggggytctgggacgactttgtctctagcccattaatacaatacatcctatgctttctgtgcagactggtgcttccgcagaaaggagatgccaattctgctatcacagaactccaccagcaactccacccgaccccagcagtggtgcaggacagctgccagcacccacctggccctcctccttttccacagccactcactggggccaccaaaacccagagatggcaggtgtgtgggacagactggaggatgaggacaaaccaaagcctttgttctttcttattgtggagcgtccccttccatcaagcagcctgccctcaagccaaggatcatcccctggaacccagtatgcacccagaggggactcarcttcaaagctgctccaccatgctgggtcccaggcagctttcctctgaaaagcaacctctcctgccacccagatcccatctcaagagctcgcccatgttacgagcatgtaaaggactgacttcctagtaactgttgcagtttacaacctgccctccagggacacgtctccatggttttttctacacatgaatgcgagaaatggctgataagcacagtaatttaagattgcgtattcatgtagtgagatttagtcattaaccaacccggtctttgtgatgtgtgaagccttcccttcagttatgtcccatttttatgatgccaaaagctgccactgtgtggtattcgaggattattgcaacaaagccagtagttaaaccaaaaaaaaaaaaaaaaaactcgagggggggcccggtacccaattcgccagagagtgncaatggcatcaa

SEQ ID NO: 2649 - DNA, 1879 bp, Homo sapiens
ggcacgaggtgggttttgccctagatcttccccctcgtaggcgagatgaagacatgttatatagtcctgaacttgcccagcgaggtcatgatgatgatgtttctagcaccagtgaagatgatggctatcctgaggacatggatcaagataagcatgatgacagtactgatgacagtgacaccgacaaatcagatggagaaagtgacggggatgaatttgtgcaccgtgataatggtgagagagacaacaatgaagaaaagaagtcaggtctgagtgtacggtttgcagatatgcctggaaaatcaaggaagaaaaagaagaacatgaaggaactgactcctcttcaagccatgatgcttcgtatggcaggtcaagaaatccctgaggagggacgggaagtagaggaattttcagaggacgatgatgaagatgattctgatgactctgaagcagaaaagcaatcacaaaagcagcataaagaggaatcccattctgatggcacatccactgcttcttcacagcagcaggctccgcgcagtctgttcctccttctcagatacaagcacctcccatgccaggaccaccacctcttggaccaccacctgctccaccattacggcctcctgggccacctacaggccttcctcctggtccacctccaggagctcctccattcctgagaccacctggaatgccaggactccgagggcccttaccccgacttttacctccaggaccaccaccaggccgaccccctggccctcccccaggtccacctccaggtctgcctcctggtccccctcctcgtggacccccaccaaggctacctccccctgcacctccaggtattcctccacctcgtcctggcatgatgcgcccacctttggtgcctccccttggacctgccccccctgggctgttcccaccagctcccttgccaaaccctggggttttaagtgccccacccaacttgattcagcgacccaaggcggatgatacaagtgcagccaccattgagaagaaagccacagcaaccatcagtgccaagccacagatcactaatcccaaggcagagattactcgatttgtgcccactgcactgagagtacgtcgggagaataaaggggctactgctgctccccaaagaaagtcagaggatgattctgctgtgcctcttgccaaagcagcacccaaatctggtccttctgttcctgtctcagtacaaactaaggatgatgtctatgaggctttcatgaaagagatggaagggctactgtgacagcttttgatgccagaaaaggcttctgttcacaacagtggcccatggagaaagaggctcttattaaacttagatgaaagagctgcttccattgtcagggtattttctaatttcagttcaaggaatatcctaaaatttagccttgttcagaatttactgcacataaaaaagggtatttcatccagaatagatcagttattgaagcagtgctgctaacatccattccctttcataccaccattttcaccctgtttcttcccctcctccagttctttggaaatttgtgatcgggggatcttagttgcttatttgttttgactcttgtgtgctgtgggcactggagtagagatttctggagaaaaaaaaacagtttatttcatcttgccttttgtgtttgagttatttttaatattttcctgtaaatattttgtaatattttacttgtaatgaaatggatcacaatgtcatttcctaatacaaggcaggatatgtgggaagaatatgtacaattatttgattaaaattatttcccactgacctaaactttcagtgatttgtgggaaaaataaataaatgttctacaccaagaaaaaaaaaaaa

SEQ ID NO: 2650 - DNA, 1631 bp, Homo sapiens
ggtttgcatctgtctttctgtggaaggtctgttgcatattcatctaggaacttggtaaatgtctgatgataagcatttgattttttcctagttgattcctcaaataataataatgattaccctttaatctgaatgctcacaggtgtacttctatctcatattctatgcgcagtcatctgttaagctaatggctaattgtaccagagggtctcaactttgtttctttgatctgcattggtttatggtggtaccttgcccattcttggcacagcaggtggataaaaacaatgagtaacattgagaaaggctaatgtgtcttattgacagtagtggtataatgtttccaaacccaattgaattattttggtttcttaaaatcttttcccgatagcccatttattttaatgttctgaatttccaagatctgtgtataggttcaatgattagtttttactgaagacttatctatggactgagtgtgtattataaaactagtgacataagtttaaaacttattcctttttcattttccaagtaaacttttttagtaatgtgtttttctttgtaaagacaggcagtatatgatttaggtctggatctggtttccagtcttggctccatcatgtattggttatttggccttgaacacaaatgacttgccttgaacacaaatgacttatatctgtgagattcaatagcttcatcagtaaaatggggatagtagtagtactgaattttcatgattataatgaaaattaattgagagactgatctggagaggtgccatactacaaagaggattaagtggaggtgtccctattaaatggcgagatacccagaaacattaccctgttgactccagtatgctggcaacgaggctttatagtctttgggaaggagactggaagattcttctctgggaaaaatgtacacatactgacctttgaaggacccccagtaatcagccaggtcttacctgatcatcctatagtgaagccccccgacacagtatttccattcatagtttagctcttaaatgtgaattagctatccagcaatcaccagacacttgaggaaagcctccagaaaacaaattggaaaaaggggcaagtcataggaaacagacaaaacaaggaacagaagaaaacatcatttttgcaatctataatattcacaagtttgttttttgagacagagtctcatttgtcacccaggcaggagtgcagtggtgccatctcggctcactccagcctcaaactccttggctcagcgatctgctcacctcaggctcccaggtacctgggacgacaggcatttgccaccacacccggctaattttggtatttttgttgagatgaggtttcgccatgttacctagacaagtctcaaactcctgggctcaagtgatctgtccatctcagcctcccaaagtgctgggattacaggtgtgagccaccggcctcagagatctaaaacaagatattgtattttaattgcacaggatgcaattaaaaaagaaaacattcagaaaacaagaagagctcttagaactgaaaaataagttagtgtaaaggttggaagataaaattgatactaacctgaaaagtattagaaaaaaaaaaaaaaaaaaa

SEQ ID NO: 2651 - DNA, 3382 bp, Homo sapiens
  misc_feature (18)..(18): n equals a,t,g, or c
  misc_feature (2320)..(2320): n equals a,t,g, or c
ggacaaaatgaagagttnccttgtacatgcccactatgtacctcagacagagggagctgtgttagtacaactgaagggatccaacttgcaaaagaactaggagcaacctatcttgaactccacagccttgatgacttctacataggaaagtattttggaggagtgttggagtattttatgattcaagccttaaatcagaagacaagtgaaaaaatgaagaaaagaaaaatgagcaactcctttcatggaattagaccacctcaacttgaacaaccagaaaaaatgcctgtcttaaaggctgaagcgtcacattataactctgacttaaataacttgctgttctgctgccagtgtgtggacgtggtattttacaaccccratttaaagaaagttgtagaggcccacaagatcgttctctgcgctgtaagccatgttttcatgctgcttttcaatgtgaagagtcccactgacattcaggattccagtatcatccgaactacccaggatctttttgctataaacagagatactgcatttccaggtgctagccatgaatcttcaggcaacccaccattacgagtcattgttaaagacgccctcttctgttcttgtttatcagacatccttcgcttcatttattcaggtgcttttcagtgggaagaattggaagaagatatcaggaagaagttgaaagattctggggatgtttcaaatgtaatcgagaaagttaaatgcattttaaaaacaccaggaaagattaattgcctaaggaattgcaaaacctatcaagccagaaaacctttgtggttttataacacttccctcaagtttttccttaataagccgatgcttgccgatgttgtcttcgaaattcaaggtacgacagtgccagcccacagggcmwtcctggtggccgttgtgaagtgatggcagccatgtttaatggtaattacatggaagcaaagagtgtcctgattcccgtttatggtgtttccaaagagactttcttgtcatttttagaatacctgtacacagactcctgctgcccagctggcatattccaggccatgtgtctcctgatctgtgccgagatgtaccaagtgtccagactgcagcacatctgtgagctgttcatcattacccagctgcagagcatgccaagcagggaactggcatccatgaaccttgatatagttgacctgcttaaaaaggccaagtttcaccactctgattgcctttcaacctggctacttcatttcattgctactaactacctcatcttcagtcaaaagcctgaatttcaggatctttcagtggaagaacgcagttttgttgaaaagcacagatggccgtcgaatatgtacttgaagcagcttgcggaatacaggaagtatattcactcccggaaatgtcgttgcttagtaatgtaacctggagcttttatacactacatttcttttttattattatgaagaatgggatacctccaggttccagtaaaattcttctgaccgaaaccaatgtgggtgttagaaaaattaccatatagcttaatatgtttattagttctctttggaaaaaaactaccactgtggtcttaaaagggarcaaaatataccataggctaaaactaaggctttcactctagaatgcaaagctgttttgcagctgttttcccttaaagatgtcctgttgctttagtgatatttagacccctctcagttaagaaatgcttagattaaaaaaaaaaaattacgtaggattaatacagaaatttaatcatgtctgattaattgctctattaaaataaggggcatttaaagacccagcataaccatttgtataatgagaaatctaggggaaaaccaatcagtccaacatgagattttaggaatagaaatttgccggccatttggaaagtgaaatgccacttagttctcaattgatgacagtgtttgaatcatcataaaaaaaatacctgcttttcatctggacaacccaattgagccactttatctccttttggcaatctgagtaggcggggaacctaggcagggctggctttcttagcgtgtaacttgtgtagcagcacagggcccacacttagaaggaccccacacttggttcaaggctctgctatagcggaaattcttaataatgtttgaagaagggccccatgatttcattttgtgctgagccctcaaaattatgtctgtttcgtggtgggaaatatcctatgttttcttgctcaaacacctttctctctgaaagcagaaaaaggcactgatataaagggaagagaaggaggctcaccggaggnaagagaacatagtgaagattcccgcctttggggaggtctggaccacccagggcctccactgccaccttggctggcaagggagaaatgtgttgtgttgtcttagctttaaaacagtgcacagttcttgctctatcatagatgaacaaatactttcttgatcattctgtaagaccaggaggttggtaagagtgactaaccagcctaactttaatacacatgtataaagatgttcacagagaaagatgctctgtagagaatttgctaccgaagttggctcaagaatttgtttttagtgttatttaccaagattaggacgtcagtggcttaaattctttgaattcttttcaaggactgcaagattatttgataaagagtagcatgaatcttgtgctctaatattacacagtaagttcaaagaaaggatgtaagtcaaagacttgttacatagagggaaaatggactgggatagaggacagactgatagtttctttctttcatatcacatgtatagagaaataattatatcagaaactcacaaacctagacatggaaaaacagattactgtctattgtcagcatcattttcatctgtaagtcactactggaatatatttttcttttaatttccagtgactttagaatacacacagtttttccgacttttcaaaaatttgattaaatggttttatagtataatattgggaccccataccgttagcccttgtatgtataccaacactgccaaagtaaaacattaggtcaggcatggtggctcaggcctgtaatcccagcattttgggaggctgaggcaagtggataacttgaggtcatgagttcgaaaccagcctggccaaaacagtgaaaccccgtctctactaaaaatacaaaattagccagatgtggtggcgcacacctgtaatcccagctactcaggaagctgaggcaggaaaatcgcttgaacctgggaggtggaagttgcagtgagccgagatcgcaccactgcactccagcctgggtgacaagagcgaaactccatctcaaaaaaaaaaaaaaaaactcgta

SEQ ID NO: 2652 - DNA, 1408 bp, Homo sapiens
ggcacgagccctcgagtccactgttatttccttcactttcaataggctgtcattaaattctccttccccattatcagtgccactgcttcttctcttccatgttcacagtcttacttttagagctgtttagtcatcctacctatgctggtttctccatagcctttgaattctgtgtttgatacttttgaacagaacatctaaaagctccctttctgtattccaacactcatagggtgattctcattaagaaaacaaaaccaaaaattgagctcagactaaaggaattcttttttgactaaatagtgattaagttatgatattcctgttggcctaagaacaatgcctatgatttagttgtgttatgtatatttgtacttataaccaaacaatcgattgggtacaagtagccttagggcaatacttccttaaaaacatgtttctgataaactaaagctttagcattaaccagaagtcataatttaatagtattgtaaaaatacctcatttattttaaatcctgtgttgggtagaggattacagttgtcatttcaaatacatgaatctcttgtcaaaagagtactttgacagtttcatggtaagaccccttcatatactacctcaaggagtgagatttttattgtgcatgttgtttggatgtatggggttggagaggtaggttgagcctaaaatttcctaattactttactcttttacgtgtttcttattgcaaaggcaagaaattgttttcaagtttgtcattactaataacaaagagatctttttgttttttggcagtggtgaggatgagattgatggagttgctgctttagcttattggaggtgtggatcattttattttttgtgtttgaccggtcaagtgacttagtgagaagggggaagtagtagaacaaggagttccatctgtaactgtgaacagtcaattgtgataactcactacctttagaccagtcaataattattttaaagcctgggattatacaatatttgttaactatggtatcaatttgtaacttaaattcatctcaattctttgtcctaagcagctctcagtttcattttttttgtttgctgtagaagaaaatattaagccaggctgggcacggtgctcacgcctgtaatcccagcactttgggaggccgaggcaggcggatcacgaggtcaagagattgagaccatcctggccaacatggtgaaaaccggtctctactaaaatacaaaaattagttgggtgtggtggcgcacgcctgtagtcccagctactcgggaggctgaggcaggagagtggcgtgaacctgggaggcggaggttgcagtgagccgagatggcgccactgcactccagcctggcgacagagtgagactctgtctaaaaaaaaaaaaaaaaaaaa

SEQ ID NO: 2653 - DNA, 583 bp, Homo sapiens
cacgagcaggaactcaaatgcttccacatctccctctctctggttctcttttatgcctctcatgttccgtccgttcattctcttgctctacagattggcttcctccatctgatagtggaacatggttgtcaaaactcacaaatttcacatcttgcaacattcaccatcagtgaggtgtttacttactttgagtttgaaaaattgagggaaaggctctgagtggccttgcatgggttagatgcccatctctggaccaatcagctatggccaggggtacaatctttaagaatataggctgggcacggtggctcatgcctacaatcccaacactttgggaggctgaggtgggaggatcgcttgagttcaggagttcgagaccagcctggccaacataggaaaaccccgactctactaaaaacacacacacaaatgagctgggcatggtggtgcatgcctgtaggaggctgaggcaggagagtcacttgaacctgggaggcagaagttgtattgagctgagattgcaccactgtactccagcctggataacagagtgaaactccatctcaaaaaaaaaaaaaaaaaa

SEQ ID NO: 2654 - DNA, 570 bp, Homo sapiens
ggcacgagctgcacatctcggcagagcgggcgctgaccctaccggccatgatggggctggcggcggggggtgggctcctgctgctggccatcacagccgtgctggtggcctacaagcgcaagactcaggacgcggaccgtaccctcaagcgtctgcagctgcagatggacaacctggagtcccgtgtggccctggagtgcaaggaagcttttgcagagctgcagacggacatcaatgagctgactaaccacatggacgaggtgcagatccccttcctggactaccggacttacgccgtgcgcgtgctcttcccgggcatcgaggcccacccggtgctcaaggagctggatacgccacccaacgtggagaaggccctgcgcctcttcgggcagctgctgcacagccgcgcgttcgtgcttaccttcatccacacgctggaggcccagaagcagcttctccatgcgcgaccgcggcaccgtggcctcgctcaccatggtggccctgcagagccggctcgactatgccacggggctgctcaagcaactgctggccgacctcatcgagaagaac

SEQ ID NO: 2655 - DNA, 2369 bp, Homo sapiens
ggcacgagcttggaatagggcatggcacatggtgacctcccagggccttaagcagtgacagtggggagtgatatactcctatcctttctcgcccttctcaatgaagccagtttctctgattagcttgtcaatattgagcctttggggtatcttggttgcatttttagttacagagtgcgcttgcagaaccctctcttctccttggccgctggcagctgttctctgctctccctgcctctgtcgtgcttggcctcctcagcaagcctgttggctgtgggcgtccccagtactccgtctgcatgcacactccttggggagtctcagccacctgggttctggccccacctccaagctggtgaacctgggtctccacccagtggccaggtgccttctgccggacgcctttgcctgcctgtcccacactggctcctcctccaaggctccttgactgttggtggcagcaccatctgacctagagctggagtctttttccttggggagggggcgtcccttgcccttagtgatgttgatttctgccagtgggctgctgccgtcattcctgtcaccacaggttctgcatgggctttggctgacatcctcccctccagcctggccaatttcaccaggcccctccatgcttcttggaaattctcctttgctgcttgttttagctttaaggaaagccccgatgtctcaacctgaccatcagggttcctggtgactgtggtctctccttgtccacccacttccaatcataaaactggcttccccagctctggtgcaggcccttcaaattcatgggcagaggttgtaggcagacatgcattgcctttccctgcagtaagattttgaaccccatctgctttgaggctttggggttactgggcaaatatacccatccctgcctgtcagactgtacctaggaattttggagagcaaagaaaatccttgtttctttatggaaaaaggaattgatgtgagctgtgcttgggttgaagctgcttttatgtggagaatgcaggcttccgcaacacccaacatagcccaccctgcatcctgtttcccctcagcagccctcccttcagctccaggctacatggagccctctgcttgtttttaatttacaaacttacgtgatattcaccaggtaccaccttacacgttagctcacttgattctcatgaccaccctgtgaggtgggtactcttatccccattttacggatgaagaaactgaggcacaaggtggttaatatttggagttgccctctggctccagcatctgttctggcaccatgtgctttcctcttggccatgtccctcctgtgccttcttgaactggcccttaactctcatgtccacatgctcagccccagggctggggctctaagggagaggcccctggcagctgttcttctcttccaggattgtggctgcacggctcaacggttcccttgatttcttctccttggagacccacactgccctcagccccctgcagtttagagggaccccagggcggggcagttcccctgcctctccagtgtacagcagcagcgacacagtggcctgtcacctgacccacacagtgccctgtgcacaccaaaaacccatcacagccctgaaagccgctgctgggcgcttggtgactgggagccaagaccacacactgagagtgttccgtctggaggactcgtgctgcctcttcacccttcagggccactcaggggccatcacgaccgtgtacattgaccagaccatggtgctggccagtggaggacaagatggggccatctgcctgtgggatgtactgactggcagccgggtcagccatgtgtttgctcaccgtggggatgtcacctcccttacctgtaccacctcctgtgtcatcagcagtggcctggatgacctcatcagcatctgggaccgcagcacaggcatcaagttctactccattcagcaggacctgggctgtggtgcaagcttgggtgtcatctcagacaacctgctggtgactggcggccagggctgtgtctccttttgggacctaaactacggggacctgttacagacagtctacctggggaagaacagtgaggcccagcctgcccgccagatcctggtgctggacaacgctgccattgtctgcaactttggcagtgagctcagcctggtgtatgtgccctctgtgctggagaagctggactgagcgcagggcctccttgcccaggcaggaggctggggtgctgtgtgggggccaatgcactgaacctggacttgggggaaagagccgagtatcttccagccgctgcctcctgactgtaataatattaaacttttttaaaaaaccataaaaaaaaaaaaaaaaaa

SEQ ID NO: 2656 - DNA, 1936 bp, Homo sapiens
aacagaggaggcatacaatgacttcaggcaaagcagaaccttttgactcacacaacattatattattttgtcagctttatattttatgaaacatttttactatgagtgaggcaagagaaagaaaaaggaagagacagcatttggttatattacatcatttctaaaatctaatttcctggagtgagaatgacactaagggtacctacgagaacattccttcccatgtwaactaatagtgtaataaatactcatatagttactagttttagttgccaaacctagtttgtaaatggtaaatttgagaccagaactatattcttatgactatcagaccactgatagtttcactaagtcaactcccttcactaacaatttgattctacacacacacacacacacacacacacaccagtttcaacaattttctcataagctttaaatcaaattgatgagagaactttccctgtttttctgtcataaactacattatctgataaagttcatactatttttacatacatagattatttaacatactttgcctctcttgctgcagagaactttgcttaagatatacagctgatctattctaatttcatgattatctatttatatttatttgttgttattgttgcttgaacactagttttcgagcagttttagagatgataccacttttacactgtttttctctctaattttagttccttatggttcctggtataaacatgtaaaatcttggtgggaaaagggaaagagtccacgtgtactatttcttttctacgaagacctgaaagaggatatcagaaaagaggtgataaaattgatacatttcctggaaaggaagccatcagaggagcttgtggacaggattatacatcatacttcgttccaagagatgaagaacaatccatccacaaattacacaacactgccagacgaaattatgaaccagaaattgtcgcccttcatgagaaagggaattacaggagactggaaaaatcactttacagtagccctgaatgaaaaatttgataaacattatgagcagcaaatgaaggaatctacactgaagtttcgaactgagatctaagaaggtctttctttacttaacatatctgatattaaagatttcttttcattattctccactttttcttattttagattgctagaaaagacataatcatggattatgttgacattttctttttaaatttttgtttaacttttttttttttttttttgagacagagtctcactctgttgcctaggctggaggacagtggcacaatcatggctgattgcagccttgacctccttgactcaattgatcctcccatctcagcctcccaagtagctaggactacagacatgtgcaaccatgtttggctaatttttttaatgkttttttgtagagatgaggtcttattatattgkccaggctggtcttgaattcctgggctcaagcttcccaagtagctgcaacaacaggcacacaccaccatgctcaactaattttatttctattttttgtatagacaggggcttgctatagtgtccaggctggtctgaaacccttgagctcaagtgatcttcccacaccagcctcccaaaatactgggattacaggcttgagcctccatgcctggcccaggtaacatgtttattgagctgtacatgcatatgagaaataagaaacttttttttcctactatcatctcttaaattttgttttctttttcttttgcttcctcttcttcttttctattttttataaatatcatgcacaactataacctatgggaatgatgtagtaacacagattattcatcttgttagagttgtattaaaaataaacaagcatttcaaattaaaaaaaaaaaaaaaaaaaaaaaaaaaaaaaaaaaaaaactcgaagagaactagtctcgag

SEQ ID NO: 2657 - DNA, 1879 bp, Homo sapiens
ggcacgagcagtatggctgctgcatttcggccctcgaatcgagttctcctgcaggcgctgcagattttggtgtatcctggggtgggaggctccggctctgtcagctgccgctgccctctcggagctaaaagatacctacttacagataatgtggtgaaattaaaagaatttcaacaaaagaaagtggctgttgcatgtaatctttctggcactaaagaaacgtattttagaaacttgaaaaagaaactgacccagaacaagctcatcttgaagggggagttgataaccttactacatttgtgtgagtctcgggaccatgtggaactggctaaaaatgtcatttacaggtaccatgcagagaacaaaaatttcactttgggggagtataaatttggaccgctttttgtgaggttgtgttacgagttggatctcgaggaatctgcagtggagctcatgaaagaccagcatttacgaggtttcttctcagactccacatcattcaatattttgatggatatgttatttatcaaaggcaaatataaaagtgctttgcaagtattgatagagatgaaaaaccaagatgtgaagttcaccaaagatacctatgttcttgcttttgcaatttgctacaaactgaatagccctgagtctttcaaaatctgtactacattaagagaagaagctctactcaaaggagaaattctctccaggagagcatcctgtttcgctgtggcattagctctgaatcagaatgagatggcaaaagctgtgtccattttttctcaaatcatgaatccagaaagcatagcctgcattaatttaaatctggccaaagtgagggaaaaagtgaaggatgtgcctgcccttgtggccaaatttgatgagatctatgggacactgcacatcactggccaggtcaccactgattctttggatgctgtgctctgccacacccccagggacaggaaatctcacacgttgctattaaacaagaggatggtcagccgtcgcaccttccagccactcagccagtccctgttggctgagtaaccctggtttcagtccacctatggatctgaggggcctgcttctagtgagttattacctttcctaagaagccaggtatcgcacttcagcagacagtgtgctgacacttggtcttctcctgaaattcccaaattcactgaatggtaccatgccgatctctgagaagttatgttgcaccactgtgaaggtctagatgcaagcttggctccctcagaaaggcgcttcccttttgcatggctgaggatccttgaaggaacctggtcagtctccggttcagcttccgacaccagagtggaacccagtaagcaccatcaggaatgaatttcactacaagtgtggataactctgattttcaaaggagtagttacttgcaaattacatccttgctgaattcaggaggtatgaaaccctattttaccatgttagaaaacagcccaggattttctcattgctctgccatcatatatgtctatgacttgagcccttatttttccatctgcaaaacaataatgcctatgtgtctttgcatatagatttgaaatcttcattcaaggtttagtaggatcatattttctcaaaaataagagaaataaggttcataagcaaacttgctgggattgtggttgttttgttttctcagcagcacaaacaaaaccagaatttagcctttaggactgctgagtaagccaaatttaaatgactactgctttgttcatgggtaagccatgtgcttttcaaaataagtgccactaaaaaccacataatgctttggtttctatgtggataataaatatttagtcctatagtttaaaaaaaaaaaaaaaaaaaaaaa

SEQ ID NO: 2658 - DNA, 1089 bp, Homo sapiens
  misc_feature (3)..(3): n equals a,t,g, or c
  misc_feature (8)..(8): n equals a,t,g, or c
  misc_feature (585)..(585): n equals a,t,g, or c
  misc_feature (1071)..(1071): n equals a,t,g, or c
  misc_feature (1075)..(1075): n equals a,t,g, or c
  misc_feature (1079)..(1080): n equals a,t,g, or c
  misc_feature (1086)..(1086): n equals a,t,g, or c
tangtggntccccaggggtgcaggaattsggcacgagctttgaaggaagcagaattgaagatgggaagttcattgggactgtgtcttggaaaagcaccaagttcgtctcagttgttcctgttttttgcaatggggagtgacgttcaacctgggacagaaatggaaatcgtagtagaagaaacaatatctgtgagagattgtttaaagttaatgctgaagaaatctggcctacaaggagatgcctggcatttacgaaaaatggattggtgctatgaagctggagagcctttatgtgaagaagatgcaacactgaaagaacttctgatatgttctggagatactttgcttttaattgaaggacaacttcctcctctgggttcctgaaggtgcccatctggtggtaccagcttcagggtccctcaggacactgggagagtcatcaggaccagaccaactgtacttcgtcttggggcagaktttggagagccayttccagccaagktgcttctgggaacgagcctgcgcaagtttctctcctctacttggggagacatagagatctcagaagatgccacgctggcggantgaagtctcaggccatgaccttgcctcctttcctggagttcggtgtcccgtccccagcccacctcagagcctggacggtggagaggaagcgcccaggcaggcttttacgaactgaccggcagccactcagggaatataaactaggacggagaattgagatctgcttagagccccttcagaaaggcgaaaacttgggcccccaggacgtgctgctgaggacacaggtgcgcatccctggtgagaggacctatgcccctgccctggacctggtgtggaacgcggcccagggtgggactgccggctccctgaggcagagagttgccgatttctatcgtcttcccgtggagaagattgaaattgccaaatactttcccgaaaagttcgagtggcttccgatatctagctggaaccaacaaataaccaagaggaaaaaaaaaaaaaaaaaactcgaggggggcccggacccaattcgccctatagtgagcngatncaanngcgccnatt

SEQ ID NO: 2659 - DNA, 2957 bp, Homo sapiens
tgggaccgctgtgtagtagggggctacctctctccaaagacagtcgcagatacatttgagaaggtagtggctggctccatcaattggccagccatagggtccctcttggactatgtgatmcgcccggccccacccccagaagccctcacactggaggtgcagtatgagcgtgacaaacatctcttcattgacttcctgccatcagtgaccctcggtgacacagtcttggtggccaaaccacaccggctagcccagtatgacaacctgtggcggctgagcctgcgtcccgcggagacggcacgcctgcgggctctggaccaggctgactcgggctgccgatctctgtgcctcaagatcctcaaggccatatgcaagtccaccccggctctgggccacctcactgccagccagctaaccaatgtcatcctccacttggcccaggaggaggctgactggtctccggatatgctggccgaccgtttcctgcaggccttgaggggacttatcagctacttagaggctggagtcctgcccagtgccctaaaccccaaggtgaacttatttgcagagctcacccctgaagaaatagacgaattaggatacactctgtattgctcattgtctgagccagaggtgctgctgcagacgtagggcaggtgaaggccaaagcgggtgttggtggtcaggccctggattctccgttagatacacttggctacctagttggtgcctcacagggttcctgctgcctggtgtcttgctgatcatcaccctggtcacttcatgctgattagaatgacatctctttcgtctcctattttgttacccaactcttcctatttttgttaccaatcactgtgctctctgccgccccctggctccaggctaatttttctggaatgaattgagaaggtggcgtgctggcctgagctgatggaccacttggtgttttgcgttttggcccatgtttgctgcctctatctggtctgccttgcccgtttgcctgttcctattcagtgtcttttctattttttcctctctcgttcatgccttctgttttgctcttgtccctggagcatatctgcctaattaagatgttgccttttagttgaatgccactgaagagctgtgatagcatgtttcaaagctgaactctacagagcgagtgctgagacagtatttagggtttctgggagtgaggctggtagaagagttggcctttgaccacggttcctggagtagaagtccatcctccccccaacctcctgacccattcataaatgctgagaatgtctctcatgggaacactgttaatgacccacacaggataagctgaatgcaaagttatttgcaggttgaatttcttggtggctattagcagaagtgcagagtagggaaccagagctggttaagggcctagtgaagggtttgtgtgcccagtgtctgctcgtcatctgtggctgcaggggtcagacagacaaggatggggactgccagggcaccacttcatcatgaatgctggttttcacaccttttccttattttattgccaatcaggacaaggccttgaaggaacgcagccttagacatcaggtgaggatgatggaggtagacagtcgactgaatgtcagctggaaaatccagtcactagttggggtttggtggccatgttttctacccagacaggccctgcttttctaggatgtggccttagagcaagaacagacccaacagccagcccttcatcctccagcgtctgccataggaatgtgagaggggtgtttgctgagcgctccgggcacggccagagggcaagtgagcatgcacggacctcttccccctgtcctgtttctcacccagcacctggggagatcggtgctaccaaggaagagagcacacagataagacagaggggaggaggtgggcatttcctacattcctccttgtttgccgctgctgagattgcagtatttattgcaatgtaaatgtatcctgaaggtggggaggaatgtttaatctaccatgtccgtgtgtcatcttggtttgtgtttttccctgtttgtagcaagactctgatgataattctgtttctcatctgcccattcagtattttgttttccttccgtcaagttgtcttattttttcaatgactacctctccatcattgaggttctggtgaagctctctgcagctgtctcattccttcccaacgatagtaacaggaaatgactctttagcatcgatacctcaacatcaatttagggtagagattcctgcccctcttttgtcacagattaggaaattgagaactagggttaaccttgactatatttagaggtctttttgcctcttttccccttaacaaggatttcttatggtggtttcagtttcatttgcataaaggtattgagagggaacaaaaaacataaagctgagaatcttgagagagctcatctaccctgtctgttggtcagactcaaatgagagttaaaaaaaaaaaaaaaaaatctktatgcctgagtaccatcctggatgaatctagaaggtatggggtagagcttgacagggttcctgtgtacccactgggtatccgttagaggtaagggagaggagaggattgatagagtgttgcaaaagtatagattattcattgagataaaggatttggtttccctgccatgagtattaaaaaaatttaagttttcccaagcttgcatctctgaccaaatttcacataaaacattggaaggaggctgggtgcggtggctcatgcttgtaatcccagcactgggaagctaaggcgggtggwtcacttgaggtcaggagttcgagaccagcctggccaacatggtgaaaccccgtctccacgaaaaagataaaaataagctgggcgtggtggcaggcgcctataatcccagctactcgggaggctgaggcaggagaataacttaaacccg

SEQ ID NO: 2660 - DNA, 1419 bp, Homo sapiens
ggcacgagctcgtgccgaatagacattgtaaatcttaatatttatgtatgtattttattattaccggttttccatttatgatggtaatattgtttcttctaagaatatttatttttccttctaaatattgagataaaattcatgcttttgaaatgttctattcagtggcttttagtatatttgctatgttgtgcaaccatcgacactatccatttctagaactttttcgtcatcccagacagacgctctgtattcataaaaaaataacttcctacctgtctctccccctagtctttggtaacctttgttatactggtaaactttgttggctctgtgtctgtgtggaatttggcctattctagggcctcatataagtgtaatcatcagattgcttttgggtctgtctgattcactagcgggttttcaggttcattcatgtgcagcatatacagtactgcgtcctttttctggctgaataatattccactgtatggatagaccccattttgtttattcacacatcatttggacatttggattatttctggtttttggctattatgaacaatggtgctatgaacagttgcgtacaagtttttgtgtgaacatatgttttcaattctctcattatatacctaggagtagaattactgggtcatatggtaactgtatatttttgaggaactgccaaactattttcccacgtccatgcaccatttcacattcccaccagtaagtaagagggttccaatttctgcgcattcttgccaacactagttattatctgactttctggttataatcattctaatgagtgtgaagtagcctctggtgtcatttggatttgcatttctctgatgagtgatgctatcaagcacctttgctggtgctgttggccatatgtgtatgttccctggagaagtgtctgtgctgagccttggcccactttttaattaggcgtttgtctttttattactgagttgtaagagttctttatatattctggattctagacccttatcagatacatggtttgcaaatattttctcccattctgtgggttgtgttttcactttatcgataatgtccttagacatataataaatttgtattttaaaagtgacttgatttggctgtgcaaggtggctcacgcttgtaatcccagcactttgggagactgaggtgggtggatcatatgaggaggctaggagttcgaggtcagcctggccagcatagcgaaaacttgtctctactaaaaatacaaaaattagtcaggcatggtggtgcacgtctgtaataccagcttctcaggaggctgaggcacgaggatcacttgaacccaggaggaggaggttgcagtgagctgagatcatgccagggcaacagaatgagactttgtttaaaaaaaaaaaaaaaaaa

SEQ ID NO: 2661 - DNA, 2043 bp, Homo sapiens
ggcacgagcagccctcggccccatccctacgaccagcccttccgtcctgcccaccccggcagcgactggtgttcctgaagacacataaatccgggagcagctctgtgctgagcctgcttcaccgctatggggaccagcacgggctgcgcttcgccctccctgcccgctaccagtttggctacccaaagctcttccaggcctctagggtaaaaggctaccgcccacagggtggaggcacccagctccccttccacatcctctgtcaccacatgaggttcaacctgaaagaggtacttcaggtcatgccttctgacagcttctttttttccattgtccgagacccagcggctctggctcgctctgccttctcctactataaatccacctcatcagccttccgcaagtcaccatctttggctgccttcctggccaatcctcgaggcttctacaggcctggggcccgtggggaccactacgctcgcaacttactatggtttgactttggcctgccctttcccccagagaagagggccaagagagggaatattcatccccccagagaccccaaccccccacagctgcaggtcttgccttctggtgctggccctcgagcccaaaccctcaatcccaatgccctcatccatcctgtttccactgttactgatcatcgcagccagatatcaagccctgcctctttcgatttggggtcttcatccttcatccagtggggtctggcatggctggactctgtctttgacctggtcatggtggctgagtacttcgatgagtcattggttctgctggcagatgccctgtgctggggtctagatgacgtggtgggcttcatgcacaatgcccaggctggacataagcagggcctcagcactgtcagcaacagtggactgactgcggaggaccggcagctgactgcacgggcccgagcctggaacaacctggactgggctctctatgtccacttcaaccgcagtctctgggcacggatagagaaatacggccagggccggctgcagacagctgtggccgagctccgggctcgccgagaggccctagcgaaacattgtctggtagggggtgaggcttctgaccccaaatacatcactgatcgccggttccgccccttccagtttgggtcagctaaggttttgggctatatacttcggagtggattgagcccccaagaccaagaggaatgtgagcgcctagctacccctgagctccagtacaaggacaagctggatgccaagcagttcccccctaccgtctcactgcccctcaagacttcaaggccactctccccataaacatcagactacagatttaggtggaagagcagccatgtttgaagggcacatgtgatgagtggggggcagcaagatgccatttctgcatctcccagaagggatgagtctttgtcccaaatgcaagccccctcttcgctgggctcccagcagtgcttccctcctccaccctccactcattttgttctttccccccaacttttttttttttttgaaacggagtcttgctctgtcccccaggctggagtgcagtggcatgatctcggctcactgcaacctctgcctcccaggttcaagcgattctcctgcctcagcctccagagtagctaggattacagatacgtgccaccatacccggctaatttttatatttttagagacagggattcaacatgttggttaggctggtcttgaactcctcacctcaggtgatccacatgactctgcctcccaaagtgctgccattacaggcgtgagccactaggcctgacctccccttcccctttcctgccccaaggcagatccacatcaccgaagctccctagaggggcaaaagatggagtgagccacaggaagtttggggcgtggtgagttggaatgatacgtccatttctctatgaaatatttgctactagactgttcatttctctctgacatgtttgttgaatgaataaataatttgaaacttcaaaaaaaaaaaaaaaaaaaaaaaaaaaaaaaaaaa

SEQ ID NO: 2662 - DNA, 1484 bp, Homo sapiens
ggcacgagaaaattttaaaatatctattgaattttattattttttgacatcccttggtcatggggtttctgtcgtaaatctgttatatggtgagctgctttactggagtggactcaacgtggttattgtatattgtcttttttgtattttttattgatatagttgtacatatttttaggatacacatggtattttgatatctgtatgcaaggtgtgatgaccaaatcaaggaatttgggatattcatcacctcaaacatttattttttgttgagaacattagaatctctagctcttttggaacatacgataaattatgctaactgtaatcttcctgctgtcaaatactagaacttattccttctaattgtatttttgtacccattaaccaacttctcctcatcctgccctgccttcccttctcagcttctgggaatcaccattgtaccctctacctccatgagatccatgtttttgactcccaccttggcctcccaaagtgctggaattatatgcgtgagtcaccacgcttggcccaaaaacaatctttttgaaaaaactggggtaaaattcacatgacaaaatttgccatcttaatcatttttaagtgtatagtttagtagcactaagtatattcacattgttgtgtaacagagatccaaaacttcctcattttgcaaatctgaaactctgtacttattaaacagcttccacagtccctggtaatcaatcaccattctaactttgtttctgtcaatttgtctatttttgatacctcatataagttggagtcaaatagtatttgttttgtgactggcttattttacttagcacagtgtcctcaaggttcatccatgttataacatgtgacaagattttcttcttttttaaggctgaataatattgcattgaatgtatatagcacattttatttatctgccagtggacatttgggtttgctttctcctcttggcaattgtaaatagtgctgatgtcaacatgagtgtgcaaacatctcctcaaaatcctgcttttaattcttttggatatatatccagaagtaggattcctggatcttgtggtagttctattttcaattgtttgaagaacctccatactgctttccatggtagttgcaccattttatggtctcacctcagctttttaaaacctgtttaattttgaatcctaaccaacctctggtaacagataccaaattacagctagataggaggactgagctctcttattctgcagccctgtagagtgaatgtggttaactgtatttattgtatattttcaaaaagctttctgaaagagaggattttgaatgtttacagcacaaagaaatgataaatgtttgagatgctggatatactaattatcctgatttgatcattgcacattgtatgcatatattgaaatatcactcagaatcccataaacatgtacaattgtcaactaaaaaaaaaaaaaaaaaaaaaa

SEQ ID NO: 2663 - DNA, 2865 bp, Homo sapiens
  misc_feature (1965)..(1965): n equals a,t,g, or c
  misc_feature (1971)..(1971): n equals a,t,g, or c
  misc_feature (1999)..(1999): n equals a,t,g, or c
ccaacagggaaattaccctcactaaagggaacaaaagctggagctccaccgcggtggcggccgctctagaactagtggatcccccgggctgcaggaattcggcacgagaaataagtgaatagaaactgttgctaatttgttcaccaggccttttccctgagaaatataaactgttgtcactttatgtccttattcatcacttcaaattgtttgttttcctgaacatttaccactaatatggaatttcaaaactgttgggttgaaagatcaatagaagagtatttgaaatgtattttgtgaaatcaaatgttggtacgtgatggacggacatatgcttattttaatagtttttaaaataatcaagtatttactaagtgccaggcacaagcctaggtgctatgaatacctgttggtgttcaggaactacatggtccttggtcctcgccctcatgaaacttatactcaagtaggaagtagacaagataatgtgaaatagtaacaaatgctgtgaatctaacacagtaataaaatagaatgtgtctagaactgggttctcttagtaaggatggtcagaggggttattaaagtaggtgacattttagctgagaccaggagtgataagaaggagccaaattgggtagaaaattgctttctgcaaaagcagtagaaagtacaaagaattttcaggcaagagtgagtaagggtttgtatgagtttggaaacgaattgtttgaagtgaaaagaagtaggcaagatgcatattgcataaggcatagggccatgttaaacaatatttggttacgctggatgtttctgttgcactctgaatggttagccatttcatgaactgaatttcagcaaggtgattgactttttaaaaaaaaatctttttcagatcaggtatttggatccaatctcgctaatctgtgtcagagagagaatggcacagtaccaaagtttgtgaagttatgtattgaacatgttgaaaacatggtttggatattgatgggatatacagagtaagtggcaacctcgcagtgatccagaaactaaggtttgcagtcaatcatgatgagaaattggacttgaatgacagtaaatgggaagatattcatgtcattactggagccctcaaaatgttttttcgagaattaccagaacctctttttacatttaatcattttaatgattttgttaatgcaattaagcaagaaccaagacagcgagtcgctgctgttaaggacctaatcagacagttgccaaagccaaaccaagacacaatgcagattcttttccgacatctcagaagagttatagaaaatggagagaaaaatcgaatgacctatcagagtatagcaattgtttttggtcccactctattaaaaccagaaaaagagactggtaatatagcagttcatactgtgtaccagaatcagattgtagaattaattcttctggaactgagttccatcttcggacgttgattcttactgaagacaacctgtggaatagaagctggattccatcagatttcaaatgtttatacacaatgtattttattttttggaccaagcagtgactctttgattttgcactttttttttgagggatcagaagggaaggggagagtcgagatgtgtgttaggccctcatatttgctgctttgttgcaagttgatataactgcgtgtaattatgaattcattttatcctgaatgtttgcatttcatactctgaatttcagtaaaaatcaaaacttaaaattctaaccagtcatatacactggataatttggtaagaaaactgtattttttttccctgaaattggataatgtactttcttctcaagattcatgacttgatagaacaatactttcagtatgtgcaaaggctcttggcattttaaacaaaatgaaagtatatccattttgaaacctgtgtatttctttttcggggtttctgcatncagtgncagtcttaagtgccaaaattcattatanccccaaaataaccccttgatgaaggcttgctgtcttttactgtgttacacagcatccttactgatatcttagttgcttgtttgggcagcacactaatattacttaaaacactgtgatatactggagttttagttagcgaagtcagttcagggcattttaggctgtcttgctatactgaattgtagctaacaatcctaattatatctagtaccatactgagttattggtatgaccctgtggaaacacacattattttatgtaaatataggctaaagacttaatgtcctttagcttgtgtatataattgtgttgtatagtctcagagtacattctaaccctacatttctaatcattgttattggtaatcttttctgtgaatattaggtttcctccagaaatggtccgttatttgggaaagttaactgtgtgcactttagatattaactacatttacaggcaaatcactgtaatgagaatggtactggaaaaatactgaatagacttgctaaatggcacatgcactacaagaggaaccttttgggttatttaatatgtacagaaaacattagaaaaaatttattacagaattctaattccagtatgaatagtggaaacccatctgtaaattagatggatgttggatggaaaatgacattgctaaatttgagaatttctttttacctactaatgtagattgctttgtataataaaacacagggtttggaaggttttgttacagggagcatggtctgttgaagatttttaaaatgtatttttctagattaacttctgtacatgaaatgtctaataaaactataagaggtttagagatttttccattggaaaaaaaaaaaaaaaaaaaaaaa

SEQ ID NO: 2664 - DNA, 1272 bp, Homo sapiens; identical to SEQ ID NO: 2051

SEQ ID NO: 2665 - DNA, 1529 bp, Homo sapiens
ggcacgagcaagccttcaactttcgcagagaaaatgctcaaaaacttcagtttcagcagtgcccagcaaagggcaagtgcggtcttcaaggaggagctgggagatgatgagcgatgggaggcaagcgtggggactggcgggaaggcgggagcagctgaggggatcccagtggacccaaactacaagttggggcttgcagggagcctctgctgaaggtagtaggaaatgtgcttcttactgctcccttgtcttctctaatactcctcttagttcttttcctcttgcataccttttatttctggctaagtgttgggcattgttgtacattttctagcttgactcccttgggcaagttactttctgtctctgtgcctttgtgtcttcatgtttaagatggaaagaactgcagtgttgacctcctagggctgttgttagaagccattgaagacacagagaatacttagaataatagttggaacttggcaggccctgagttaattcactgccatcattgtcctcgtgcttcatagcagtagccgtgttgctgctcttagcctcagttctttcatgggcttctttcggttccttggaggctcccaagcaaaggtttttcagcacctctgttctgtgaaaaagagattaagcattttcagtatatttaaagttatctccagcctattgtgatgatgccttttctccaaaacccttttttattttcgttttattgtaggcacaaatctttctaatgcagatgcttaatttttcccaaaaagcaacttactcctttcaacaaggttttctatttggtcatcacatctgcattcttccaagaagcccactggtaaataatggaacaatgaagcagtgtcgccactaaagagtaatctgcaaccacacagaagctggaatcccaagtacctgtcattatattctcctacacatgtgcagagtttgataaaaagagagagccagttttattattcctttaagaggaaaaaactgccaagaactcctaagctttaattaccaaaataagcttgccttaaacaaattcaaacacatgaacacaaagtagaagatcaaatgcattttgtggccccatgcacatatatcttccatgagcttgtatcttcaaggtaacagtgctgcgtctttaatacccattagcgctgcactgtctaaatggtgcacgccagaaaagagccgtctctaggtgtctcaatgaaccatgaaaatctcagggaaaatgtattaatatatttttcagcaaatcctttgagatgaggattctcaggaaggattttagtgcattatgcaatgtagttgaattccctcttcagtattgaatatgctttgctttattccaaagagctcaacctcttcctatagacattgaaattcatctgtttcattcatagcaccacgtaaactttttatttttgtctcaaacttctctgataagcttgcctctgcatacaaaaacatcaaagcctgtggtgaaaaattattagaaaaaaaaaaaaaaaaaa

SEQ ID NO: 2666 - DNA, 1314 bp, Homo sapiens
gcacactactgaatcttttccaatcaagctgtcactcccacccttcacctcccacacaaacaccccatcacactactctggtcaagttccagtgacctgcacattgccaaagccaatggtcaattcctagtactcatattactcaacctatgagcagtatttgttacagttccctccttctttaactttttccattggttttccaggactcagtactcttaatagctttcctcctaaatatccagtcgttctcagtctccttttctgcttccacctcttctttacaatttctaagcattagaatgcccccagggcttagtccttggactttatctatgcttactactttgctgacttcattcattccatttaaatactctgcctatacggatgtcttctaaatagcaatagaaataatctcagcctcctccctgattttgttggtccagatattactccttggatgccttattagcatctgagatttaacaggttcaaaatttwagctcccgatctctgccctaccctcacctcaatttactattttcactgtctttctcatgtcagtaaatggtaacttcatcttttagttaactggaccaaaactggcagagttatcctcagcccttctctttccctcctgtgctttatccaaactcttaggaatccagtcagctctatcttcaaaatatagctgctaccccatagtacttaatcatcattggatataaattccatgtaatcatcttgtttactacctgtgcaccacccacctcccctatccaccctccaggccccagcaacataagctctatgacaatatggagttccatcagtctcagccaatgtgtaggaagaggcagatgaataaymyygaaccaccattagcatggcacttctttacttcacttctttactcctaatacctagaacaatgtctagcacattgtatgttctcaataaatatttggtgggtggttagagggatgaatgcatgaaaggatgaaaggaacacatgaaaggaaggaacatcaaaggagctgagcttgagtcttccctttgccctttattacctgagtgactttaggcaagtcagttgattttcactgaacctttcgtcttatttagaaagttaggggataaaataggtcctattctgataaaataggtttgttctgagaatcagatgagagaataaacatatattttcttgataactagaaagtcgtatacaaatgttagtcatgataaggagggagaaaaggaagggaaagactcgagggggctaatggttgccaaatgagaggtctcgag

SEQ ID NO: 2667 - DNA, 2354 bp, Homo sapiens
  misc_feature (2180)..(2180): n equals a,t,g, or c
  misc_feature (2255)..(2255): n equals a,t,g, or c
ggcacgagaacaagtccaagcttcttaaaatgattggtggttaatttttcaaagcagaaattttaagccaaaaacaaacgaaaggaaagcggggaggggaaaacagaccctcccactggtgccgttgctgcgttctttcaatgctgactggactgtgtttttcctatgcagtgtcagctcctctgtctggttgtttacctgttcctgttcgtgcttgtaatgctcacttatgttttctctgtataacttgtgattccagggctgtttgtcaacagtatacaaaagaattgtgcctctcccaagtccagtgtgactttatcttctgggtggtttgatagtgtttttaaaagtaatatataatgtggggtgaaatgggagtaggggggtggacaggggagaaacgaaaaccacaaaaagaaaacccaactcctctcctccccccaagctcagttaaatcccccacctccaactttccctccaccagtgtgcttgggatcttcaatgaactgtgcttttcgctttctttctgcatgactattgtaactagatagaacattaagagattttcaagatcaaacttccatagcttcatccactgaatttgaaggcatccacctttttctccatttgctaaaatttggtgcagtttgagtttatgtgaataggctggctgtgcctgtagagctcttgtgtttttagtgatgacatgaaatacaaagaacaagctatttccaggaatgtgttctgtattttacatcccagtgtaccctttattttattattaactaattaactatgagatttttaaaaaatggggccgctgatgtgcaatatcaaagtgaacttgtgagtattttgtgtgtgttgatctcagttgtttcttcattgtgctgtttctggatccagccatgtgtgcgcttgtgtggacctgaggctgctttctgttcccaaagcttgacctgtgtacagagataattccttggcaatgttggacatagaatgcaggagctactgaaggtctgtcagggatttgtccattctgctcttggcctctcctgaggcctcataatgggagaccaaatcaaaaatgtcccatgtcacttgagtgggtacactgcctacagaaccttgaggttgactcctgcttcagttctcagctgtttaccacagccctccagggtccaaagattgaggagctttctctttcctgggaggaactgtctcagatttagcttgtgtgtgttttggacagaggctccacagcggtggctcttgaggaatcctcaccagtttgttctcttccctctgacaagcagcacctgagcagatgctgaggcagttcattaaaccaggcctcagcttcagtgcctcatcttgccatctcccggccaggctgggaacgggcaccaagcagccgcctctaacaaacaccatggtccgtggaagttcatgccagcagcttgcctttgagaagaaatgctgctggctctatttttacattcccttccacctctatactgtcatgtcaccgttctgaactcccagatctgagaaggaactagtgttggtggtatgtaacaagagttacgtatccaggggcttgtgccttggtttctcctttgattgctggtaaattctgaggccacagagaaatgcattgagtgtgaatgttgtcatctgtaatccctccctcagctgataatggtagttgatctgttgtaaatatatacatatatgcatatttgcacttccagatgggttgcataagaatcaggtccttaaatacctcccaatctgatgaaacgatagaataaagtaacatttcccagaatggaggaatacattattttatcgtatatttttgtccaagcgatgagctgacggtggtattgcttctctgcatgttatcagtgtgtacatctggtgcttttcatgtgtcatttgtgagccacaaatgcaaagttgccatttgaattcagtcaggctacagggtggtgtcagtcaaggtctttcaggtgggggagaaattggttagggctcccactgccaaatgcaagcagatagcataacctgactgttatgtgccctcaggcagcatgcttagggacaactctgtggcctgggggacatctgtgtcacagtataggattgccattcaggtgttttgtacctatttcttncctgacgttgtcccctttttttgtactgatccaactgggagaacctcagccaatgctggaagtatgattgaagtncctctcttttgtgactcttgtacagcttaatgtgcaataaaggaaaagttatatctgtcaaaaaaaaaaaaaaaaaaaaaaaaaaaaaaaaaaaaaaaa

SEQ ID NO: 2668 - DNA, 744 bp, Homo sapiens
  misc_feature (14)..(14): n equals a,t,g, or c
  misc_feature (21)..(21): n equals a,t,g, or c
  misc_feature (706)..(706): n equals a,t,g, or c
  misc_feature (744)..(744): n equals a,t,g, or c
gaattacccttccntaagggnaccaaagctggagctccaccgcggttggcgcccgctctagaactagtggatccccccgggctgcaggaattcggcagagcgggtttagtgattatctttattgatcagaaaaaaaaaataaactcacattgttgggataatctaaaaataacatcatgatattacagcataccatgaagaagttaactctaaaggcctacagtatataatagtttgagtttggaatcttttttttgtgtcatgcataactcaaactttgcatatcaccttcttcttaatctccagtgagtaactgctttatagtttcagactccaagttaggtcagaatactcaatatcaaatacttttgataataccacaaaatttaccaaagacatagatattttaaaaacaaggaaacaaacagaaatcttagaactcaataactcaatggatgatataaaaaatacaaatgagaacttcagcaataaagtagatcaagcaaaataatgaatttctgaacttgaagacaggtcttctgaaataacccagtcagacaaacaaaaaaaaaaaaaaaaaactcgagggggggcccggtacccawttcgccctatagtgagkcgtattmcaattcactggccgkcgttttwcaamgtcgkgactggggaaaaccctggsgttacccaacttwaatcgccttgcagnamatycccctttcggccagstgggsgtaatagcggaan

SEQ ID NO: 2669 - DNA, 372 bp, Homo sapiens
  misc_feature (368)..(368): n equals a,t,g, or c
gaattcggcacgaggtggaacccaaaacgggttttggtttgctgtgctgctatgaaagtacacaaaagtgtgctgtgtacactttgtgattgcctctgaaattcgatgtggtttattctagacttgggtgtggtgtaggcagggcctacatccaaggagctgattggtcaatgaaggcgcctccctctcattggtctctgtggctgtcattctgtcaccctcctccctggctctttgccctcaataaactggctcaaagagccttggaaaagcattttattcccagctcttatgcgaactctgtgtagaccctggacaactaaatctgctttcccatttgcaaaaaaaaaaaaaaacccggggggggncccg

SEQ ID NO: 2670 - DNA, 427 bp, Homo sapiens
ggcacgagcatgaccaactagaattaaagtaagtgtaaacagtgaacatactgtatgctgtacaagatataatgtaacttgctgttttagcatctgtattttggttagaagatattattaaatgcagatgttaaggattggaaaagtctaattttatttttagaaataatggatataaatttgtttttgcttgattaaaatagcttattcctacattaagtctctttttaaatgttttcatgttatttcttttgtgcagctatttcatctgtgtgagtcacagctttgtttccacgtattattcagtttatttctgtttccttacttgtttacattccgtggtacctacttacatgcttaggagtcaaatggattatgacattaggaaaaaagcagaataaaagagattgaagtcttaaaaaaaagg

SEQ ID NO: 2671 - DNA, 304 bp, Homo sapiens
cggcacgagaaaacatccaagcttcttacctgtagatagaatcagccctcagttggtgcttattaccagttattcaagaacaataacaacaacaaaattagtagacatccaagaagcacatattaggaccaaagatagcatcaactgtatttgaaggaactgtagtttgcgcattttatgacatttttataaagtactgtaattctttcattgaggggctatgtgatggagacagactaactcattttgttatttgcattaaaattattttgggtctctgttcaaaaaaaaaaaaaaaaaaaaa

SEQ ID NO: 2672 - DNA, 400 bp, Homo sapiens
ggcacgaggaaatgagttaagactttggggactgtgggaagggcattgttgtgttttgaaatgtgaggacatgaaatttgggagggaccaggggcaaaatgatatggtttggctgtttccccacccaaatctcatcttgaattgtagttcttagtccccatgtgtcatggaagggacctggtgggaggtaattgtaggtggtttaccccatgctattcttgtgacagtaagttctcataagatctgatggttttataaggggcttcccactttactcagttctcattcttctccttcctatcaccatgtgaagatggacatgtttgctttcccttctgccatgattgtaaatttcctgaggcccccccagccctgcagaactgtgagtcaattaaagcgg

SEQ ID NO: 2673 - DNA, 703 bp, Homo sapiens
aattcggcagagggcgatttgtgcatgcctgtgacacctttctcttcattcttctgtgcctctatgattgttacaccttttttattttttttcttttttgagacagcctgggcaacagagcgagactccatctcaaaaaaaaaaaaaaaatatatatatatatagatagatagatagatagatagatagatagatagatctgtgcttccttgttcccatgttttgtacatgctatttctcgcatctgcaatgtccattctcttcttccattccccaccttttcctcactcccaaatggataactcacacttgctctttaagattcaacttacatattattttctttgtgctccagtagctctttgcatttctcttataggaattaccatgttgtgtcttgtctgtctgttagtttctctcataagaatgtaagttcatcaaaggaatggactgtgtctcattttagctttgtttctgagcccaaagctagaattgtgtttgtttagcacaatgcttggccacagcaagcatctatgatgttgtttaaactgactttaatcctataaatcaatgtctcccctcaaatgtgtcccactagtaccaggagatttttcaggaaaatgtcctatagtctaataatttggcaaatcacaaattctatgtaatagtgtatataggctctagaaagactagcaaaaaaaaa

SEQ ID NO: 2674 - DNA, 675 bp, Homo sapiens
aattcggcacgaggaaaatatagaaccttttcatcatcacaggaagctttcatggacagtgctgctctagagtatatcaatggcattggaaattcataagccaagagtgtctttcaaatatcagctaattaatgaactaatatcacgtcagatatcacctctataacatttwaaaaatactcattgtgctattatggctagtgctgcaatgaagatgaaatcaacctaaatgcccatcaatgacagattggataaagaaaacgcagtacctatacaccgtggaatactatgcagccatgtaaaaagaacgagatcatgtcttttgcaggaacaccaatgctgctattattctcagcaaactaatgcaggaacagaaaaccaaatactacatgttctcacttataagtgggagctaaatgataagaacctgtgaacgcaaagaaggaaacaacagacgctggggtctatttgagcgtggagaatgggaggagggagaggagcggaaaaggttaactcttgggtactgggcttaacacctgggtgatgaaataatgtgtacaacagaccctcaggacatgagtttacctatgtaacaactatgtaacaaaccttcatatgtagcccccaaacctaaaataaaagttcaaaaaaaaaaaaaaaaaaaaaaaactcgag

SEQ ID NO: 2675 - DNA, 432 bp, Homo sapiens
ggcacgagaaggtattccatgcaggtgaattttctaaaaatactttactgacacaatttaaaaacacttttgatgctcatctttattaatcatattataattagccttttccccccagaatatatagagcatagtttaacccttttttaatgactcagaattatcattatgaccagatactattatctttagagtctgctaatgttattggtctttttgaccctgtgccaaatggtcccaggctagcatgccttctgagttccttgcttttaagaattgtattcctaccacatactccccttgccccttgctctctactttaattttctatttcagtcaagtgtatttgtccctaacagtttcccttcttattttccccaaatgactatcagctttgaaatgataagccagaaaaaaaaaaaaaaaaaaaaa

SEQ ID NO: 2676 - DNA, 794 bp, Homo sapiens
gcacgagtccagccttgcagcccctcatgagtgtggctgcagacatgctgtccggcccctccctgtgctgctgaccccctctcatgggtcccccagtgttccgtccccatccctgagttacggagccgcctgccgatgccccgcccatccctgactttgggtctcctgctccccagccagcacctctgcgctaaccacaccctcctacaacatttttttaaccccaaaattatagcctgaatgttcgcttttagtctggccaggggatctgactcctgagttggttgctctcccctgctcactccagtcacatagagaattggtgtttcccgcagtggggatgcagctgttggacaggtattgggggcaaggttggtagggaggacagactgtcacttgctgttacaggcacaggtgattaaaatgctaaatattgcaaatttaagctttgtcagtatatggaaaagttgaagggaaaatactggaatgcttcttcaaaggttaaaaaataaccgagtcttttggtaatttgaccccacgtgctctctggccctcaagcatgtaacctcggggtctgaggcccaggacccacccccctgccacccctcccaccccactccctgctcagtacctggcgttggtacacaggcaaggattggcacaaccaaaattggcctttttctccctcttaatattgaagaaattcccacatttctcatttggtaatggtgttgtggcctcagatttcttctagtatttgcttctgatgaatgattatggtctatacataaaaa

SEQ ID NO: 2677 - DNA, 425 bp, Homo sapiens
gaattcggcacgagagaagggaaggcaaggggctgaggggagggaaacagggatgcatttctgttttctggtatcattatacattatttaaaatttatgcatattttggaaaactagttgacctgacaagaataagacagtctaaacttgtagagttaaacagtccctccatggtgagattttagactgattcagagttgtgttaacctaatgactgacacactttattgtggattgtagtaaataacaacaaagctaggttttatgatgcttttctcctactaaatgtgtgtcacagccatttacaaacccatttggtgcaattcttatccttgaggtttatttatttgctttttaaaatatattgcattgtcttattttaaaaaaatagtcaacagaaataattgcaaggaattgtggaaaag

SEQ ID NO: 2678 - DNA, 1489 bp, Homo sapiens
  misc_feature (240)..(240): n equals a,t,g, or c
gtaaagatttaaattatttgaagcatagagatttttttttatgttttgttttctaattgtcatggtaggtcatgtcatactaaatacaagataggctatagagttttaatttactgtcattgaacaatttgcattgtttaggaggtactaggatgatcaactgattgaaaaattcatcagtgtgttaatgaattttttcacccctttagatatatgctgaaaacatttagcatgagttgnattttaataccaatttttcaatattttttcaaattgagacataaaaactaaggcattttaaatatctgtgctctaataaaaatattttagaaatattcattgatgctgctttttacacaggagaacacaaagttatacctcaatttacttgaaatggaatatagtggtgacctcaaacaaaatgaagaaaatatcckaaattgttttgacaaagctgtacatggttcattacctattaaaatgagaattacattttctcagagaaaagtggaatttcttgaagattttggttccgatgttaataagcttctgaatgcttatgatgaacatcaaacactcctgaaagaacaggattctttaaaaaggaaagcagaaaatggatcagaagaaccagaggaaaagaaagcacatacagaagatacaacttcatcatctacacagatgattgatggtgatttacaggcaaaccaagctgtatataattatagtgcgtggtatcaatacaattatcagaatccttggaattatggacaatattatcctccccctccaacctgatgggaaaaatgtaaatttcaaatgcagtgtgtgaaaagtatgaaattattattttttttaatgagggatgtaaacagtataagcttgttgtatttgataacctgtcttccttgtttctgtgtaacatgatttgtttagtaatagggggaaaatgtcaattagtagcttaccacagatactgtttcctaccatttataaaatttactttttattgaaaaactattttttgatttttgcattaagtggtctagaattcttttgcaatgcatttgcaacagaattttgtagccttaaggggtaggaagaaaaacctgactgcaaatcatgtcagtgtagtacaaaattctgaaaacacataagggctggttatttacctccttttttttttttttttttaaagaaaaaaggacttttaacctttgctgacaaggttttgtctgtttcagttatacttgtgaattgtgatctaactgcagaaaggatacattattaaaatactttgccttggaatagattataaatgagaaaatggaatgtttgcatccctttaaaaatgaaaatcatatcaaaagtatgttgtttcaggagactttgtatttagaatattcatgtaaaacttgtgaacaagctttcattttgatcaaactgatcttcatttttgtaataaaacggaagactcatccaaaaaaaa

SEQ ID NO: 2679 - DNA, 323 bp, Homo sapiens
gaattcggcacgagctgcctctggcctctgtgtttaaccatttgcggaactgccaaactgttttccaatttggtggcaccattcattgtagattcccaccagcaatgccccagggttctcatctctccatctcctcgttagcacttgtaattgtctacctttgattatagccaccctagtgaatgtggaatggcttctcatggtggttttgatttgcatttccctggtgtttagcatcttttcacgtgcttcttggccatttgtatatcttcttttttttggagaaatgtctattaaaatcctttgcccatttttaaaaaaaa

SEQ ID NO: 2680 - DNA, 674 bp, Homo sapiens
ggcagagcggcacgagaaattttatatggagttaacatgggaaaccttatgatggaatttaaagattatctaatgtagagtataaataagatggttgaaagtgtgaaattgtaatcagactgtttatatgctaaagtttatcctgtttcttaaactgcgtaatgtaggtaaccttttctcttacatttaatgaagtagaatacaccttttaggagcaattaaatactgaaatggttaatttgtgtttagaagtgtgattttcttttttacttagagttcattttgccttgtatagaagtacagtttttaaaaactcaaaatgacctagaggaagtttcatttttaggggcggtggaggtcttaatcagaattagttccgcagttaaatagcaaacagtaagttgtgagtagtcaaggatgggatgataagagcagtattttttgcaacttaaaatgaacattttcttaaattatcagcaaggcttatttgaccaaagatgaggtaggattaaggtgatttatatttacctttttaaacttttctgtatttttttattttcaaattttccataaaaatataaggacttgaagatcaagaaaaaatttctgctttggctcacaaaaaaaaaaaaaaaaaaaaaaaaaaaaaaaaaaaaaaaaaaaaaaaactcgag

SEQ ID NO: 2681 - DNA, 650 bp, Homo sapiens
ggcacgagctgctgtggggccaagcgcatcatgaaggaagctttccgctgggccctcttcagcatgcaggccacaggccacgtactgcttggcacctcctgttacctgcagcagctcctcgatgctacggaggaagggcagccccccaagggcaaggcctcatcccttatcccgacctgtctgaagatactgcagtgaaagcccaagtccttggaagctttccccagtgaaggactgactgggggcctcacgcttaactggtagtgcccacaagcctggcagctgtagagccgcgaacctccccacacctccctcaccgcgcaggaccctgagtgaggaggaggagctggaaacctggggtgggttggccaaaggagaacctcaagctcctggcctgatccagctccttcctgcccaaggcagcttagcccatccagactggtcctgaagtctgtccctccattggcatgaagtctgccccttagcaatccggcctcgcaggctgtactttcatggtgctctctaccttctggcccccatcccggaacattcctgagtgaattcgcaagcgcactagcatgtgatattagggagtttgcaataaattattgaggctgaaaaaaaaaaaaaaaaaaaaaaaaaaaaaaaaa

SEQ ID NO: 2682 - DNA, 757 bp, Homo sapiens
gggctgcaggaattcggcacgagctcttgtgtgctggtagagattttaatcctgatttttccataaaacatgagtattaagaaataattcctggtttggagaaactggagaaatcacccttttaaggaagaaacactggaaatttctgctaacaccaagatatttaagagtgtacatagtaggtgctcaacaaatttattgaatgaatgagtgaatggaaaaactgggagagtcaaaagtgagcagaagctctccatttctacttctgtcacaaaccacattaaattgtaaataaggcccttctccacttgacttcaggcagcagattgtctagaagcctaaggacagcaatttctctgacaagacaaagtagatattttataccaggggttggcaaactactgcccacgggccgaatttggcccagtctgtttttgtatggtgcaaactaaaaatgatttttacatttttaaagagttataaaagaaaaaaatatgtggtctgtgaaatctaaaatatttactacctggcctgttggaggaaaggtttgccaatctctgttttataccattaactatgagattaacaaaaacttttacctttgtgcagaaggttaaaaaaaaaaaaacatggttaaggaaaaggagacatgttacctcttcatacactcctataactgtggcattgcaaaaaataaaaataaccacctttaaaaaaataaatcttatttaaattgcaaaaaaaaaaaaaaaaaact

SEQ ID NO: 2683 - DNA, 818 bp, Homo sapiens
  misc_feature (2)..(2): n equals a,t,g, or c
  misc_feature (6)..(6): n equals a,t,g, or c
gntccnagctccccgcggtggcggccgctctagaactagtggatcccccgggctgcaggaattcggcacgagcacaaaggtaatttcaaagctaaaatcataagtaggaaaggcattgccaataagacagatgttctctttggaagtcctctttctttttgctgggtagcatctgagacttcttcaaccttacaaaatgatgaaaaattaaagaagataatagcatttgtagttttcatgaatactgaaatcacacattcatgtacaagaaaaaattgtgcatggcaacacacgtccatactcaaggctgcacatacataataaaaaatacaagcgcattgttttttcttacattttataaacacatgctcatttgattgattgtgtagataaagtagcattgttctatcatctttccctcaagcttttagatataattctttttggagccttattgtgtgacatgtgaatggagaatttgatatttaatatttgktcttttgaatcatgtccaggggctgggtagggtggttcatgcctataatcccaacagtttgggaagctgggcagagaggatcatgagcccaggagtccaagaccagcctaggcaatatagcaaggccttgtctctactaaaaaataaaaataaaaaatttagccaggcattgtgatgcacacgtatagtaccagctaccgaggaggccgaggagggaggactgcttgatcccaggaattctagattatagtgggctatgatcattccactgctctccagcctgggtaatgaacaagaccctgtttcaaaaaaaaaaaaaaaa

SEQ ID NO: 2684 - DNA, 821 bp, Homo sapiens
  misc_feature (40)..(40): n equals a,t,g, or c
  misc_feature (816)..(816): n equals a,t,g, or c
  misc_feature (819)..(820): n equals a,t,g, or c
tgttgtgtgaaattgtaaccggataccattttcccccagnaaccagctatgcccatgattacgccaagctcgaaattacccctcactaaagggaccaaaagctgragctccaccgcggtggcggccgctctagaactagtggatcccccgggctgcaggaattcggcacgaggggaaactcactggtaggaatccataaactgtcctcctggtgggctgtaaacaactcaccctctatgcatctcacatcaaaattccagtttcttgggaaaacaagtctgtttgcccaatttgggtcatatttccacctccatgttactcaggcatgattcatctgcaagttatgtgtatagatattttgctactgttccacccttacgctgtgctggggagggaggtgtcactgtgagctgtgtcggtgccttaagagatatctgttgtgtcttattacttggttgcttttccccacatgtacaatgacaaaaatgccttcaacctatttgatccagccgttccagtacaactcctatacttgccatctttccaagcccaaaggtacatccagctgatggaaggagcatcttggtgttaatattcttttagtcatggtctctgaaagtaaaatgtctattcttctaattctggcacaatcttatctagctatagttcctcatggtcctgcactccatggactaaattgtaagtataattactaccaatgtactctataaataacttttggggccagggtggcaatagttgctagagaaaaaaaaaaaaaaaaaactcgagggggggcccggtacccagtgcganccnnt

SEQ ID NO: 2685 - DNA, 735 bp, Homo sapiens
  misc_feature (3)..(4): n equals a,t,g, or c
  misc_feature (16)..(16): n equals a,t,g, or c
  misc_feature (22)..(22): n equals a,t,g, or c
  misc_feature (710)..(711): n equals a,t,g, or c
  misc_feature (734)..(734): n equals a,t,g, or c
acnnaatggcacatcncccttnctattgggaacacaagctgagctccaccgcggtggcggccgctctagaactagtggatcccccgggctgcaggaattcggcacgagcaagggttcccttttctccacatgcttcccagcatttgttattgcctttttgctataagccattttaactggggtgagatgatacattgtagttttgatttgcatttctctgatgatcagtgatgttgaggaccttttcatatgcctgtttgccatttgtatgtcttcttttgaaaaatgtctattcaaatattttgcccagttttaaatcagattaaggtttttcctatagagttgtttgagctctttgtatattctggttattaatcccttgtcagatgagtagtttacaaatattttctcccattctgtggcttgtttcttcactttgttgattgtttcctttgcagtgcagaaactttttaacttgatgagatcccatttgtccatttttgctttagttgcctgtgcttgtggggtattactcaagaaatttttgcccagactgatgtcctggagagtttccccaatattttcttgtagtagtttcatagttcaaggtcttagatttaaggctttaatccattttaattatatttaaaaaaatttaaaaaaaaaaaaaaaaaaactcgagggggggcccggtacccaattcggggatnncccgttccgtcccccccccccgna

SEQ ID NO: 2686 - DNA, 1372 bp, Homo sapiens
  misc_feature (386)..(386): n equals a,t,g, or c
tcgacccacgcgtccggcaattctttcctgaggtccagggtgttgcaaactcatggccttgggccacgttttaccttcagtgaggttttgtttggcttgcaatgagtacatgggttttaggttgaatgtgagagtctgcagacaatgtgggttctccgactgccctcccagtgaaggtggacctctgatttagaccggcccgctgggcccgtgcctacatccttttcctcagcgtcaggatcttagtccccatgattgctgcccctttgtggtctgcatgtttcttggtaagggtgcccagtcwagtgtctctgggagccccctcttctctgtcatcgtcargctccccacttgcagtggccgtggtggctgcacatgctcccggnatacccctccagcactcccttttgtcatcttgagtttcagtccgtgacttgggtggcaccctatcttctccatcagggatggtagctatttttctgccatgagactagaggttgcttgagaacaggaaattggatctctcccttcaggctgggatttcactaagggytggagaakgggggaatatgggaggattatctcctatcacagggagcgctctgagggcaaggctgygtctccgattcagactgacggttccctgaggatggggctgtttctcccctccgactggggctccctgaggatggggctgtttctcccctccgactggggctccctgaggacagggctgtgtctcccctcagcctggggctccctgagtcagggctgtgtctcccctcagactggggctccctgaggacggggctgtgtctgcctcagactgggaatccctgaagatggggccgtktctccctcaaagtggggctccytcaggacagcgttgtktctcccctcagactgcggctccctgaggacggggctgtgtctccctcagactggggctccctgaagaaagggctgcttctccctcagactggagctccctgaagatggggctgtgtccccytcagactggggctgcctgaggatgaggctgcatctcccttcagactggagctccctgagggcagggctgtctccccccttcagactggggcctcccccaaaggacagggactgtgtctcccctgggactaggttctttgtgtcttctgcatcagacagattcccatgaggacagggctgtctccccctccatctggagctccctgaaggcaatggcctctcccctcaaatgggacatttgcaccccaccccaccctctggctccccatggcgcccaggcattcctcccaggacaccatttgtcacgctttgatgaatgaaacttactaagaataaaaaaaaaaaaaaaaaaagggcggcc

SEQ ID NO: 2687 - DNA, 580 bp, Homo sapiens
  misc_feature (3)..(3): n equals a,t,g, or c
ggntcgacccacgcgtccggacatttgtcttcatgaagcagatttgcactggaaccattgctttactctggttggaaatgccattgttttggggacagacttttaaaatgcccttgtgtctcccagtgaggagccctaagcattgacttctctaccctaaaactgtttgagagagggagagtgggccctggctttctcaagcatgggtcgggggttcagcggggcctctgtcttttgtggtgacccctcaggggtttcattgtttccttctgacttaagcaatagagagagaatttgttttggtactcttcagaggaattgtgctttggctcataacttggccatgttctccatgaattagttctcctatttttttttttaactaccttaaacttaagggaaaagttctcctatcttgatttcactggaatataggctttaggagctctgtaaggctggtatttttgtctgttttatcttctactgtatcgccagtgcctggaacagtgtctggtgcacataataggtgctcaataaaaatgtgttcaatggaaaaaaaaaaaaaaaaaagggcggccgc

SEQ ID NO: 2688 - DNA, 2120 bp, Homo sapiens
ccacgcgtccgagaaagtccaggcaggaacctggttgtatatgggaaggaactgatccaagttgggagtttaaaatccaaggaaccagctcagatctgagacttgtgaactaaccttcggggctaacaggccagcaggtcagccaggatggtgagggtgactttgctcccaggcagttttccactccaccctcaggctggaggttgttttaaatattttatgtgagggaagaaagggaagccagcatgatcatctggggctgtctgctaatcgtgagcgtgtgtgtagaggggacagagagttttagacttggcaacagcaatcttttatttatgattaagtataagagtaggatgtaaagtccatttgcgttttagctgttatttaccatgctttaagttaggtgattttaaattattcacattaaattattcacattctcatcgctttagtttcttaaccttatacttctttcaagatgtccgccaacccctgaaaatatgtggcacagttgttggtgcacatatgtgtattttgttgggttagaggtgcacctgactcagtaaagattcagtctgctaattactgtattgctttctcttagctcagatggtataatgcaagcatatatatttcttcattgtaaactgttctcaagaggcgattttctactgattcaagtaaattatagagaggtgagacagatacatttaaaatttacatctttagtctaaccacaacattttttctcatattaatcagcaagcttttaatttttagttcagaaaggagaagtataaagttggaaaaaatgcatgtttgaaagcacacaatgctgccctatatagatagagagagagagagtataaaaatcaaaatgaaacacaacctgcaaatgtcagagaacatatttggaagaggaaatgcagctggatttgcccaaatttgcaaaacaccagatgttcccacagcttgtacatgatgttaaaaatgtaaaataaatgtgtactattcatacacagtgtgcagttttcaaatgtgtacccacatttaatttagaaagaaatttttggaaagaactggtaagctaattctcgagtgcataacaagaacaataagcaattgttcagatactagaattcagaaaggaatattcccaaggcctgaactgagtgcccaatccactggtaaaacataccagagaaggctcttcactttcatggtaacagtcattccattgccatttacatttgcagaattcctagaatctctggggaaaatatttacaaatagtattatgtcctgcagtcagagagtgaatttgtgtgccatttgagatgattaatatgcagaaggaaaaaggaagcaaatgtttaaagtgtatttgtaccaaatctaaatgcttttttttgttgttgttgttgttgaatcagattagagttgctcctctattgcttgtcaattcagctgttataagcatttttatagaagggcagagaacaagtgaatgggttagaaatccaggaaaatggttgtaaaagaggctgaaaggcaggtcagaacacaatttgcttggtattaggtggttagtaatggggagcatatgtataatcttagcctttgtgttttatactttccacttgctgtcaatagctagtactgctacatccatagataaatgcatggcaaatacttctctctcatatgaaatgctgtcaagaagtttgccaggatccttctttaaaaattcccaggtaatcatacagtttaaaaagtccttctggtaccttgcccagtgttactcaacctggaattagataggtatttacccactcccctttcccccaccttgcacgtgctgcctttccaactcccaccgtttgtgattcattgccatcgtaaaccactgcttctaatgggaaacatgttgtctcctttggattgtagcagaaaaattattgagaacctcttatctagcctactttctaaccttcaaactcatttctattgataattaagccagtatccctgcttacttgctttatttatttaataaaaggtatcttttgcctaaaaaaaaaaaaaaaaaaaaaaaaaaaaaaaaaaaaaaaaaaaaaaaa

SEQ ID NO: 2689 - DNA, 1467 bp, Homo sapiens
ccacgcgtccggtctgaaaggaagtggtttggattcatgatgccaagctccacactatggagctgggaattccagaattgctttgactcagatattaatggagaaagtcatatccattaatggataaagccgtatctgttatggataaagccatatccagagttgctttgactcggatgttaatggataaagccaattattgatttctatttgcctaacctgccagcttttgtccaagtggggaatggagagccatagggatgtttgtcatctcacatgttttggtgatctgctgtctgtgggtctggacggaatttgttggcaagaccattttctgtattggatattcttcccaacagtgtccaccccaaaaggctttcagccaaaacatctgagcctaggtaggtttaccaagggaagccataagtcaagaagcatcagagtgaaaaggagcacttccttcattttacgcccggaggctaatgctccgagaggaatgtgtacttgggcaaagtcatgcaggaaggtcatatcagagctgtggaggctggagtgtcctgattcttggaccacagatgtctccctgagccattatttatttatttttaaaaagcacagttattccatcattttgagtctttgtatttcgcttatattggggggcaggactattttctcaggtgtctcatttggcagtcaacattgtcccctatgttccctatgactagttgaaaattcaagtgtgcccacaggggtgcacaaaaccacacccatgcacacacacaccctcagcccccacacacaccccgttgaacccgtgggtctatcaggacatcctaaaactccgtgattgacatttcagtaatttcaggggaaggtgttttccagggatggggtctcccaggttcagatagtgcctttggctgcaaatgctcctttagctaaacttttcctcaggaagaattcattattctagacattatgtgatatatctgttaggaataaaaggtgcttaaccttcctccctgggatgtgggagaaggtgctggaggttgtactgtgaagtcttcaggctcttagaaggctccagcctgagagagccctttattattgacattcctgtccttcctcaaggcctggtgacctgtgacctttcgctctgggcagggcccaggtagatgggccgtcatccgggcctgtaagccgtacttgatttctgcattgatttacatattttttactgtgatcttggttccaaacacagaatcgtcaccccattctcccttgaatgtgccggatccttgtaaattctcatttacctacttgttcttagtgtgtatgtgtgtgcgaaactctatgttcaagaaagaaatcatacaaagagtaagaacatgtttgtgccattgaagaaatggttttttgatttctaataaatatttgttttgcctcgttaaaaaaaaaaaaaaa

SEQ ID NO: 2690 - DNA, 1917 bp, Homo sapiens
  misc_feature (1862)..(1862): n equals a,t,g, or c
  misc_feature (1892)..(1892): n equals a,t,g, or c
tcgacccacgcgtccgggcgtgagccaccgtgccctgccagaatagcctattaaccagtctacctgcttccacttttcctccaccctgatcacatacacacatgcattatccactgagcagtcacaatcagatgttaaaccaaacattattcagataagatctctgaaaagcctctgatactttctcttttaaaatggaatatattctaaacacctctccaaggacacaagacttaccttgtctaactaatgacttttctaacttcattccctatcattctccatcttgccccatgctcctcatgcagcagctttttttttttttyccttttycaaatatgtkggttttgatcttatccaagaacctttgccctgatgtatgaatgactaactgcttttctacttcgggggtctcatatagaaatcctgcttcagaatactcttccctgagcactctatctaaataaatccctcttctgcaacccagtgctttttgttctattactgacttcttttccttgtagaagttactattactgctttttacctttttatttatttgtgtattgtctttgttgttgccctcatcttatctccacaaaaatatatgctccataaaaacaggcatttctgtgtcttattcagcactttatcagggcctataacaatgcctgggacatattcagtgaccagtgaatatttttggaaggaaagaaaagargaaagaatgaagtaacaaacaaagaatgaaggaagaaaaaatttttacaaacattcaacatatttttattttgaaataattttgtatttttccctatatcctacattggatcagaatattactgttatgtatagccatgaggacatggtctcaaaaaatgagaaactttcttagacagtaaaattgttaacttgagatgtttgcttccatcttctagagccaagtaggatctaactttaatttgacttagccaataatctgaaactattatagtatctgtctttcacagatacatgcaatattcacttctaaatatttaatgataaatttgtaatcatacatgatagtcaattttaatgattatgttgtcaaaattcaggctttytgtgtgaattgaagacttaaagaagaatttgtaaatatgactgtataagaaacaacagaaagatgaagatgaaccgaaatagaaatatcaagaggctacaaagtcttagcaaattataattgctaatggtacattatgtggtgtttagtatcacatttagaatgtagtcatttgttaagtttttcatggggtaaaagaaagaatttattccaagaaaattytggaattttaaaaataaacatgacatcttatcatgagaaacatttacagtttttgcttttactacaagatactgtgaaatgttctgctctgtcagttgtgaaagtatgaaatttaagtctatcactacaataatatttwgtttttagtgttcatttctttcctcctgactacattgagatgagttagattgagtgaaaggtaaacactaacatttgaattgaggtaatttccactgtggaaaacaaactgttgttagtaaacaggcatcagctttgagacacagaaragtcatccaaaccagaagattgggaacttcctcaattactttgtcttccatttattgcattcaattagtcaaaaatgttgttaattatacattttaaagactatttttggtaaggtctatgacacattcaaaatactacatayaagtttgtattatcataaataatccaraagaaaacatacatgtaaccaccaccatctggaaatttcacactaaattataaaacattccatcactgcatgtattgntaatgtcgcttatgaatccacttcttcctnatctgtagagttaaaaactacttag

SEQ ID NO: 2691 - DNA, 1164 bp, Homo sapiens
ccacgcgtccgcccacgcgtccgcacgagaaacagtgaggctgaaagggggggctatggaagagcggtagggagtccacggagaagatgcagtgaatgcttgcatgcattcacacgtgtgtgtgtcccagctagttcactcctttcgccgtgcgtggtggaggctggcctctctggctgggtgcagtgaatggccagcgggtttcttttctgctgggccaaggcgctttgggggtggagggggtggtgctggtgctgcactgggctgactgcggcgctgacgcagcgtttccccccatccctgttgcctgtgtgttgtgtggatctgttcctagtataggcaacataatgagatactgtgcttcccacctccccttcagttcagagccaaaatgggtctagaatctggcactttactcatttcctttgataaattgtactatgcagagctgtcaggaaccttcagatagcagtagaggactgcagctgtctaggtctgcggccacatcttggggacacactggactgttcccatgtgcagggttcagcagttatgtgggagtgctaggggttaggcttttgagcttgaacgcctgcgtgtgaacagatgaaaaatccttcagtacccaagtcccagtctgtcctatggggagcagtttgggggcggccggcagcaggagcctgggaaagaggccctcgccaggtgatggcagggccagggtggcctggggcacccagcggaatgtgcttagtatttggtcaccagccgtcatcctgggcttttcctactgtgtcttgttacaaggcctcagcaatccacagaactctctctccttccttccacctgtcagcttctctgcttctgagataagaaccatttgtgtaacaccaacacttaacttcagaaagacatgcattatgtggtgtaatcaaacccgatgctttcagatgacctacttacatcttcaatgtggataagataaagaacaaaacacatgcatctaaactgctgggcaatccagttgacttttaaatgtaagaatggaattccaaacacttaacacattcagctatatgacagaaagtaaatctatggatatggtattttgtgaatgatcttttaaataaaagaaaaccttacgtaatatttaaaaaaaaaaaaaaa

SEQ ID NO: 2692 - DNA, 1180 bp, Homo sapiens
  misc_feature (25)..(25): n equals a,t,g, or c
  misc_feature (35)..(35): n equals a,t,g, or c
  misc_feature (40)..(40): n equals a,t,g, or c
  misc_feature (1174)..(1174): n equals a,t,g, or c
caggaaaccagctatgcccatgttnccgccaaggntctantcggcctcccctatagggaaagctggrcgcctgcaggtcccgggtccggaattcccggggtcgaccccacggcgtccgataaaatttagtgaactttgtaatgatctatgtgcacttttacttgtaaaatggaatttctgtatgtttatacttgtaaatatgattgttgttagtgctcctgttgctcatggtgtcctgcctcgcatttgtgattctgttaatgacatgtatcttaactaatttcttagtggtgttgtaatagggagatggggcaggtggggggttatttgtaccactgaatcttcattaatttggttctttactgttttgaggggagaaagaacgtgaaatggtttgtgtattattgaattttaagcaatattttagaagctgtgtgactgctttaataactttttcccagtgttatttgaatcatactacccgttatactaaagctgaatgacaattgtgtgaaagttactgccttcataagatcaagtcaccactgttacacagctgacatatagtgtattacctttgcagctagtaaactataaagtttagatattgaatctcgttacagggttatttatataatgtgacattattcagtactgacagactacatgaagtagttttaaaatctagtgctatttttattttaaaggttagcaatgaggaggaaatgtgatctggctgtgtttgtcttctgtacaaagcctgaagtgcttatggttttttggctaacagccacagagggcaaagtttaagactttcttgtaaggactaactgttcttttcaagctactgtttgtttttctaaaagcaggatttgcttccgtaggaggcaagttccttgatgtggaatagtgcaacctgtatatgggttattataataggaaagacatttgtacttgcacagtttaaatcattcttaaattttgaacatgtgaattgtcccaaaaaatctttaattttttggtaatttttactctttttgtgcacatgttgatttcttaatggtaaatccttcatttaaagatagtgttctctgttgagaatatttacatggaataaaacaatcttttcatggcctgttaaaaaaaaaaaaaaaaaaaaaaccccggggggggncccggt

SEQ ID NO: 2693 - DNA, 2056 bp, Homo sapiens
  misc_feature (2038)..(2038): n equals a,t,g, or c
  misc_feature (2054)..(2054): n equals a,t,g, or c
gccttagctttcagtgtagctgggactacaggtgtgaacacagcttggaaatctcttaaccatgggagttaagtctcaaaattctggtgatacaagtggttgaaacttaaaactgtatttaaaaaataggattcgtgaatttgagatagttcataagtctgcaaaaggctgtataaatacatattttacatttactattattaattttgtagtaaatttgagtacagcactctctttatctgtggaaacttcagactctcccctattactttaatttcagtgagacattattaaatataagtgggcttacacatttgttttgctttactgacaaataatacacaacttggaggcttttttttcctttctattcttcctctaaatgttcaacacttttctgattttgtgatttgaggttgtttaatagcttcctgaggctccattgagaccgtatatacgtgacacttaacagtctagccttcctcggtacatatagatatatgatggtggctttgcctgtagtaaattcatgccaaaacataggctttcagtgcctattacatatggctttcagctctctctactgagggatgtaggagtttatttctgaggtctgagcctcttttcctttacttcctttactctttcctaagccttctttataaaaactatgcatgttctattgttttcctttttgattccctttcttttattatccccagtaggagtgacttgtaattctcatatgttagaaaggcagrtctcctggttgaagaaaagatccacccaagcaagtcagcatgtttaataatttttgagggggatctcaaatgtgggaaggattgttatataagacaaccaaatgatgacatgagacaataaatgctataggaattatggaggaataattagctatttattttcttggttagggaagagatattattagttgtagaagtaattactaacttctacattttttattgtggaaatcaaaaatatatatatgaaaataaaatgttataattgacttcagtgtcccataaaccagcttcaacaattaccaaattgtgaccaatctttacacacatgcacaggtgtccctcagtatctgtggggcattggttctaggaccacttatggataccaacatctatggatgctcaagtccctgatataaaatggtggactatttgcatataacctgtgtacatcccgtattatttaaatcatccctagatcacttataatacgtaatacaatgtaaatgccatgtaaataactgttatactgtattaaggaataacaacaagaaaaatgtacatgttcagtacagacgcaattttttttgtgtgtggaatattttcattccaaggtcagttgaacccatggacataggaggctgactgcgtgtgtgtgtgtgtgtgtgtgtgtgtgtgtgtgtgtgtgtgcatacagacacacatatttctgaaatgtaaatattctctttttaaaaaaattattatcacagctaaacaaattaccagtaattcttttatcctcatatacccggtgttcagattttctagattggctcctaatttttttacagattatttgaatctgattcaattcatgtactgtaatgtttgataacttaagtaccctttataggttctcttttacctcttctttattaaattccttgtaatttgttgtactaaatagattgtcttctagaatttcctgtagtctgaattatgtagtattgtttcacatgttccagtgtcctcttatttcctgtgagttggtagttagatctagaagcttgattaaattcagattttctctctttagatcatcaactttagatcatcaacttggatcatttgtttcattttgcttttgatatgttgttttttagaattacctcttaaaattttgatttaattttataatcatgtaaaatgtttataaatttccaaattcagatcagcaaaacacaataaaatctattcagagaaggcaaaaaaaaaaaaaaaaaaaaaaaaaaaanaaaaaaaaaaaaaaanaa

SEQ ID NO: 2694 - DNA, 825 bp, Homo sapiens
aattcccgggatcgacccacgcgtccgacatctttcaattgggagaatatctgtgtctaagcacaatatcttcacactgtgctgtattgctgctgaactaaatgcacttttccccacatatggggcactggcttcaaacaattcagttcagtatcattacttttaatctcatctttcctttcttggtagttgttaatacagttatggaaaagaggcacattgcatagaagccattggggagttcagtggaagttctgtaagatgtgcatgtactatttgatgcgttttctttgcttcactgcttttaatacttagcagtattgttggtctaagtcaatttgattattgaggagtctcagagcaaggtgcgttctagatgtcatcctaaaaaacacttcatatataattaatcactattttgtataattacatattgctgcttgtgtgtttttttttttttccatttagttgggcgttgtgttttacacaaaaccatttttgaattaaggctatgatattaagatagaaatttggactgttgttctgcttttcctggcactcaaattcatgactagttttgaggtcaaacctatgttcgtaatgagagattttataaggatcaactaagaaatggaaggcaggtgaagatataaaaccctagaatgcttaaatgtgctgtaaaactattgtagatgtcactggattttaccaagtaatatcctttcttttttttttccccccatctgctgtggcttttcagttaaaattttgtttataaaaggaatttgtttattacagctctacctaaaaaaaaaaaaaaaaaaa

SEQ ID NO: 2695 - DNA, 3107 bp, Homo sapiens
ggaatgtttcaaaaggatatgatgaactgaggcttatcgagtcagggagcagaaagctgaaataagaccgctaagctctaaacaaatccgttaaagcttcacagggcagagcagaacaaaaatagtatactcaatgtatagtcggaaagcagccgaagaagtgaagcgagaactgataaagttaaaagtgaactattacattctagaagagtcatggtgtgtaagaagatccaagcctggttgcagtatgcctgaaatttgggatgtagaagatcctgccaatgctgggaaaactcccttatgtaacctcttggtgaaggattccaaacctcacttcaccactgtattccagaacagtgtttacaaagtcctagaagttgtaaaagaatgactgctacatgacctgctgcctacggagaactacatctgtaatggttttaatgttttgctaagtcatgtgttgttcatatcccaaaaacttttataggtaactgttttcaaatagaaaacgttttatttggtcaatttgaatgtcattctaattataaaaatgacttacacctttatcaattggttactatttcaatgcaccctttaaaatttgctatgcaaatgagtatatgcttgtacttgactttaatatttgtgctaaagtgagcaaagctaactgtataaagaaaacacagtgggttgtgacaaggatgacatgaaaatacaggacaattctgacaatgtaggggctgattttatagtgtaagaactattaatgccccttgsttcttttttctgcctcttgctcttgtcttttggacatttcagtgawtgtaagttcttcggtcatgtcagcccctgtcatcaacttgagttacagtagatggggcagacatggagtgtttgctatatagaactatctgtttgttttacttccttgtgcgctttttgttctctgwtctcttgttaatgaagcttttcctgcccattattaatccaaactcttggaccttgtggttaggaaattcccttaacttccagccatatggcattatcgtgtctctttctctctctctcttgctctctctcttctcctcttccccatattttctgtcaaataagtactgtttactcatttagttgcttatcaagtacttattcttggttttaaaaaaaattaatggtaactgtatttttctcatttttagcattattcaaatgtttatattttaatacctttaaaccactttaaagttttttcatgtttaattatagttttaagaaaaactattttgaacaaccccaaatatagtgcatctagaaactaatgtatatttgattagacatcatttatagtggaacagtagactgtagtacatggtaatttttcttttactattaagatacaataaaacatgactaattttgctgtcaaaaatgtaaagaataatgataaatggagtttttatattttacttttaagattgcctgtctttaataagacaaagccttaagccttatgttataattttggttctaaaaaccatcatttcagtataaggaataagtatatttcgtcctcctctttagtttttttcttcctatttatttttattttgaaaaatttctacaccttctttgaattccttgtatgaatttttgtttcttagaagttaatttgtgtgaaatgagattcttcaaaacgatgaaacctcatagctctgagaaaaggttttagggttttaaattctaagcaaagcgtgactatggctgacagactacacatttaattatacagcttctctttcttaaccacaggcagattaacctcattgtggattgtccttcagaccttagtcctcaggcatggtttctggtgcccactcctggaagccgctgttccctttctaccttcttaccagagcccaagggcaggcctggtcccggggaagcagcagcttgctgacataagtcagctgcaaaggctgaggagtgtgccctcagagaagcaccgccccccagtcttgtgccagcgcctagagccgcagctcccagggatgctccttccctggaggcagcccaggagagggactctggcagcgttcttcagatttgtggccactgtttctcatttgctggttgactgtttttatttcttaggcttttgctagttttagaaaatagggaagcagcccttgatttgtggattaaaagcaacatttgagcgatgatgcacaacagtccaggaaaatgggcggtggacacttgaggctgaggatgggagttgacatgagcagggagagggaggtgcgcgctgcttatctgtgattgttgctcacctgagtgtggctgattgtgtacatccagcagttacaatttttaaaaattatacttttacatttattttatatttttctcacccccagtaatttccttccaaagaagttcacatgtaataagtagaaattctgtataggaaaaaagcattaaaaatactattataactgcttcatttgctgggaaccattaaaagtaatataaattagctttttccagaaggatccttttgtagcagtgtttatgaatgtaacccccagcaaaatatggctatatattaggggagccagtttggagcagaggcctgaaggtccctgctatgcagccgtggccacagctcgcagcccaagcactgtggagcatccacacctttgatggcaatgcagattggtagcaggttccataggcgtacaaaacagtattaaagctcagtgttttgcatattgttagcatttacaaatatttttgctttagtatgaggaaagtaaggatgggcaaagaagcgatcaaaatagctattgctacaacattttcgaaaacaaagttggggctgtatttctttaaaaagataagcctctaaaaatgcttggcaaaaaaaatatagtgttaaaataggccagtgatattaatgagaaaatgaaagtatgtatcaggaataaagtgatattgcataggagtattgtatttttatgaattttatgccagttgtttacatgtactatatatgttaaattaaaaaaaatcatgagtaatgaaaaaaaaaaaaaaaaaaaaaaatt

SEQ ID NO: 2696 - DNA, 939 bp, Homo sapiens
  misc_feature (935)..(935): n equals a,t,g, or c
  misc_feature (938)..(938): n equals a,t,g, or c
ggtcacgagcggaaagcgtggcggctgctgctagagcctttccctttaccgcacccaaggagctggagcgacaacaacgacgtcgtttccgtttccaccacctcttcctgttcccgtccttgaggacgccgtgccgggtcagtgttagcctccagccctggttgtggaaggcgacagaagtcatggcgatgtttgagcagatgagagccaacgtgggcaagttgctcaagggtatcgacaggtacaatcctgagaacctggccaccctggagcgctatgtagagacgcaggccaaggaaaatgcctatgatctggaagccaacctggctgtcctgaagctgtaccagttcaacccagccttctttcagaccacggtcaccgcccagatcctgctgaaggccctcaccaacttgccgcacacagacttcaccctgtgcaagtgcatgatcgaccaggcacatcaagaagaacggccaatccgacagattttgtacctcggggacctgctggagacctgccatttccaggccttctggcaagccctggatgaaaacatggacctcttggaaggtataactggctttgaagactctgtccgaaagtttatctgccatgttgtgggtatcacttaccagcacattgaccgctggctgctggccgagatgctcggggatctgtcggacagccagctaaaggtgtggatgagcaaatacggctggagtgccgacgagtcggggcagatcttcatctgtagccaagaagagagcattaaacccaagaacattgtggagaagattgactttgacagtgtgtccagcatcatggcctcctcccagtaacttcaggtgtttaataaagatgtgttgactcagaaaaaaaaaaaaaaaaaaaaaaaaaaaaaaaaaaaaaaaaaaaaaaaaaaaaaaaaaaaaaanggng

SEQ ID NO: 2697 - DNA, 588 bp, Homo sapiens
ggcacgagcataacttaggccgggctgaccatcatcttggatggcgtcgtccttgttggcgcagattgtgttggggggctggttgtttgtgggcgcctttaatattcaaaggggagaatactgttctgattgaggcattatgcccgctgagttgtgatattacatccatcatcttgttcaaataaatagcgccgtatctatatgtcggaatgaataaataaaagtgctgcagcagggaggttgggctggaaaccagaggcccacgatgctctttgctggctttgaaatgcccttgcaaagaagtattgaaaatttaccagcccacaatgagtcttttaaatctccttttccttgctaccaccaacccctgcaccaaccaagaatacgttgccagcagagttctttatttagttggcattggtttttattgaccctgattgaatttgaaattgtaaggctgagagaggatttgcaaaacatttgaatacattttgctcacggtattgttttgtaacttggaggaatttatctttttagccaatcaggttaaggtcaataaatttggtttttaaaaaaaaaaaaaaaaaa

SEQ ID NO: 2698 - DNA, 2317 bp, Homo sapiens
gctcgtgccgagaaaacagaggctcttcggttgcagtatcgctacttagacttgcgtagtttccaaatgcagtataacctgcgactgaggtcccagatggtcatgaaaatgcgggaatatctctgtaatctgcatgggtttgtggatatagaaacccccacattgtttaagaggaccccagggggtgccaaagagtttttagtaccatccagggaacctrgaragttttattctctccctcagagtcctcaacagtttaagcaacttctgatggttggcggtttagacagatattttcaggttgcccgatgttatcgagatgaaggttcaagaccagacagacagcctgagtttactcagattgacatagagatgtcatttgtagaccagactgggatccagagtttaattgagggtttgctccagtattcctggcccaatgacaaagatcctgtggttgttccttttcctactatgacttttgctgaggtgctggccacctatggaactgataaacctgacactcgctttggaatgaagattatagatatcagtgatgtgtttagaaacacagagattggatttcttcaagatgcacttagtaagccccatggaactgtgaaagccatatgtatccctgaaggagcaaaatacttaaaaaggaaagacattgaatccattagaaactttgcagctgaccattttaatcaggaaatcttacctgtattccttaacgccaatagaaactggaattctccagttgctaatttcataatggagtcacaaagactggaattaatcagactaatggagacccaagaggaagatgtggtcctactaactgctggagagcacaataaagcatgctctttgttaggaaaattacgactggaatgtgctgaccttctagaaacaagaggagtggtgctccgtgaccccactctgttctctttcctttgggtggtagatttcccactcttcctgcccaaggaggaaaatcccagagagctggaatcggcccaccacccatttactgctccccaccccagtgacatacatctcctgtacactgagcccaaaaaggcccgtagccaacactatgacttggttttaaatggcaatgaaataggaggtggttcaattcgaattcacaatgcagagctgcagcgttatatcctggcaaccttactaaaggaggatgtgaaaatgctctcccatctgctccaggctttagattatggggcaccccctcatggaggaattgccttagggttagacagactgatatgccttgtcactggatctccaagcatcagagatgtcatagccttcccaaagtccttccggggacatgacctcatgagcaataccccagattctgtccctcctgaggaactgaagccctatcatatccgagtctccaagccaacagactccaaagcagaaagagctcattgaatcatgcataccatgcagaaagttgagcttttaggttttgtcctctttgcttccccaaggctaaagtcagatctagagttctgccacaggtctaacaatcaagtctttagatggaaggaatccaggcaacattcttcaccacaacgaagaaacagataaaagatacccaattttgacttgatttcatgcatcatttggattttttttggttaggactttttttgaagttcctttttacttaggtgtgaaagatggttctttgttgaaataatatagtggtttagtgttttcaaatcatgtttctcatacccagatagtagattattcacttaggacagaggtaatcaaattatgtgtgaaatgtaggaaaatgcttgcccctgtaaactagtgagttgatggagcatttgcttcatcatcctcatcaagagaatcatataaattaagctttataatgacatttcaaccatcaacataatatagtgaggagtagcataatattttttaataatgcagaaaacatcactgaaatgagagtcacaaatttttcttcagtgtttcagcctgagtaagttacataaacctcgcttagcctcccttcctgctaatgtgtaaaatacatacttgccctggctacctcaccgggctgttattgctggaatcagaggagataacatatatggaagataaagtgaataaaagtactttgaaaaactawaaagcattccacaaatatgagatgatggtattatccatccataaataggtagatatatctctattttatagtttcagattaaacaaaactgatatcaatagtaaaagtcaaaaaaaaaaaaaaaaaaaaaaaaaactcgag

SEQ ID NO: 2699 - DNA, 1290 bp, Homo sapiens
ggcacgagctggtgagtgctccatagtttccttacctgctgctacagaatgttattttacatccctatggctattgccaaggctacaaaaaaggaaagctatatttgtatgcaacactaaccttttgactgctaatgtatgtttctgcttgctgtgccttgttatggctgctttttttgtgctaataaagtatgtttggtgttctccttgtatatctgctgttttatacatttgcaacaatttctcttgtaaatggaatggtttggggtttttaaataagcataactaacaacctttctatagttaatgcagagttaatgaacagtctaatattgacttatcagaataagctaactctaaatttaatgctctacatcttatcagtcataattatatatactgtggaacagtatctgtagttactgcaaattactgtacagtttaggttataacagaaaactgacagagaagtaataaacctattgatttctctgcttataaatgaaagattgaaactatccaatgacatattatagtaaatgagtatctgtaacctcccactgcatcagaagcaggttaaatgaagtcttgtgaatttgtaatagatcagtaccatttattggtttggggaccatcttaattaaaaataaatgcccaaaatgtagaactttaaccaaagacttgtcccttttaaagcaaaatggggattgaagggacttataatttctgttgtttctaattaaagtccctgaagatcatataccaaagtgtttgagaacttcatccaaacctactttaaagcattatgtgcaattaagttgttatgacataattatattgcctaattgttgggtcttttttcttgagcttataatgtacctggaaaataaacctcttgagaaaaagaaaagttcatactgattattggaaaaggactatatatgtgagcaagattgtgttttagagaggaaacttgaaactccaagaaagcacttgatgtttttatatgcttgtagcaaattgatgttctaactgtagttttatagaaagtattaatgcttttatgtatttcaaaactttcatatgttaaatggaaattgttttaaatgtgtttgagtttatgtaagcatgtatacactgtgctaaaagtcacatgtttcagtttgtgtataatattaatatgcaatttttggtttaaatttttgtcttaaaatattagtggcttacattttaaaaaagaaaaatcaccagcatgaacttgaaaaaaaaaaaaaaaaaaaaaaaaaaaaa

SEQ ID NO: 2700 - DNA, 2290 bp, Homo sapiens
  misc_feature (2283)..(2283): n equals a,t,g, or c
caaaaaggaaaccctaacagctctgaactctggttttatttttcttgctgtatttgggtgaacattgtatgattaggcataatgttaaaaaaaaaaatttttttttggtagaaatgcaatcaccagtaaagaggtacgaaaaagctagcctctctcagagaccggggaggcagagtactactagaggaagtgaagttctgatggaatcatgcctgtcaaatgaggtcttgaagcggatgcccaaataaaagagtatattttatctaaatcttaagtgggtaacattttatgcagtttaaatgaatggaatattttcctcttgtttagttgtatctgtttgtatttttctttgatgaatgattggtcatgaggcctcttgccacactccagaaatacgtgtgcggctgcttttaagaactatgtgtctggtcacttatttctctaaaattatctcattgcctggcaatcagtcttctcttgtatacttgtcctagcacattatgtacatgggaaatgtaaacaaatgtgaaggaggaccagaaaaattagttaatatttaaaaaaatgtattgtgcattttggcttcacatgtttaactttttttaagaaaaaagttgcatgaatggaaaaaaaaatctgtatacagtatctgtaaaaactatcttatctgtttcaattccttgctcatatcccatataatctagaactaaatatggtgtgtggccatatttaaacacctgagagtcaagcagttgagactttgatttgaagcacctcatccttctttcaatgcgaacactatcatatggcattcttactgaggattttgtctaaccatatgttgccatgaattaactctgccgcctttcttaaggatcaaaaccagtttgatttgggaatcttcccctttccaaatgaaatagagatgcagtacttaactttccttggtgtttgtagatattgccttgtgtattccacttaaaaccgtaatctagtttgtaaaagagatggtgacgcatgtaaataaagcatcagtgacactctaaaaaaaaaaaaaaaaaaaaaaaaaaaaaaactagttctcctccaataatgtccaaattgtaatgtgccttgcttcaagataaagtgtatttgggaataatattataaacccttacaaattttatgcatgtatctactgcatccttcaactctcactagaaaatcttttgaaaccaaatggattaatttatggctatttataatttgctttgacatctcactgttggaaattttttaaagatgagatttgcctttataatgtaaattgtgatttttgttttacatgtgggtttctatagttttaattttttcagcttttaagatacgagttttgtgtaatttggtatttttaatcatttatgttattttaaaagctcagaatatcacattgaaattactataaatacatttaaaattatctattttagatctaaggaaatactacagagatattttcatgggttcagtaacttttcattttataacattgggcacggtacagagtgattgtcacataaggtacttgaagatttattagtttaattctatttttacagtaaccttgaattcttctgagttttgcatgtattaaattcaattaatgctgaacatgaagagtaaagtatttatctgaaagaagtttctgggttaggagaagtaatgaatgtatccatttgtacatggtttacatgttgtggatgctttgtaaacattttcctgtatgtttaaattgtgtttcagcaggatgtaattgcccttgtgtgtagttaaaatgagtcatcatctggtcctttgtgaaatggaattcatggtattttctgtaacgttttcctgaagctgtttctggagagccacacatttaaatacagacagctttcctgatcatttgatttattgtgcacctgatttttggtctaaaaggaattattgccacaatatattttatttattctttagattttagccttgtaagttaaagtgctttacatgatgatgtgaaaagctgtttgtccctttactgggtttggggggttgttaaaagatagggaatgaagaatgcaaaatggtttatcgttcaaactgtccactctgatccaaccctgtactgatagtacttcccagtatgatattgtgatgtttcatacaatgcagtgaacataaccaacttgttacctaaataaagaattgataaaaacagtgtgacatattaaaaaaaaggggggcccggtacccaattcnccctata

SEQ ID NO: 2701 - DNA, 1934 bp, Homo sapiens
gcaagaaaataaaataactttctacctctaaattgaggcttaggagtaaaaagcattttgtcctaaatttatcatttaaaatagcatcagtaacttttgagctcatgtcaatcaagcattggcagtcagagattttatagggaagactaagtaaatccagtttccaagaacctaaactgattgaggctccaagagtcagaccaacaaaagttttattctgtgttgtttactggtaagaatattattatcttgatactacctctcaagggtattgttacaaaatgccacttatggttaaagagatagatacaaagagttctatttgacagaagcttgaaactctggcatctatctgcccaacgatgggggctttcgttctgtaatttaatcctttgtagatacattatttgtgtgtaattttatacgtgttcatatttttctcattttgcattgtgtaaagtgtacaaaatctcaaagtataaaatactgcttatattgcttgkaatttacagtgtgtaaatattttctaawtgtgtacattgatgggggggacaagtgggttattcaggtttttttttaatgacccttttgtattgcagtttcaacagataactgtccatcaaatttaaaaccactttgatacatttttatttaacagttccaataagaaaaaaatctctatttttaattatatttctcctttagaaaaaaaatacttcatggtccctctaaaataaatggccagacctcagtttaggcccttgtatttatgactctggtagaggtcttcagactccaggtcatagtccagtcagtatttgcatttgggttctcatgaaaactttgtgactctcttttagcacaagtagcccatggtttttcttccaaatcaagtattttacttctcccttgagtccccatgctttgtctccctcctgctgctattgcccggtgaatgggatggtagagagggagaaatgttcattgcacagagaatgtcaggccactttggggacttggcaaacgaagcttgcactgagtggtggtgtgtttggcaatattactgtgccaaaaatcaccttgtctaattttatggatatgtatggcaaacttattacccttcttgcaagctgcacattaaggtacttgtaagtgtttatgcttttgtgtgtaactgtttgccttttctaactgcttttcttgttactgaaaatataattctactagttttatcacattaagaggctctccatgcacaaaatgcattgatgtagccgtaaagtaacagcatttgtacattttctatctcctgatggcagtggtgcctttgtcaccttttggaaggtttgcattttgtttctgctttcaagcgcaaatagtagcttgctttcagcttcacaaaaatctcctcaaatgtaaaagatacaaaatggcgtgttatcatccaggcttagttggagtatttgcatttttatttttatcaaaacaaatataattggtggggactggccagtaataatgtgtggcgtctttaagccaagagtaatttttaaattaaaaatgaaaattttaagaggtagcccattaaacaagctactgagttggagaattaggggatgactgtggtggtttgtcgctaaggaggcaacagtagggtccaggcggcggggcacgtagagcagttagcatgatccatggttattccttactcatgaacagtgtcggcgcacctcattatctgtgcatttgtttttcctgggcagtcctgtcagccagttaatccaccagctcttaggaagtaaatacagatttttttctttccttttttttttttttaaagattttatactacatcttgttaaagtcctatgaatgtgtgtgtgtgtgtgctattaaaactgctttttctcagtttgaaaaaraaaaaaaaaaaa

SEQ ID NO: 2702 - DNA, 357 bp, Homo sapiens
  misc_feature (22)..(22): n equals a,t,g, or c
  misc_feature (39)..(39): n equals a,t,g, or c
  misc_feature (171)..(171): n equals a,t,g, or c
gcctgagcccaccgtgcccggncccacccgccattaatncctttggccctcctcccacytactagcccygaggctgaaagtatttaagatcaatgaagagtgacttaggtcctgagttgcagcsttcccttatcctacagaatacgataatatctgcctatgagaaggatncctgagacattgaaataagatgattatataaagtgtatacaagcacaacataactttcttctcacatatccatcacagtgcaaatctaaccccttaactctgtaaaactagattgcaaagaatattgcatgtaatatttttcctttgcctcagaaatgggtaaacaaaatttaagaagaaaaaact

SEQ ID NO: 2703 - DNA, 1469 bp, Homo sapiens
ttctcaaggttttgtgagagttttgactggatgtggccctgcatgaccctccttctcctgtacttcctctttcctttccaaatgggaattagaactgtggggcagcaacagtctcagagccagtgagaggccagcttagagaatgcttctgagttagtgggactctgtgtcacaagtaagcaaatgaatatatgaaagaaattatggagataagttagattcttggtaatacttaaatgtcttgctttctactaaccttttgttactaaaggtaaagggtataactcaaactttttgtggacattcttttcaaaattttttaagaaccctgtactataaaaggttgagtaaaaacaggaaagcgtgctataagttcaaatctgttgtattaccctaaattagataaaccaacctgaattatagtagatttctcaatagatgaggaactgaaaaatactatgtaaaatatcttccaaaatgctttttatactttttttatttgtaatttggtctatctaaaatgttcgttagcttaacttaatgggcgttattggattcatatgactaacgtttcctcagtattgtaatgcttgaaatatttgaaagaaaaaatgttgttttttagttgaaactggtatatataattcagtgcttggcaggttagtatatttttatgcatttttcagagtcagcagtttcaaatcttattgttatcatgttataaaattttagcccacatttcaggctccgtaaatcatttgagccattattttttcccaacaaatggtgaattttttctttaaatgtggatatatatgttgtaatttatgattcctggttatgtatttttgtgggatcctgcagtaaaattgacttttttgtgtctttgggagatttaaattgcgctaacagtgttgcgcaaaaatgagttcatgccatttaacatattggattttaattattaactgtattaatttactatgaaatggacatccttttaactaaaatggaattgaacattgcagttttcaaatatttttccttgttgggtctggaaaaggaattctactttgatctgcatagaaaattttgatacaattttttgaaagttcttaggtgaaacatttacccattaaaaaggaagcagaaatactgagacatgaaaggcattatcaactaactctagactctagaacccattctagcatatctcacgtgcaatttttaaaaataagttaataattcatctcatatcaacaaaagcctttgaaacatgggttttcactagatatcacctagtgctaagataaaaaccaaaacaatatcagaattacatttatgctctaaatttgtagttgtccattgttgtgcttagtaaatgtgtgtcattaatgctgtattctcctagctattatggaaacttgtttaaataaagatatggatataaaaaaaaaaaaaaaaaaaaaaaa

SEQ ID NO: 2704 - DNA, 567 bp, Homo sapiens
caggtttataactaaaaaggtttaagctgctaaaactatttttaagagatgtgaaatgcagtatgggactatctttttttcctcctctaagcccaaagattaactagagtccctccaaccttatagattgttggctttcacaatcttataacctaggatacaggtagtttcgagtatggtgccagtgatgttttgtttttgtttggtcaaggggtaggtgcaacccaatggaccacttatgcaaaagatgtaaactcttgcataatacattgataacatgttttgccaactttaaatgcttaaacataagcgaaaccagtagcaagtatgtgggtcagcttaaaaattttgattgttaatgccctattttctaatttggcacctcttgatgcctaagcaggtaagcagatgcctaagctgtatttctccaaataaatcaagatgaagtactgcccaagttaaatattgatagcctaaagacaagtttatgtagtacttaatgtacatgatatgaatgtgaagcataaaattaaataaaatttttccccaaaaaaaaaaaaaaaaaaa

SEQ ID NO: 2705 - DNA, 1679 bp, Homo sapiens
ggcacgagctggtgcctcacacagcgcacgcgggagagcagaggtatccatttgaggccctcttccgcagccagcactacgccctcctagacaattcctgccgcgaataccttttcatctgtgaattttttgttgtgtctggcccagctgcacacgacctgttccatgctgtcatgggccgtacactcagcatgaccctgaaacacctggattcttatctagctgactgctacgatgccattgctgtttttctctgtatccacattgttctccggttccgtaacattgcagcaaagagggatgttcctgccctggacaggtactgggaacaggtgcttgccttgctatggccacggtttgaactgatcctggagatgaatgttcagagcgtccgaagcactgacccccagcgcctaggggggttggatactcggccccactatatcacacgccgctatgcagagttctcctccgctcttgtcagtatcaaccagacaattcctaatgaacggaccatgcaattgctgggacagctgcaggtggaggtggagaattttgtcctccgagtggcagctgagttctcctcaaggaaggagcagcttgtgtttctgatcaacaactatgacatgatgctgggtgtgctgatggagcgggctgcagatgacagcaaagagttgagagcttccagcagctgctcaatgctcggacacaggaattcattgaagattgctgtctcccccttttgggggtttagtggcatttgtgaaggaagctgaggctttgattgagcgtggacaggctgagcgacttcgaggggaagaagcccgggtaactcagctgatccgtggctttggtagttcctggaaatcatcagtggaatctctgagtcaggatgtaatgcggagtttcaccaacttcagaaatggcaccagtatcattcagggagcgctgacccagctgatccagctctatcatcgcttccaccgggtgctgtcccagccgcagctccgagccctccctgcccgggctgagctcatcaacattcaccaccttatggtggagctcaagaagcataagcccaacttctgatgtgccagaaaccgccctgagatctgccggtcatctccatggacttctgcaccccattccatacccttcttcacctggggtacccttccagttttccccttgcttcccaggcccttgacatggcttacctgccttcactcccagcaccttgcccaacaggataagctggatccccttggccttctgaatatcccagtgtcttcaggtttcccaagaccacttccctgtgggcttccaaaatggcctttatcatttctccagtctgtcaccctcctttcctgctcccatacacccaaggcttgtttcttcccctgtaaaaaccactgcctcaatctctggttcactcaactagtcaccatgtcctgaggcatgaagcctcctcagctcttggaattgctggcaaggggtgactgcctctgagtcattgtgtttttcaaagtgatttcttttctgtagctttttgacctaagatctcagcaatttgaacactaacctctcccctcctggctcaagaattactccgaagtcagtctgcagaaaataaatatttagtatgacatgaaaaaaaaaaaaaaaaaaaaaaaaaaaaa

SEQ ID NO: 2706 - DNA, 1598 bp, Homo sapiens
  misc_feature (1508)..(1508): n equals a,t,g, or c
aattcggcagagcatagtctttcaaatttggacatttaaaaaagaaacttttactgtagtcatgaagtagtatcaaagtttaccacaagtttgtattgagagaagaacaaacaatatatgctaatatgaaaaacagctctacttagaaagctactgcttgggttttcttattaggcatagttctccagactgagttggttttactcatctacatgatttttccttgccttatggaacagaaattcaggcccactcgaattcagttattttagggctctttaaaatccagtatttgtgatttaaatgatgcggagggactttcattacctgtgtctttgcttatttctctctggccctcagaacaccccaccctgacctttaggggaaattgacagaggcagagggtttcacctgcctcaattgtcaccagccctgttacattcttccttccaagccttagcctcacagggaccttctcattattgaacaawtgccttcaaagcagtagaatagcccaattgttatggagattaaagataccgattgcaaaactcctgtaaataaaatcttcactgacaaacccagtttcttttcataggcttttcttctgtaatctctttctggcagaacatctcatgttttgatgttagagattcagttaccaaccacagtaaataaagcaaaataataatagaaaaatagtatagaactcaccctaaaaacaaacattggccaaccatgtttattttttgtctctctttgcactcctgagaattgataggggaagaatgtaccacctctaattcaggtgatttctgattagcaagctatggaaagtcttcaggttgagttttagccagttcacgctcccctaaatggcatggaatagactattttctgttttaagaaaaaatagaacaatggcactaaatgcttgactgaatgtttgactaaatgttgactgaatcatggataggaaagattgggcagaaaagacagccactgcctccagacacaggatgccacaatcctgggcaccatcattattccatacaaccttagggtcatttttagggtttagaactttctcaatagggtttcaagattttgaaaagtgtcttccaattctgatctccgtagatcctgttatgggaattaacctttttggaaggggattcttgttcttaaagatgaaattccctactttctttcctggagggaatcagtatgggcagagggaagaggagatggcgattctgacctgtgtgtctcatgtcacctaacacctatggggtggcatgaaacttgagctttaaaacacaccaggggccaggcacagtggctcatgctggtaatcccagcactttgggagaccgaggtgggtggwtcacctgaggtcaggagttcgagaccagcctgccaacatggcaaaaccccgtctctactaaaaatacaaaaatcagctgggtgtggtggcgggcacctgtaatcccagctacttgggaggntgaggcaggagaatcgcttgaacctgggaggcagaggttgcagtgagccgagatcaggccattgtactctagcctgggtgacaagagtga

SEQ ID NO: 2707 - DNA, 824 bp, Homo sapiens
aggggagagacttagttacacaaagtcttaaaatattccttgattgtgctgtgtcaaagcatcagaatgggacaaagctgattctggagaaaggatgtacttgctgcccttcagagcctgagctccacccatgctggataagtcagaatgctggcactggaagggcccttaatggacagctcgtccaactccctcatcttacagatgggagaaactgaggtccggagaaactgaggcccagattaggagcaagacttgcatgcctagatccttctttgtgtgcctcttccctactgcaagctgagacccaggtcccctggtttggctggtcgtggctgcttgtaaagtgaaggtgcttctgtgactgaatgactccaacaatgtccaatccctaatcctttcctcaccaaagaagatggcccttggggacagcagcacttgctgagcaggagcatgagtcaggtgaccacctcattccagtttgctcaggactcgccctgttttagcactgaaagtctcacagcggctgggcatggtggctcacgcctataatcccagcacttgggaaggccgaggccggtggatcacttgaggtcaggagttcaagaccagcctggccaacatggcaaaacctcgtttctactaaaaatacaaaaattagctgggcgtattggcagatgcctgtaatcccagctactcgggaggctgaggcaggagaatcacttgaacttgggaggcagaggttgcagtgagccgagattgagccactgcactccagcctgggcaacagcacaagactctgtctcaaaaaaaaaaaaaaaaaa

SEQ ID NO: 2708 - DNA, 2023 bp, Homo sapiens
  misc_feature (486)..(486): n equals a,t,g, or c
ggcacgagcttgtttcagttttttcttttcttccaatggtactttagctgttgagtgcaggttacaacctatattgttatgcagatggcttctttaggaataacttttatatttatttaaaaatttttaaattatgggatgttttgttgttgttgttgtctttgttgttggtcatttgtcaatattcagtcaccaattctgctcacttcttgccatggataaaattgggtctttctggctaattaaaaaagacaactttataaaatggcactttaagcaagccatagttagttttattatttgtaatgcacatggcaaagcaaagacgtttgtgatgaaggaactgctcatctaagcaaaagatttgagtatgatatgataaaggctttctacattctaatttacttttccccccacttgaatgtgttttaaaggctaattatcagctcagtaaagcagtgagaaactgatcaaattgcacttgtnctcctacaagcaacctccacgcaaacacctcgtactgctacaggtgtgtcatttcctttaataggaccagggaccatgtaactgaggtgagggttgtagtaaatgctcccagtgtcagtatgcctgttaattttaaaagctcccttacttgcagagaacaagtctgcccagattccatgctttctataactggaggacctggcaaacctgccgcatgctgcacacatctacctacgtacacatatacaatagtattgatgattctgaacaataacagggtaaaacagttggtttgccattgttaaaaactgatttacagtaacttacaacaactgtacttttgttggattagcaaatcatgtgtttaaacaaatcccatatgttgggcaacagttcaaataagcacggagaagtgttgcccaaacttggttctctgactcttatgtatttgtaaggctgggttcaaaatcaaaacaaaaacccccaaaacagcaggcaaatgctttttaactctgacaccgttgccataaatccctgatactcaaagtctaacaagaaagacatggaaaattagcagcccattttcagaaagatcaaaatgatctagggttctaattgcttttgcatcctattcttacaaagtgatgtcccaacagggaacagtaggagctggagtgggatctccaagtcccagtttgagtgtgggatgtgcttccagcagtgccttccctttatgaaagacatcacatggcatccagggccaggcaggcagcttgaggtgcctttacaaaaaaaccgaactggggctgggaaaagacagttattgacactgatgtgcaatgaagtgacaagatgagagcagaatcgtaagagctttgaatttgaagtgagttttttccccccataagttatttattccttttttctgtgtaaatatatttattttactgtggagcgctaacatctggatcgtaacatgtgcagaatgtatggtaggaatgtattctcttgtaggaatgtaaatctgtattaaaagggggtccaagccaggcccccaggtcttctcattgtatgcacagtccgcattcatttttactcttctctaatatgggtctatttgaaatatgcaaaaggtatgaggaatgttttaatacctccaaatttttaagaaaagcatcaaagggttgatattttttaaagtttttttagtagcactttctctggatgacagaaggggcaaccacatgggcacccttgttcataccaaagggtgagcagtggccagagcctcctctgcacctctcgagtgtctttaccaattgagctttttatcgccatagccccttggagtgccccagctgccctgaggtcaatcaaggaaaatttcttaatgaaataagctccaaagagccaaagtatcaacttacagatcgtttttaaagcttaaatttatgaaccacctttgtggtaaacaatgaattatgaataccgcagggcagccttcttaaatgacaaatgtaaaaaaaaaaaaaaaaaa

SEQ ID NO: 2709 - DNA, 942 bp, Homo sapiens
ggcacgagtggctgtgcacctgtttgcgctcatgatcagcacctgcatcctgcccaacatcgaggcggtgagcaacgtgcacaatctcaactcggtcaaggagtccccccatgagcgcatgcaccgccacatcgagctggcctgggccttctccaccgtcatcggcacgctgctcttcctagctgaggtggtgctgctctgctgggtcaagttcttgcccctcaagaagcagccaggccagccaaggcccaccagcaagccccccgccagtggcgcacagccaacgtcagcaccagcggcatcaccccgggccaggcagctgccatcgcctcgaccaccatcatggtgcccttcggcctgatctttatcgtcttcgccgtccacttctaccgctcactggttagccataagactgaccgacagttccaggagctcaacgagctggcggagtttgcccgcttacaggaccagctggaccacagaggggaccaaccccctgacgcccggcagccactatgcctaggcccatgtggtctgggccttccagtgctttggccttacgcccttccccttgaccttgtcctgccccagcctcacggacagcctgcgcagggggctgggcttcagcaaggggcagagcatggagggaagaggatttttataagagaaatttctgcactttgaaactgtcctctaagagaataagcatttcctgttcttccagctccaggtccacctcctgttgggaggcggtggggggccaaagtggggccacacactcgctgtgtcccctctcctcccctgtgccagtgccacctgggtgcctcctcctgtcctgtccgtctcaacctccctcccgtccagcattgagtgtgtacatgtgtgtgtgacacataaatatactcataaggacaaaaaaaaaaaaaaaaaaaaaaaaaaaaa

SEQ ID NO: 2710 - DNA, 884 bp, Homo sapiens
ggcaacaggtaccagccagtgctggaaggagctcaccctgggaggtctcgtcagcctctgtccttcatggctgtcccttgtgtcccatgtggagagcccttcctccctttccacatggtaagcactgagcccaatttcttctcaccccacagatggtccctcagagcagagatgtctaatgaaaggttcagattcagatcactaactttccatcttccactttttccagtggtggccatgttcccccgtttgccttcacaaaaaccttgtgaataatacaagccatatggactctgatttacagtttagaagatgagcagaggtgggtgtgagttgcccagtcatgttgctagttgttgaagaaactaggattgttctcaggtcttgggctcctggcccatagaccagtggctctgtgttctgatggggtattggggaggatttttacaaatgcagattcctgagattgttcctggaacatctccgagtgggtgtgggttgtggccctgcgtgtgtgattttgcctatcccagctccggggtaccaccaaccactttttgtctctgtgggtttacctactctggatattttgtttaaatggaatcataccaggctgggcacagtgctcacgcctgtaatcctagcactttgggaggccagggtgggcagatcacctgaggtcgggagttcgagaccagcctgaccaatatgatgaaaccccgtctctaaaaaaatacaaaaattagccgggcgtggtgtcaggcacctgtaatcccagctactcaggaagcagaggttgcagtgagctgaggtcgggccattgcactccagcctgggcaaaaagagtgaaactctgtctcaaaaaaaaaaaaaaaaaactcgag

SEQ ID NO: 2711 - DNA, 2637 bp, Homo sapiens
acgagaacgagagccccatcccctgcttcctggccggggaccaccgcgccaacgagcagctgggcctgaccagcatgcacacgctgtggttccgcgagcacaaccgcattgccacggagctgctcaagctgaacccgcactgggacggcgacaccatctactatgagaccaggaagatcgtgggtgcggagatccagcacatcacctaccagcactggctcccgaagatcctgggggaggtgggcatgaggacgctgggagagtaccacggctacgaccccggcatcaatgctggcatcttcaacgccttcgccaccgcggccttcaggtttggccacacgcttgtcaacccactgctttaccggctggacgagaacttccagcccattgcacaagatcacctcccccttcacaaagctttcttctctcccttccggattgtgaatgagggcggcatcgatccgcttctcagggggctgttcggggtggcggggaaaatgcgtgtgccctcgcagctgctgaacacggagctcacggagcggctgttctccatggcacacacggtggctctggacctggcggccatcaacatccagcggggccgggaccacgggatcccaccctaccacgactacagggtctactgcaatctatcggcggcacacacgttcgaggacctgaaaaatgagattaaaaaccctgagatccgggagaaactgaaaaggttgtatggctcgacactcaacatcgacctgtttccggcgctcgtggtggaggacctggtgcctggcagccggctgggccccaccctgatgtgtcttctcagcacacagttcaagcgcctgcgagatggggacaggttgtggtatgagaaccctggggtgttctccccggcccagctgactcagatcaagcagacgtcgctggccaggatcctatgcgacaacgcggacaacatcacccgggtgcagagcgacgtgttcagggtggcggagttccctcacggctacggcagctgtgacgagatccccagggtggacctccgggtgtggcaggactgctgtgaagactgtaggaccagggggcagttcaatgccttttcctatcatttccgaggcagacggtctcttgagttcagctaccaggaggacaagccgaccaagaaaacaagaccacggaaaatacccagtgttgggagacagggggaacatctcagcaacagcacctcagccttcagcacacgctcagatgcatctgggacaaatgacttcagagagtttgttctggaaatgcagaagaccatcacagacctcagaacacagataaagaaacttgaatcacggctcagtaccacagagtgcgtggatgccgggggcgaatctcacgccaacaacaccaagtggaaaaaagatgcatgcaccatttgtgaatgcaaagacgggcaggtcacctgcttcgtggaagcttgcccccctgccacctgtgctgtccccgtgaacatcccaggggcctgctgtccagtctgcttacagaagagggcggaggaaaagccctaggctcctgggaggctcctcagagtttgtctgctgtgccatcgtgagatcgggtggccgatggcagggagctgcggactgcagaccaggaaacacccagaactcgtgacatttcatgacaacgtccagctggtgctgttacagaaggcagtgcaggaggcttccaaccagagcatctgcggagaaggaggcacagcaggtgcctgaagggaagcaggcaggagtcctagcttcacgttagacttctcaggtttttatttaattcttttaaaatgaaaaattggtgctactattaaattgcacagttgaatcatttaggcgcctaaattgattttgcctcccaacaccatttctttttaaataaagcaggatacctctatatgtcagccttgccttgttcagatgccaggagccggcagacctgtcacccgcagtggggtgagtctcggagctgccagaggggctcaccgaaatcggggttccatcacaagctatgtttaaaaagaaaattggtgtttggcaaacggaacagaacctttgatgagagcgttcacagggacactgtctgggggtgcagtgcaagcccccggcctcttccctgggaacctctgaactcctccttcctctgggctctctgtaacatttcaccacacgtcagcatctaatcccaagacaaacattcccgctgctcgaagcagctgtatagcctgtgactctccgtgtgtcagctccttccacacctgattagaacattcataagccacatttagaaacagrtttgctttcagctgtcacttgcacacatactgcctagttgtgaaccaaatgtgaaaaaacctccttcatcccattgtgtatctgatacctgccgagggccaagggtgtgtgttgacaacgccgctcccagccggccctggttgcgtccacgtcctgaacaagagccgcttccggatggctcttcccaagggaggaggagctcaagtgtcgggaactgtctaacttcaggttgtgtgagtgcgttaaaaaaaaaaaaaaaagtcgacgcggccgcgaatccggaccggtacctgcaggcgtaccttct

SEQ ID NO: 2712 - DNA, 1889 bp, Homo sapiens
  misc_feature (1859)..(1859): n equals a,t,g, or c
  misc_feature (1864)..(1864): n equals a,t,g, or c
gttctgattatgctgccttcacaaaacactctaagtgacctaagtggttatgaagcaaatgcatttatggtgaaaacagtctttgctcattgctttctcttgtttcatttagtgacaaatgatcaagatgacttgattttttttccttcttaacaatgtcttttttatttaaaccaaaggtgaagccagtgtactttctcagtgagttctctgcataaagactaatcagtgggaccaggtaaaaaggtcatataatacattgtggagattgcttacttaatacttctgaaaaatggagtaagggagaaactgtaatgttgcaatatgaacctcccattgggccttccatagggaaagctgtgactactctgaaatggaacctagcattatatccttgtagggtagattataaatcatttccagttcatttctcttagaggtgattacctctagccatcagccttactccatcccatgtttggtatgcaatttgagccacaaggctcgtatcgccaacagctatatacattttgttccatttttctgtcttacagagccatgataraactgtggttagtgagttaaaattcctggagtaactactgtttttctcctttgaaacttaggtttctaaagttgcacctaaggaatctgtcacattttctgttgaatcatggtttttgtttttgtttttaacagatattccttctgatacggacttgaaaattagtgtatggtgacctgtgtttaaaaaaaaaagtacaatacaactacatatagctatatagcttaatgagacttccacccccccccttttttttttttggtttgttgttgttgtagtagtctggtgctggccacatttaagtcttaaaaatttttaaattttgytgttgatgtttgtagacagccctgttgttgaaatcatggctttattcattttatttattttttaaacttgcctgaatttgttctaaaggaatatttaagagacataattttcttctctttaccataacattacacaaaactttttcctaaaacacggttgtgaggtactgatgaggtgtaagtggagctgttaaaaacagcagtgctgtattgyagttatgtatattcgtgtacagtatgtttagatcccaggtaaacatattcttttctgagaggataaatacctgcattcagatattccaggtaaatataattgagtcagggagtagtaaatctgatggagaattcactttggggaggggaaaaagaatagtatgcaagacccttattggcttttaattatacctgaaaccaaaatggatatttttagtctctctgcatgtgagatttggtgtaacaagatagaactataatatatacagtatatggaaggatagatatagtgctttgttcattttaattgcaaagctgccaaaatagttgaagcttaattacttgacttgccttgatttataggactggggcttggagaaaatgagcagatgttcctctaagacatcgattacagaagccttatatacatggatttgattttgtatttgtagctgaaagtcactgttgtctaaaactaacttttctaagttatcaaaacaacctaatttcttttccaacaaggagaacttaatggcatgaaggattgtgtgacacattggaaaagccagcttactgccactctcttcctttggccattagagggaggtgttgcctttcattgacgcttagaagcaaattgttcacttgttaagaaaagtaaatccttaaaaaaaaaaaaaaaataaccaatttttcttaatacccagaagggattttactcaatatttccctaggtaaggaaagggggggttatnttccncttaaaaccccaccgtgtattacaa

SEQ ID NO: 2713 - DNA, 785 bp, Homo sapiens
ggcacgagattttcatagctggcactcggggctatggctgaagtgtctgagaaaagaggaacgtggaaaagcaacctgatatcactccactgggaggccagaggggctctcaaataggacctgggttccaggcatgcttccccagggagagcaggagctgctttctcagtggggtgagaggccagcaggctgggtgggctggctggcatgtgcccaaggctcctgttcagctgggcttttctctcccgataggaagaggtgaaaaacttcatcacccgagagaacctggaggcacgggtggaagcagcattggactcccggaagaactacaactgggccatcaccagagaggggctggtggtcaggccacaacgcagggactcctaggggcccagtaaggacagtgcccgccagggaccatgtatgtatcatggcggaagagttggccctgacctggaataaagcagttggtgttgcttatgaggaaggttcagccttatccagcacagccttcacgttttgccctctgctgtcaccacttggtcagaaacttccaaacgcagtgccctgttctgccggtgtgtacagcctcagcgcaccaggagaccctagagtggtttccatctcacagagaatcagacagggccacagccccctcaggcagccaggtcatctgagtatcattaagagtagtgatgggaagattacagtctgagggccaaacgtgcctgcttcctgtttttgtaaataaagttttgttggaacacaaaaaaaaaaaaaaaaaa

SEQ ID NO: 2714 - DNA, 854 bp, Homo sapiens
ggcacgagccagcaacatcattgatgtgtctgctgcagactcacagggcatggagcagcatgagtacatggaccgtgccaggcagtacagcacccgcttggctgtgctgagcagcagcctgaacccattggaagaagctgccaccgctgccgtctcttaccagccagccccaccaagtgctggccagtgagcccatcccgttctctgatttgcagcaggtctccaggatagctgcttatgcctacagtgcactttctcagatccgtgtggacgcaaaagaggagctggttgtacagtttgggatcccatgaagagaggggtccttggacagctcttctcctctcttcatcccatctctaccccacccccttggcccccagcctcactgcggcttatacagtaccctaacctgctactaatcacagagaaaaatgtgaagaaggaggagaagaggaaggctagaagcctgagcaagtgagggtagaaccttttgggactggcctttgaagctctggccagggatggggtgggggccaaaaggacagagcctggtatgtcttcatagtcattgagaatgtggagataccagtttgggtggggggtgatcaccaggggacctagggagatccccttcccaccctctctgttggcctcagagtcactcctgccccctctccctgacttggtgctcacatgcacctcactagggtttgtgaccagggtctggatgagcttgaatttgaatgaattgagtttgtatttctagaaccctgggtttttacatgtttggtctttttttgttttggtttgtcaccctcgataaaggaagtatattcaaaaaaaaaaaaaaaaaa

SEQ ID NO: 2715 - DNA, 753 bp, Homo sapiens
ggcacgagcttttttttcaatctaaatgaagcttaccttagataaggttcatatttgtttcctatagagtaaataaacttccccttcttaaattgtgtaataagcaccaacgtgtggttgcttggcagaatgagaatgttaagggagattgttggatgtttggagtttcattatattttttgtttttattttttgatacctaggtgctttttaaaatattcagacaaatatctatcttacattgattaaacccgtgtaaattcatttgcagtatctacatcgaatgtcaaaaaagtatacttatttttgttccatacttatgtacaattttttccctcttcaggctttttcatttacctttttgaaaaagcacttactctccccttccctatcacccctcccccaaggtttctttatttaaatttttattgagagttgttggagctctaagacaatacaaatttagagttgaacaaaagtataatctgctttacaactagtatagacctaaggtcatttgctttcaattagaggctccagagtcttcatagtggaaagaatgctttgtatttaattgttcttagttaagttgtagcacgtgaatacttacttacatgttttgtttaaatatacttcttgcatagtttaattttttaaaagttgtatctaataaaatgtcttttaaccattattacttgactatatggttgtattaaattttgtttacgaaaaaaaaaaaaaaaaaaaaaaaaa

SEQ ID NO: 2716 - DNA, 864 bp, Homo sapiens
  misc_feature (251)..(251): n equals a,t,g, or c
ggcacgagctgatttttagccacgccacgtcgtatgaagtctgcctgaggctgaattatatattaacttgtggatcagtgagcccccgctgctgggggagtgcaagctgaggccgccatctgagtgcgttgaacaggaacacccagagccctatattgcaagaggtttgaactatgcaacttttttctcttttcttttctttcccaccctccctccatccctcgcccattcctccctccctcccctactcntcccgcctccctccctctctccctccctcctgattgtttctgctgcttggctctgggctgtgggtaaactccagcactgcagcttcatctgggagacccacagctcgtttgcttccttccttccttccttccttccttcttttccttcctctctcccttcctccctccctccctttctccttccttcctcccttccttcctttcttcctctccttccttccttcctttctccctccctccctccttccctctctccctttctttctttctttgttgcttttttttttctttttttaaaacagggtcttgctctgttgcccaggctggagtgcagttgtacaaccatagcttactgcagcctcaaactcctgggctcaagtgatcctttcagctcagcctactgagtagctagtactgcaggtgtgcacctgtagtctcagctactctagaggctgaggcaagaggatggcctgaacctaggagttcgaggcttcagtgagctgactgtgccagtgcactccagcctgggcgacaaaagaccctatctctaaaacaatatggaagtgtaagaagttggggaaataaaaggaaaaagaaaaaaaaaaaaaaaaaa

SEQ ID NO: 2717 - DNA, 1863 bp, Homo sapiens
  misc_feature (1825)..(1825): n equals a,t,g, or c
  misc_feature (1836)..(1837): n equals a,t,g, or c
  misc_feature (1851)..(1851): n equals a,t,g, or c
ggcacgaggggcagagtagagatgaatagttgggtatggcacaggcggctacctgttgtatcagtgggtatggtttacctcacatagggcacctacacgtgaagaaatggacaacagaactgctttgtctgttggcatggttgtcttattggaggactgcattattggaggactggtttcctcttccctaccaggacaatcctccgaagttctttgagctttttctactgcctatttttgcagcccaggtcagttgatcaggaggtgtggccttgtatttggtccaccttgagtcagatgccgctctgcttactgagtatttttatattggactcaaatcatgatatggaatcatttgtagacagcagacccaccaaaattctgctgcgcatgacagcagggcagatcacggtgttaactgtaatcatcctggtagggagagggtatttatatactataggacagatggagagtgtgtactgctttcagaggtggaattgcaggctacctgggaggcaatgaatttccgcaacctctccaaaagcaaagatagaagacatgcctttctatctcttcacctctgatgcattcagagctacatcataatgttgcacaaggtcccctttaagagtaggtgtagcctgttagagtccaggcagggcatatgaacatagaacaagtaacttctcctacactcagtcgaaaggccacaacctccacacagaaggtgaggttcttcctgagcacaataatgtagttgccagatcttccacatggctgtatcaatgggcttgactctggagccttagatttgggcaagaacatttaatcatcccttgaaggaccaccagctaggattgttaccatgagagaatatggggaggagctatttaagaggatccaaaatgatgtgctgcagggctccaggctcattttattgtgtcagtcttatttaaaggtgtaagtttctcaagcagtgactagttcagggaaaaagaaaaaaaataaaggcataaggctcaaacaatcctttaactgacctctaagcaggtaataaatattactactttttttcttatagtttcttattttttaccttttttatgttcaactctttagtccacttgagatttttttctggtatgttatgtgaaacataaatcacatggacacttttatatggggcactgtcacgtgcaggattacaaatacctgttgtatttattcattcagtcatccattaccagttcaaggcacattgttagggaccagagatgataaacatcaaaaagaatgtgcttcttaatcggtagcagcttattgtccatttaaggagatcagaggtacataaattactgtatatacaaagcagcatgtaaaaagtgccatgtgagtgatgcgaacaagaaagaatataaaatataaggattgttttttatttttacctgagggcatattagggaactagcagtagattccttctgcctggaataagagttttcccagaagaagtgtcacttgagatgtacctacagggacaggtagcaatcttaatcatgacttgttggatataatgaacagaaatcctcttgtatcatctcaatttaaaaagggagctatccacttatcttgcttctaagaatctattctaaaagtaaactggctaaaacatataatgacctatgcacatagctattttttatggtattacttgcaatagcaaaagactgagaacaacccaaatattatcaatatggggctagtttaaaaaactatgatacatccacataatggaggactgtgcatcaaaaaaaaaaaggcgagntgggggcgtanncgagtcgccctganagtgatcggggg

SEQ ID NO: 2718 - DNA, 1114 bp, Homo sapiens
  misc_feature (56)..(56): n equals a,t,g, or c
caagcagcacattctcaagagcacacaggattaagttgtcatcattctgggaaganaaaaaaaacattaatgaagaggccaataatatgaagggaatcatggatcagttttctttcgctccctgtggtggatttcacttacaagaaaattgaagctggcaagaccctgttttctctgcaatttatttaaaaccttgcacgcatttggataccttgtgatttccaagaactacgtgaagattaagctttgcttactgatacatggcatgtattcttttcagtcttttgtgtttgattttgtttgatttccctctgcagcacagcgtctctgtaaaaggtttttatgctttcaccagccatgtcttaaatacattaaggacaacacatttggtgttcacacttcttccagtaaatgtctggaacttggaaagccacagagtggcattaaaacaatgtgtgttttctttgaggagcagtgcacattttgcaaccactagggaggaattttctgctaaagcaaacccctgttctctgacttgacaacttggccccggactgtggggccccacctgttgcttaccttttgaggtaawtttgcaaatgtggtttttttacttggaaataactgcacatttatatataggatattggactctgcttagcattttcaagccacatagcatgactgttttttgaataggttggaattgaaaaaacaattatcaaacgttaagaacaaagacagggataaattgcttacatttcaacctctggagattgaggtaactttttgtgtctgggtcttgtcaacatctaatttttttccatccattctgttacactttgtattttctaactggagaaaagagtgaggaacagaatgttttaaatctggtgcaaaagaactatatctgctggatgagccttgaaagcagtcttggcctgttagggcttacaaagtaaattacaaagtgatccagttcaaagtttgcttagttacaacaaagcacctttaaaaaaaatacattttaaaaaaacattccaagccaattggaagacatcattgggttcttactttaagacatctcatggaaaaaaaaaaaaaaaaactcgag

SEQ ID NO: 2719 - DNA, 796 bp, Homo sapiens
ggcacgaggttaaatatgcatgtatgcactattggttaatattttctattttctaataatctacaggtgtctgtagttaacgttgagtcatagtgggacttgagaagtggtgcatagccagtaagctgacttttcccacccataaaaatacatgtgttttgttcttgatactatgtgtgtgcacaacaatgggaaggccattgtcagccccccaggagggacacaccgcctgctgttccatatgaacgatgcttgctgatcctgtgtgtggtcacgcagcgcagttctaccttcccatccctgtgcaggtgactgtcagttctttaaattcacttcaagcagaaaaagcccaggaccccagaacagtaacatcacatccctgtttatataagcctgaagcaagacaagcgtcaggaagaaaatttccactttaccttttttctattaataaagaccttttaagtaaaatctctgtagtgcaagttggcatgagcagacttggtaacttgtctttaaaggagaggtttaaattggaacttttaaaaactagaaaacaacagattgataaatcaattttgtattcgctagatgaagaaggtgctgtattattcccagggataataactctcagaattaatcaggctaaaaagatacatttataaaaatattacagttttatatattaagcctaaattcgatgttttgatgtgtaatatgggataaaataacatactgttcagtgcatgaaataaaaactaaataaaaattgtcaaaaaaaaaaaaaaaaaaactcgag

SEQ ID NO: 2720 - DNA, 1545 bp, Homo sapiens
cggcacgagcccctccaggcttaccatcgggtcatcagcttggaggatttcatggagaagctggcacccacccactggccccctgagaagcgggtggcatactgctttgaggtggcagcccagcgaacccagatcagctaaagcatgtatataagagcacgttgtaaacttgaaagagacaaaggcacaaatgtggctgttgattaatttgactgcttctcgttgctcgtcacctccatgccaggcactgtgcttgctaattgctttatgggggcattctcttatttattccccagccctgggaaataggagctgtcattatccttctctttctgcacaaggaaaaattaatgccctgagaattgtcataattttcccaaggctgcccagctggtggtgttaagccagaatttgacctcccagagccagtttccattagctgccatgctctgctgcctctaattcacagaatgcactttctaccctgtgtgccatggagacctcctatggaaaaatgatcagccaccttaccttctactgggtacctgctgtgagtctgcctatgccagaaggattaaggaggggaggttacccaagaaacaaagcctacatgccgcttacagcccccgttggatggttgctcagtacaacagtcttgcattcagcaggtgtttgttcatcacctactatgtgtcaggctctatgctaggtactggggatacaggagagaatcaagcgtaaagtctttgttctcaaggaatttgcattctagaaagtagaagatgtaataaatgtactgtgggacatgttaataagtgctataaagaaatataaagggtttgggagcaaaaagagggagtggatctattttagatgagcccaggtaagacctctctgaagagctgtcatgaaggagggagggagcacattcctggcagagaaaacagcacgtgcaaaggccccgagactggagtgtgttcctgaagagcagccaggaggccagcatggctggagaggcaggcataggcagggaaccgagcagcaggtcagagcaggcgagctgacattctgcagcctggacggccatggcaggaagcttttagttggagagatacaggaagcctcctagggttctgagcagaagaggggcatgagctgattcacattctgaaggacctctctagctggccagtgctgaggaggttggagagagaaagggtgaaagcagagagaccagtgcagggctgttaacagggttgcaggcgagagactggggtgctgggctcccctagactaggactccagtgccctcctctcccaagagacaaaggaccattgcattgaaggaggtgggaaatgattagattctgaacatatgtaattatttttcagtctttttcaaagatacaaatatttacatagttttaatcatgtaatatatacaatttaatgtcctagtgttttacttaatagtgtatcatgttttccctgttggtatgtagcctggataaatgctcttaattataaaaaaaaaaaaaaaaaaaa

SEQ ID NO: 2721 - DNA, 1733 bp, Homo sapiens
aattcggcacgagtggacaacactatgaagctgtggctagaaagggactgtcatgtcccatcctttggccagattgactggggatgtccggacagatgcctgcatgggtggtgagggccacatctgcacacgagccagtggctgcttgcagttcactgctgtgatgccagagtgtgttcaaaggtgactctcctgctcttctggactcttctctcaggcaagaaaggctgcaggctgcctgctatgtgatgcctgagcacaaagccaaggaactgaactaagtctttctgttaagtcctgagtttgtcattggcaggtttacttgtggccagctctctctgcccttgggtgtctgagcaggcagaccagaagaccaggcactggacctgcatgccaaagggactggtcatctcctgaggacctgtaaatgaccctgtggactgttccgcacgatccggaacccactttttattcactccccatgtctttggccttcctcttctttctctttccctctgccatcctgacactgatagtttgtcatataaattccccgggttgtgtttttttttctagaaaaaaattaaaagggaaaacaaaaccaaaaaaaccagaaaccacgaataagaatggaaatgacaatggctgcctgtcatttttctgtcacgattttcctgatttggtttgttccctttgtctcagagaagcaggagatgttgatgaggctgtatttttttttctttttcttgtttttgagacaagagtctcgctctgtcacccgggctggagtgtaacgtggcatgatctcagctcactgcaacctctgcctcctgggttcaagcgattatcctgcctcagcctcctgagtagctgggattacaggcatgcgccactatgcccagataatttttttgtatttttagtagagacagggtttcaccatgttggccaggctggtctggaactcctaacctcaggttatccacccaccttggcctcccaaagtgctgggattataggcatgaaccaccgtgcctggccaaagatgtaatttaaaatagttagaagggacttggcatgggccagctccgtgcatggcattttcacccccagagcttcctaatcctgttttcacacaggaagtttctaggtctttctagaacagctagaaatagtagctgactcccgcccaaggcccaaccttcaaaccctgagctcttcaggctgcatcctctggtgagctatagaggagaacgtggctcctaaactctagccatcctgtgggaggaaatagacttctttgggctgtggcttgcagaacaaactacactttttttccctctattgtttaaattttatttaataatttgtgtgtttttctgtctttattttctgtatttcacgtgttccttcactccctagaaactgcactttctttgaaaccataggtaatgaatcttactaggagaggcatggggatagagacagttctgggagtgtgacctgtaagcctcctgtagggcagtgccaggccttgattgcccacgttctctccgttccttcttccttcatacatttgatcacacagcctacacccagccccgagtgtgcatcacggtaaaagagctgagggctctcttcagggagcagcccatttaggtctcttttgttgttgttagggagaatacacatctttcttggaaaaaaaaaaaaaaaaaaactcgagggggggc

SEQ ID NO: 2722 - DNA, 1417 bp, Homo sapiens
ggcacgagctgtcacctgtgttaggctccgtcccctttccgcgttttatccccgtaccagaaaaggatacatttagtgcctcccacccagctccactaaacgggacgcgcggcctcctcagcctctttcctcccgctgccatgcaccctgcagccttcccgcttcctgtggttgtggccgctgtgctgtggggagcggccccgacccgggggctcattcgagcgacctcggaccacaatgccagcatggactttgcagaccttccagctctgtttggggctaccttgagccaggagggcctccaggggttccttgtggaggctcacccagacaatgcctgcagccccattgccccaccacccccagccccggtcaatgggtcagtctttattgcgctgcttcgaagattcgactgcaactttgacctcaaggtcctaaatgcccagaaggctggatatggtgccgctgtagtacacaatgtgaattccaatgaacttctgaacatggtgtggaatagtgaggaaatccagcagcagatctggatcccgtctgtatttattggggagagaagctccgagtacctgcgtgccctctttgtctacgagaagggggctcgggtgcttctggttccagacaataccttccccttgggctattacctcatccctttcacagggattgtgggactgctggttttggccatgggagcagtaatgatagctcgttgtatccagcaccggaaacggctccagcggaatcgacttaccaaagagcaactgaaacagattcctacacatgactatcagaagggagaccagtatgatgtctgtgccatttgcctggatgaatatgaggatggggacaagctgcgggtactcccctgtgctcatgcctaccacagccgctgcgtggacccctggctcactcagacccggaagacctgccccatttgcaagcagcctgttcatcggggtcctggggacgaagaccaagaggaagaaactcaagggcaagaggagggtgatgaaggggagccaagggaccaccctgcctcagaaaggaccccacttttgggttctagccccactcttcccacctcctttggttccttagccccagctccccttgtttttcctgggccttcaacagatcccccactgtcccctccctcttcccctgttatcctggtctaataaccccccacacatacacctctggtgacctatttgcacagaccgtcgtcttccctccagtcttctgagggataggggacattccatcccaagcttctcccttacccacacctatccttttgaggggctttggggtggggctggggcaagcagagggactgggtcttcacttcttgggctaataaaattgtttctttgtggactaaaaaaaaaaaaaaaaaaaa

SEQ ID NO: 2723 - DNA, 1389 bp, Homo sapiens
gtctcaataaagaagttcttaaaaaaaaacaaaacaaaatttcagggcccatcaagttatatatatatraaatawatatwttrgtagatatggggtcttgctatgttgcccaggctgatcttgagctccagggctcaagtaagtgatcctcccacctcagcctcccaaaatgctgggatttcaggtttgaaccaccactgtcatccccataaataaagttattggaatacagccatactcattcattcatgtattgtctatggctgcttttgctctacaatagctgggttgagtacttggaacagagaccaaatgtctggcaaaagtctaacatatttactatcttgtacagaaaaaaaatgtcaacctacatctatacttattacaatttcagtaaaaatacagagtttaagtaatttgggaaaatggctttaagaatgaaaaggtgcaaggttatacctgctgaacaaatgaactgtgggcgtgaggtgccattagtctaggcctgcatgttcagggaaggcccaggggagagcctgatgtggcctggctatttgtcatatttgcaaaggggaagtgatgtaattggtctgcaatgaacttgattttcaattgactcaaagatctaaggaggaataaaaattatttaaaaaggaaattagggaagaatggggagaatattggaatcatttaatagaagtacaaacacatagacttttaacttttgcccattaaattttttttaacattttattttcttaaattttttttaaaaaaatagtgatggggtttcactgtgttgcccaggctggtctcgaactcctgggctcaagtgatcctcccaccttggcctcccaaagtgttggggttacaggcatgagccagcctcacccaacccattaaatgtctttaatgtaacttcgggtgtatgagaatttgtaagttgactgtgcagatctctwamaaggttgatatggtgtatttttagaatgttttagactgcacgtgtgtgtgtgtttgtttgtgtgtgtgtgtgtgcgtgctatagaaaacacagcatggaaaccttgttaaaatcagaggctttgattttttattctaaagctttgagttatatgtttaatcagatactatgtgaaaaattttcattaggtacatattgaagtgttccattcaagtctacaagtatatcctcctaaggatttagtttaacatcctttccctgctycaacaagggaatgctttattagagtttcctagaaataatgggactaattaggacctttcatattacctagtccagcagtccaacccatgtgacctccagtaaagttttggcaccaaaaaaaaaaaaaaaaaaaaaaaaaaaaaaaaaaaaaaaaactcgag

SEQ ID NO: 2724 - DNA, 1988 bp, Homo sapiens
ggcacgaggggcgaagtgtgggggatcacttgaggccaggagttcgacaccagcgtgtgcaacatagaactctgtatgtacaaaaaaataaaaaattggtcgggtgtggtggtgcatgcctgtggtctcagctgcttgggaggctgaggcatgggaggatggcttgggctgaggaggtcgaggctgcagtgagccatgatcgtgccacgatactccagcctgggtgacagagcttgactctgttttttttagaagaggacatgacagtcatggtcacgctccttttccttctcaggtatgtaactgctctgcgcctgacacgggcaacatggagctgctggtgaggtatggcaccgaagcgcagaaggctcgctggctgattcctctgctggaggggaaagcccgctcctgttttgctatgaccgagccccaggttgcctcttcagatgccaccaacattgaggcttccatcagagaggaggacagcttctatgtcataaacggtcacaaatggtggatcacaggcatcctggatcctcgttgccaactctgtgtgtttatgggaaaaacagacccacatgcaccaagacaccggcagcagtctgtgctcttggttcccatggataccccagggataaaaatcatccggcctctgacggtgtatggactggaagatgcaccaggtgagacctccaggggcgggtcacccctgggtgtgggtctggtccccaggaaacaccactgaggggcccctgctcttgttcaggacttgccacatcccacgtctgaaggtatgatgacatttggagtcacatgctcctgcatttcatttccatacatgaatatcaaccatgcaggcggatttcagacaggcatttatggatttttttccctcttctaaacttagaaagtaatcaggagtctgtgacacaggaagccatacagggcagacgcaggaagtggaccccaaacctactcttccaggccccagtgtgaacagctgacctctaggccacagccctggtttggtccgctcccagtttggttctctgctaatagtgttcacatttttactttcagtgttttcataggatcactacattgtcacaaaccactaggagcttcagcttaaggtggcattattatgtttttataaaaggaatcacagaatagtcatttgccattataaatcagtgattcattttctgtgtttaacaggctgtttcctgccgtccttttccctttaaccatgtcccagtaagaagctaaataaagggcagggacattgccagcagataacccagactgaggtgaggaataaacacatccaaggaaaatgactatggctattgctcacagtgatcgtttgggtctttcaggtggccatggtgaagtccgatttgagcacgtgcgtgtgcccaaagagaacatggtcctgggccctggccgaggctttgagatcgcccagggcagactgggccccggcaggatccatcactgcatgaggctgatcgggttctcagagagggccctggcactcatgaaggcccgcgtgagtgctttcccccgcacccagcactgactcagaaccaccaccttctgctttgctgtcggacttcaattcctacctgttttctgagtgcagtcctagcaggtgaagcaaggtgatgtccttgccaagaagttgcattcctgtctgctttgcatctgctactttgctgcagtttggattcagagcagaatggaccccactctgtcgaggtgacctgaagggaaacgccaggctctgtagcagcagaggcaaggttccaaggtgtaaaggtcatgctgctagcacattattaaaaatcagtctgggtgcaatggctcacagctataatcccggtactttgggaggtctaggtaggagggttgcttgaagccaagcatttgagaccagcctaggcgaaaaagagagactcagtctctacaaaaaaaaaaaaaaaaaa

SEQ ID NO: 2725 - DNA, 1301 bp, Homo sapiens
ggcacgagcagcctgtcccagtcatagctatatcccagcacccagaaccatgcctggcgcatagtagttgcctaataaatgtttgctggatgagtgagtgaacctctctgggccttattttcttcatcggaaaaatagtgataacaatggtaatagtaacaactactgcagtcaggatgatcatgtcaagctccaactcctcgatctggcctgcgatgccctgcatgctgctctcagtgtattcatacctcttcagctgcatttcacacggaagcccacggctctctgcactccagccacctaagccctgctccagtttctcaaactcatcagccccttatctcagggcctttgcaagtgctagatgcacttcyttcccttacttcacctagttcatcaaatagctttttaaattttttttggagacagagtctctctgttgcctgggctagagtgcagtggcacggtcttggctcactgctacctctgcctccctggttcaagtgattcttgtgcctcagcctcctgagtagctgcaattacaggtgcatgccaccatacccagctatttttgtatttttagtaragacggacttcaccacgttggccaggctggtctcgaactcctgacctcaagtgatctgcccgcctcggcctcccaaagtactgggattacaggcgtgagccatcgtaccccagttcatcaaatatcttacccgcattagcacttctttggagaagcttcctcagatctctagaccagactaaatcctcctgtcttaagcttttagagtgctgtgcgccttttctttccagctcttctcagaagtggtagctacagatttgttgatttacttttagtctaatgccagtgttctccagccttttgtcagctctgcaagatacagatgtggtttatttgctccaacatgtaaatgcagaacttagcccagtacctggcatggggtaggtgcatgatgcacgctgggactacacagacaaatggatggttgcctggcatggctcactgaggacactcaacaggtaccagcaccatttatttaagcggatcaactaacgaatgagttagagagtggctggaatggatgtatagcactaatttgtgagagaagacagaatgagaatgtaattccaaaacaatgagcaaacatcagaagaattgaagcaaataactgcaacatttccccagttgtccctctcattgttcttaaaataaaagcatttctgctacggagtcaggcaaataagtgaaaaagccacataaaggaagagcagtgact

SEQ ID NO: 2726 - DNA, 2192 bp, Homo sapiens
ggcacgagatggcatggactttctgtgcttccttctcctgtctggagccacgcctgccctcacctcctcagggacatcctgtcagcactctccacactccttgatgccccagagctgccacactcgcctgattccttgccttccagtctgtctgcaaccagatgcagccaggcctcgcctcccatgagtgtccctaagtccagggcaggctctggtccccacccacccgaggcagcagcatctagccctgctcctccctgcaccctctcacttctcagccatggacacacaggcccaggtacggttcttgttcattttggggatgtggagagccacgaacacaccaaagcctcctaggtgtctgctacagctctgacccacgcccggaccccagaccccagacccctgtccacctgagcgccaaaatctctgggtgccaggaagctttctgattctgccttcaaagtatttcctggaccattgcagtgggcacccacccctgggtctgccccagccctggtgttgccatctgttctcagcctggggctacagggaccccaagccctctgcttttggctcaaaccttgcacagcccattccccactgactgcccccctccactgctgtcacaattgctcgcactccctcatgctgttctggagctgttgaacatgccctctgggatcctgcccaccgccctcccggtccttaccttctttaggcctttgttcaaatctcccatcagcttggcgccccagggagccctctccatggtgtgcttgcccgaaacctaggtggaaggttcttcatcagagaaaccttggaagagcagcacaggagggtacatttaaagccctcagcggcgtccgttcctttgagggttctgggatctgaagcctctgaaccgtaggagcagctaggggaggccgtgcccctgtgtgaaggggctccttgtgccagccgacagggtgcgacggggtggtcggcccggctgccatcgtgggagggacgtggacaaacggcacgcagtgggaggccatgggcaaggttgatggcccatgggggcggcccctttgtctcttggggctacagcctgtgctgtgaccatccacaggccccaggggggtgctggcgggcatcagggaagtcccggtgacaaggggcatcagcaggggtcagaggggtgtgcccaggaggagcccctctgcattcttcagggtgcatggaacccacaccctgtccccaaagatgccctggacatgccctggggtggggggtggggggcagcacatgccaggctgccacatgtgtgtgtggcctcagggagtctgggctgggtcatcaggcatgaccattgccaaggccacatcctgactctaggcccctctggtctgggcagtgaggccaagcagagcacagggtctcgagaccccatgacctctagggtcacgcggaggctcctggggtcagactgagaaaggggctcgtcctgagaagccacaaagtgtgctcctgcgggggtgcggggtgggggaggtaccacgtctcccgggcagccacagatcccacactcacggcccaagtgacgcttggtgcagagctggaaggttctcagggtgggaggagggttatttttaacgcactgcactagagcatctctaaggccggtggttctggacagaaaaaccacaaaaatgagaagaccaggaatagcaagtccccagccctggggcctcatgtctgcaatgagcccttggtggctctgagcagtgccagttcagcaccttggagagctgccgcctctgtgccttcccttctgcttgctgcgtgggggcttgtggagcctgctaggaatcctgggaagagcccagatgggcctgccctcccagatggcctcttttgcctctggcgaagtgaagtgagcacctgtagtgaggtccattccaagcaccaggcccgggtgtctgtacagagcccgggtggggcatccaggcaccacggggaggcccccgccctggtctcacagacgttgccactggagctcctgccgtgcgcccactgccaccacctgtctgccacctgcacctcctcactgcggcagcactttctccacacaggttcttctctgatgcctcttccctaattttaaaggcattcaggtctcttacttagttaaaaaaaaaaaaaaaaaa

SEQ ID NO: 2727 - DNA, 1152 bp, Homo sapiens
  misc_feature (27)..(27): n equals a,t,g, or c
  misc_feature (29)..(29): n equals a,t,g, or c
ctccttcatgctttaacctgtcttggngncccagcatctgcctctacgtaggcactctctttaggaggctctgattctaagagaacagaatatttggaatgggcgtaatgagatattgagtgactttctcctttctgcaggactggatggtttccatgatcgtggacagagagtacagtgtggcagtggaggccgtcagattactgatacttatccttaagtgagtcctgggaagaggggaggccagtgtctcagacctttgcccttccagggtcatctccctccacctgtcacagctgactcttccatctgtgcaggttgactgaggtcattcctgagttgcagtatgttgagagggtaatatttctgtcttctctaactccccatactcccttgtcttccactctccayttaggagttttttgtgagttatgtccttgttgcttttgcctctttttctttctagccttgattgtgccagaagacaatgtccctattcacacactctttctgcttttctgtgggcaggaacatggaaggggtgctgatggacgtggactgtgagagcgtctaccccattgtgtaggcctctaattgaggcctggcctctgctgtgggtgaatttctgtactggaagtgagtggggctccttttacgtttctttaacaccaccctctcggtttctctcccacatgtgctgctgccctacttaaggcctccccatctccgtggaagtctctctgstgtctcttttcctctctcagctccttggggctttccttagctctgcacctccttttcctttatcatctccttgggccatctcctccstctgtggtcatsattacacctccttgtttcctcctgtgctgagccctttccttgtgtccattccaccagacttttctaccctgagtgcgagataagaacgatgggtggaagagagcaacgccagagcccaggygcccagaggactttcttccagcttctgctgtgccttctttgtggagagcaagcaaatcgsrgtcttctccaggctgacaaggcgaagggcatggcttcgaagtgcaaaagagtcatcatgaaacatcatgaatcatgaatcattaggcgtcttcccttcgctccccacttttttttttttttttttgg

SEQ ID NO: 2728 - DNA, 1893 bp, Homo sapiens
  misc_feature (4)..(4): n equals a,t,g, or c
tccntacttcgtccctgacacccaggccttctgccaccatctcccctgtcatccgccaactggccaccagtggccgcttcattgtcatcatcccaaggacagtgatcgatggcctggatttgctgaagaaggaacacccaggggcccgggatgggattcggtacctggaggcagagtttaaaaaaggaaacaggtacattcgctgccagaaagaggtgggaaagagctttgagcggcataagctgaagaggcaggatgcagatgcctggactctctataagatcctagacagctgcaaacagctgactctggcccagggggcaggtgaggaggatccgagtggcatggtgaccatcatcacaggccttccactggacaaccccagcgtgctttcaggccccatgcaggcagccctgcaggccgctgcccacgccagtgtggacatcaagaatgttctggacttctacaagcagtggaaggaaattggttgatactgacccccaggccctgcagtggggctgactccagatctctcctgccctccctggcagccaggaccagcacctgtagtcaccccaccacacgcagactcatgcacgcacacaggagggaggcctagctgctcagaggctgcagggagggcccaggagccggctgggagggtggggtccctttgttgccaagacgttaggaaagcgaggaaagtgcttggattaggagagtcttgtgggcccctggccagccttcctgcctcagctcccctgctgtctccaggggcaggtggtaggcatgggtacctgcatttcactggaatgggttcttggatctctgaggggaaggaacagcaaaagaggcccttcttcctcacccaagatgcagggtggttggggccaggagtttggaccctctaggtcttgggggaagagctgggtaatacctggtgtctgagtgattctctgcagacccttcccctcctcaaggatcacccatcctcctttcagccccctttatggggaccaggcagctctggagccagccacaggggctgttagagaagcaaggcctggagtggcctgcaccgagtagcagggtcagggttcgtgtgctcctcctcctgctgcaggggctgcacatcccattgccccacttctgctttgtgtctccctctgtctagcttccagggcagggagcaggccccacctagggctgcaggcagtctggcctgtgccagcacggtctcctgtgcccaccagccccacaggtgctgtgctttgtgctcttggctgctgtgctgggacagaatgggatgccaggaagagaagaaagggggtgcagtctgaggccaccaccccccttcctatctaagggagggctgaagacaaggggccggcattcagtgggcagcagaaaggagaggctccttgaagctgctcagtcagaggcccccgtccctccttttgccttccgcaggactgaagacctgaaggggctggcttttggagtgttgaggtgaatatctgggagcagagatcatgaatagctcagggcagtgaatggcgcaccaagagcagggctgtgtgtgggaggctgcagccaggattgcctcagctcctccccctcaggctgggaggatagcacaggctaggggctcggggtggagggtctcagctctgctgcccccaccccagtactagcctagcttcccaagctgtggcttagaggatagttggcttcctgcctctctcctctaaaatagcaagtctgggaaatcctggggtgagtggagtcaccccactcccagttgctggcagagactgagactaaagcatcacttaataaaccccccaagcccaaaaaaaaaaaaaaaaaaaaaaaaacctgggggggggcccc

SEQ ID NO: 2729 - DNA, 2108 bp, Homo sapiens
  misc_feature (78)..(78): n equals a,t,g, or c
  misc_feature (219)..(219): n equals a,t,g, or c
aattcggcacgagaacccagaggttggcatcttcgtcagcattgcccagtctgagcaggagagcctgctgcagcagcncaggcacagttccgaatggcacaggaggaagctcgtcggaacaggctcatgagagacatggctcagctacgacttcagctcgaagtgtctcagctggagggcagcctgcagcagcccaaggcccaktcagccatgtctccntacytcgtccctgacacccaggccytctgccaccatctcccctgtcatccgccaactggccaccagtggccgcttcattgtcatcatcccaaggacagtgatcgatggcctggatttgctgaagaaggaacacccaggggcccgggatgggattcggtacctggaggcagagtttaaaaaaggaaacaggtacattcgctgccagaaagaggtgggaaagagctttgagcggcataagctgaagaggcaggatgcagatgcctggactctctataagatcctagacagctgcaaacagctgactctggcccagggggcaggtgaggaggatccgagtggcatggtgaccatcatcacaggccttccactggacaaccccagcgtgctttcaggccccatgcaggcagccctgcaggccgctgcccacgccagtgtggacatcaagaatgttctggacttctacaagcagtggaaggaaattggttgatactgacccccaggccctgcagtggggctgactccagatctctcctgccctccctggcagccaggaccagcacctgtagtcaccccaccacacgcagactcatgcacgcacacaggagggaggcctagctgctcagaggctgcagggagggcccaggagccggctgggagggtggggtccctttgttgccaagacgttaggaaagcgaggaaagtgcttggattaggagagtcttgtgggcccctggccagccttcctgcctcagctcccctgctgtctccaggggcaggtggtaggcatgggtacctgcatttcactggartgggttcttggatctctgaggggaaggaacagcaaaagaggcccttcttcctcacccaagatgcagggtggttggggccaggagtttggaccctctaggtcttgggggaagagctgggtaatacctggtgtctgagtgattctctgcagacccttcccctcctcaaggatcacccatcctcctttcagccccctttatggggaccaggcagctctggagccagccacaggggctgttagagaagcaaggcctggagtggcctgcaccgagtagcagggtcagggttcgtgtgctcctcctcctgctgcaggggctgcacatcccattgccccacttctgctttgtgtctccctctgtctagcttccagggcagggagcaggccccacctagggctgcaggcagtctggcctgtgccagcacggtctcctgtgcccaccagccccacaggtgctgtgctttgtgctcttggctgctgtgctgggacagaatgggatgccaggaagagaagaaagggggtgcagtctgaggccaccaccccccttcctatctaagggagggctgaagacaaggggccggcattcagtgggcagcagaaaggagaggctccttgaagctgctcagtcagaggcccccgtccctccttttgccttccgcaggactgaagacctgaaggggctggcttttggagtgttgaggtgaatatctgggagcagagatcatgaatagctcagggcagtgaatggcgcaccaagagcagggctgtgtgtgggaggctgcagccaggattgcctcagctcctccccctcaggctgggaggatagcacaggctaggggctcggggtggagggtctcagctctgctgcccccaccccagtactagcctagcttcccaagctgtggcttagaggatagttggcttcctgcctctctcctctaaaatagcaagtctgggaaatcctggggtgagtggagtcaccccactcccagttgctggcagagactgagactaaagcatcacttaataaaccccccaagcccaaaaaaaaaaaaaaaaaaaaaaaaacctgggggggggcccc

SEQ ID NO: 2730 - DNA, 2266 bp, Homo sapiens
  misc_feature (85)..(85): n equals a,t,g, or c
tcacagcagtctgagcttatctgttttgtctttccctaccttgcccaccagtgatcgatggcctggatttgctgaagaaggaacnctccaggggcccgggatgggattcggtacctggaggcagagtttaaaaaaggaaacaggtacattcgctgccagaaagaggtgggaaagagctttgagcggacataagctgaagaggcaggatgcagatgcctggtaacattttagccctcacccctagaacctcaggccacctgccttgctcctccacgagcattcctagggagaacgggtagggctggataattctgaggctccacacgtagcctgccagggccctcctgcaggcctcaccttgcgaggagtacgaattgccgcagcacctgagcttttcctctgcagatgggtcagcctctttgggccttgcgatgctcaggcttggtgttttccctcaatgcacctttgcctgctccccatatgtctccagggccagcttccagggcccactgctgctcactgccctcccagcccccagtgcccctgtcccctggagatcctggtgtttgggctgtgctaatgctgggtcttggcccatcttcccctctgccccccatccccaggactctctataagatcctagacagctgcaaacagctgactctggcccaggggcaggtgaggaggatccgagtggcatggtgaccatcatcacaggccttccactggacaaccccagcgtgctttcaggccccatgcaggcagccctgcaggccgctgcccacgccagtgtggacatcaagaatgttctggacttctacaagcagtggaaggaaattggttgatactgacccccaggccctgcagtggggctgactccagatctctcctgccctccctggcagccaggaccagcacctgtagtcaccccaccacacgcagactcatgcacgcacacaggagggaggcctagctgctcagaggctgcagggagggcccaggagccggctgggagggtggggtccctttgttgccaagacgttaggaaagcgaggaaagtgcttggattaggagagtcttgtgggcccctggccagccttcctgcctcagctcccctgctgtctccaggggcaggtggtaggcatgggtacctgcatttcactggartgggttcttggatctctgaggggaaggaacagcaaaagaggcccttcttcctcacccaagatgcagggtggttggggccaggagtttggaccctctaggtcttgggggaagagctgggtaatacctggtgtctgagtgattctctgcagacccttcccctcctcaaggatcacccatcctcctttcagccccctttatggggaccaggcagctctggagccagccacaggggctgttagagaagcaaggcctggagtggcctgcaccgagtagcagggtcagggttcgtgtgctcctcctcctgctgcaggggctgcacatcccattgccccacttctgctttgtgtctccctctgtctagcttccagggcagggagcaggccccacctagggctgcaggcagtctggcctgtgccagcacggtctcctgtgcccaccagccccacaggtgctgtgctttgtgctcttggctgctgtgctgggacagaatgggatgccaggaagagaagaaagggggtgcagtctgaggccaccaccccccttcctatctaagggagggctgaagacaaggggccggcattcagtgggcagcagaaaggagaggctccttgaagctgctcagtcagaggcccccgtccctccttttgccttccgcaggactgaagacctgaaggggctggcttttggagtgttgaggtgaatatctgggagcagagatcatgaatagctcagggcagtgaatggcgcaccaagagcagggctgtgtgtgggaggctgcagccaggattgcctcagctcctccccctcaggctgggaggatagcacaggctaggggctcggggtggagggtctcagctctgctgcccccaccccagtactagcctagcttcccaagctgtggcttagaggatagttggcttcctgcctctctcctctaaaatagcaagtctgggaaatcctggggtgagtggagtcaccccactcccagttgctggcagagactgagactaaagcatcacttaataaaccccccaagcccaaaaaaaaaaaaaaaaaaaaaaaaaaaagtcgtwtcgatgtcgagcgatcatgatgaatg

SEQ ID NO: 2731 - DNA, 831 bp, Homo sapiens
  misc_feature (595)..(595): n equals a,t,g, or c
  misc_feature (602)..(602): n equals a,t,g, or c
  misc_feature (631)..(632): n equals a,t,g, or c
  misc_feature (644)..(644): n equals a,t,g, or c
  misc_feature (658)..(658): n equals a,t,g, or c
  misc_feature (688)..(688): n equals a,t,g, or c
  misc_feature (718)..(718): n equals a,t,g, or c
gagagagcagctggaacagagagtcccagagaactacttctatgtgccagacctgggccaggtgcctgagattgatgttccatcctacctgcctgacctgcccggcattgccaacgacctcatgtacattgccgacctgggccccggcattgccccctctgcccctggcaccattccagaactgcccaccttccacactgaggtagccgggccactctgctagagtccatccgccaagctgggggcatcggcaaggccaagctgcgcagcatgaaggagcgaaagctggagaagaagaagcaggaggagcaggagcaagtgagagccacgagccaaggtgggcacttgatgtcggatctcttcaacaagctggtcatgaggcgcaagggcatctctgggaaaggacctggggctggtgaggggcctggaggagcctttgcccgcgtgtcagacttcatccctcctctggcgccaccgcagcagccacaggcagaggaggacgaggacgactgggaatcctagggggctccatgacaccttcccccccagacccagacttgggccgttgctctgacatggacacagccaggacaanctgctcngacctgcttccctgggagggggtgacggnnccagcactgtgnggagaccagcttcnaggagcggaaggctggcttgaggccacacngctggggcggggacttctgtctgcctgtanttcatggggggacggctccacccagcctgcgccactgtgttcttctcttaagaggcttccagagaaaacggcacaccaatcaataaagaactgagcaaaaaaaaaaaaaaaaa

SEQ ID NO: 2732 - DNA, 972 bp, Homo sapiens
gccgagatcttgccactgcactccagcctgggcaacagagtgagacgctgtctcaaaatctcaaacaaacaaacaaacaaaaaacaaacaaacaaagcgtcatttatccagcacccctggggaaccatgctacctggtgttttatggtacctggcaaggtgcaggtgaagttgctgctcttgggcattgaacccgtcttgtttggggcagctcaggccccaggcagggtccgggttggctctcgttggtgtggccctggcccatccagacctatatttctgccgtcctgcaggtgatcaatgttgatgggacgaagaggcggaccctcctggaggacaagctcccgcacattttcgggttcacgctgctgggggacttcatctactggactgactggcagcgccgcagcatcgagcgggtgcacaaggtcaaggccarccgggacgtcatcattgaccagctgcccgacctgatggggctcaaagctgtgaatgtggccaaggtcgtcggaaccaacccgtgtgcggacaggaacggggggtgcagccacctgtgcttcttcacaccccacgcaacccggtgtggctgccccatcggcctggagctgctgagtgacatgaagacctgcatcgtgcctgaggccttcttggtcttcaccagcagagccgccatccacaggatctccctcgagaccaataacaacgacgtggccatcccgctcacgggcgtcaaggaggcctcagccctggactttgatgtgtccaacaaccacatctactggacagacgtcagcctgaaggtagcgtgggccagaacgtgcacacaggcagcctttatgggaaaaccttgcctctgttcctgcctcaaaggcttcagacacttttcttaaagcactatcgtatttattgtaacgcagttcaagctaatcaaatatgagcaagcctatttaaaaaaaaaaaaaaaaaactcgag

SEQ ID NO: 2733 - DNA, 1695 bp, Homo sapiens
  misc_feature (1256)..(1256): n equals a,t,g, or c
gaattcggcacgagcatacgcagaaatggttaaattctgacttggaattccatgggaattagcaggctgtagacgaggttctggccgagaatgtcatggttggaccaagacttcccatggggctgctgtttgtggccagtttcttgtttttatttatccaatgtgtacatatgcccagaagctatttgtaatgggagtgttttaagaaattcataaatttaaaacactccacacatacaaaactctttctgaaatgtgacatcttaaaattattttctcaaagtgacataaawtaaaacagcgtaacagccatctctttgtaatatgctctcttatatttaatttttattaatcttcacctaaatactagataacatcatgaagagagcaaaataaactggccatctcagtttaaatggccaacagtcatcttttgatgtttatttctttgaaacaaaatgcaccctacattttattttggagcaaacagtcatcagaagtaatgtgaatttgtatgttttgmcaaaaagttttmcatatatgwtttaaaaggtgtttatgtawtatgaattamcttgtgtacaaaagagatmcagatttttcaaagagcaagcatctgaatgttaagaactgagttcattgaggttaaattgttctcaggaagtttaaggtaaaaaagaaagaaaaagattgtacttctcctatggcaggaagaggctcatttccagggtagagacttctgaaatccataaaatmcattccagatccaagacttcatgcatcatacctggacactgctgtcatagagagagwcttgtgagtggtttcctttcatttactgaatagagataaaaatgcccaaagcatatgtgagggrcaaattttaaaaattaatttaaaaattctgktctgkttaacactaataatctctaatgtatccaacttttcaattattgaaaatccaaaagtcaaatgkggagcaaaccttgaaacwtagagcagtaatgaatatctgctgccaatagcaaaatattcaccaaaattcaagcagaaggtgaatgtgactgaatgagaggtccttaagctttttcatgccatggaccctttggtagtctggctaacgtttctaataaaacaaaacaccggcttataaagaaaatcmatcwtatgraaatgaatrttgatcmcaatatttwaagraatwccmagtttgtgatgtagtaatatttgtgtctttattatgctataaaaggcangatgamcaggaggcttgatattgactcctttttgaagtaggatgagcataaatgatacattgaaatatctgcaaagttataatgtgatatgaaagtgtctgtaatttttattcctggcaatgtgatagaaactgctagtaatactgtggtttgttgaaagaaatgctacatttcagataagattagtgaaattgaagatataatttttttctattcaacttcatggaatctgaagaacgtaggttagaaagccctgatgtaaatgtacaatgcaaggtcatggccataaatgtatagtttcacatatttgcctttggtcaagattttgtctaatatcttggttattttagccagtgagtagtatttaccacatgggttttcactacaaagaggttaaaaataaaacagcaacaacaaaaaaaaaaaaaaaaaactcgta

SEQ ID NO: 2734 - DNA, 1320 bp, Homo sapiens
  misc_feature (490)..(490): n equals a,t,g, or c
  misc_feature (615)..(615): n equals a,t,g, or c
  misc_feature (1099)..(1099): n equals a,t,g, or c
  misc_feature (1115)..(1115): n equals a,t,g, or c
gtctgtccccagtaaccccggctcccctcctcccccacccgctggaaaccacgactccgccgcccacctctgcatttgactgctccaagtacctcaggaaatgacctcatgcggtctccgcacgttcgcgtccatcttgtttatttccagcgtttggcccgtgggagcgatgagcgcacctgttcagcccctgctttcagttctttcagggagttctcacgtggtcttcagaggttcccacacgctgcttcccacagcagctgcaccattgtacattccaacagcaacggacaagggctccaatctyttcgtattyttgcaaacatttactattttatgtggkkgttttttcttttctttttttttttttttttttgagacggagtctcgctctgtcgcccaggctggagtgcagtggtgcgatctcggctcactgcaagctccacatcccgggttcccgccattctcctgcctcagccgcccgagtagntgggactacaggcgcccgctaccacgcccggctaattttttgtatttttattagagacggggtttcaccgtattagccaggatggtctcgatctcctgacctcgtgatccamccgcctcggcctnccaaagtgctgggattacaggcgtgcgctactgcccggtttgaaaaggcaattgaggtttctaaactcctactaaaggaaataattcctagagttgggctgcctaagagcttacagagcgataatggctcacctttcacagcgacagttacccgaaacacatcttcagccctaggaattcagtgccgccttgactcggcacggaggccacagtctttggggaaagtagaaagagctaatcaaactctaaaaaggactcttgctaaactatgccaagagacatcagaaacctggaggtctttattacctgtagccttattacgggttcgaatggccctaagggaaatctgcatctcagcacttttgaaataatgtatagaaggcctttcttaactacagacctcctaatagacatagatactttcaagctacagaattatgtgatcaacttasgacaagtgcaaaacgcactccttgactatggnaatcagagactccctncccccactgaggaagacaatgtggttccaacccagctgggagactgggtcctattgcaaacttggaaggaaggatcctcagcagatcaactttccccccaagtggaggggactctatcaagttctccttagtaccccaactacagttaaacttctgggaataaacagctgggtccacttatctcaaattaaaaaaaaaaaaaaaa

SEQ ID NO: 2735 - DNA, 805 bp, Homo sapiens
ggaaaagtagtgaaactgttcacagatgggatgatcttatatgtagaaaaatctaaggaatctactataaaaaccagtaaactaataaataggttcaacaaaggttcagaatacaaggctaatattaaaaaatgagtagtatttctatagagtagcaatcaacaaaccaaaaattaagaaaacaattttatttataataggatcaaaaaaataaaatacttaggaacttaagtgtaaaacttatactctgagaattctaaaacatcattgaaagaaattaaaccctaaataaatgtaaagacatcccatgtctttgaatcagaaaattaatattgttaagataatgatagtcccattctgatctatagatcagccttacagattcaacacaatttctgtcataactctcagctgactactttgcacaaatggagtagctgatcctaaagttcatgtggaaatgcaggagacttggattaacaaaaacagtcttgaactaggccgggtacagtgactcatgcctgtaatcccagcactttgggaggctgaggcaggaagatcacttggcctcaggagtttgaggccagcctgggtaacatagtgagacccctgtctctataaaaaatttaaaaattaggcaagcctcgtgacacccacctatagtcccagctattcaagaggctgaggtgggagggtagcttgagcccaggagtttgaggctgcagtaacctgtgattgtgccactgcactccagcctgggtgacagcaagactctgtctcaaaaaaaaaaaaaaaaaaactcgag

SEQ ID NO: 2736 - DNA, 1538 bp, Homo sapiens
ggcacgagcccaggtaccttgtgacactggagtgtcatattagccctggactacccacctcctgacctcatgatccacccaccttggcctcccaaagtgctgggattacaggcatgagccaccgcgcccgccaccttgattattgtttaaataaaagatgaataaaagtacattcttatttttgattataatgtggcccaatgtatacatttcacttagtgtagcacatcacattgttcttactaaaactatttctagttttacaccagctcagatttttaaatattcattgctttttcctacttctgtctcaggcattgccattctcttcaaaacatatttgaaaaatgtccaggcttctcatctctgtgtaaaactgttcagtttgttccagtgtgacgagaaaaattggactgagcatacttttttgtgagacatccattttcttcctttgatgaatttgacaacttgtgacaattctcacattttggaacaagtctcctaattatagaagaagctaataatgataatataagaaattataaattatttgactgttttcaatttatccaaaaggaagtttatcaaactttctcctcctactttctgctccaccccacccctcagccccgatgcacacgctgtgccgtcacagcacttatgcctagagaattatgatccttaaatagcagtcaactcttcttaaatagcagtcagttgttctagcagtgtatcagttagacattctagaatatttcacaaaataagaattttgcagaaggaacattatagctccctaggtctagcaaatgagggaactagggtacagagaaattaagtgacttaagatctcacaacaaactagtggagtacttctacttaaatatatctctagatactcatagaaggtaaaagctacattgaaaattcacacaactcttctggaaagtggcaaattcaatgatgctgtaaagtctggcataatattctagtggtcaagacactttgggtagtaaatgagagaggccaaattcaaatcaggctaagaataaaaagaaatgttttctttcaagtgggtggagctcaagtaagtgtaaattccaggggataaattggattcaggcatagctggatgcaaaggctcaaaaatgtcatcagaatctgcctctttttctctcttggtgttgcttgccactgtgttgtcctcattctcaggtagcttgactcacacagctacaacaatggcttatatcctaatggttgatcagccacagggcagagtacacttttcctcagtggtccaagcaaaaatcctggggctcactcttactggctgacttggatcaggtgtccttctggagcacaacacagtgactccaggtggccaagcttgaatctcatgccacatccctaccaccagctccactaaaaagaaccacatggacagaaggggaggagtggttacaaagggaaaaataaatgtttattacccagggagggataatgaatgtaaggcaagcaaaaaaaaaaaaaaaaaa

SEQ ID NO: 2737 - DNA, 698 bp, Homo sapiens
gtaaggctttatcatctttacctctagatgaatagatgtgaaaaccatgtatagtatgtatgtatatgttagtgtgtatatgtgtctttatcttaaattcttacatttgttgtatctatctagtgctcagtatgttatatgatagtacaacatccaaaatggatcaagtgtgagaaatttatttcacatcaactttcagattgcaatgtttattcagtatttattaacacacatgggaaatattataaaattatgtctttttttagattctctttaaatgatattttcccttagaattctctgtggctcccatgaaattctaaggtataattaaagtcaaaaataagattggattctagttgcttttacccctaaatttaaaagtgatatttcaacactaaattctatactttacctaatttgattacaaagatgaaccacataatctcagcattagcctcaaaggcaaactcaatcataatagaaggaacacaagctttgatgagatctggatttcaggcttagtttggtcaaactgaattaactgagccttgtgacacacacctgtagtcttagctactccggtgactgaggcaagaggatcgcttgagcctagaaggtggagactagagtgagttgcgtttgtgccactgcacctcagcctgggtgacaaagtgagatcctatctcaaaggaaaa

SEQ ID NO: 2738 - DNA, 525 bp, Homo sapiens
ggcacgagatttttataatactatgctgaatctacaaatggaatactgggtaggttggctgggcacaggagatggctgcacctcctgcagagttaaccttggctgagcaagaggctccagggctgggcaccagatcaacctcatacccctaagtgagggcatcattaatgtctgtggcctgcaagtcgaggcatgcaggcagtcactgggtcaacatctgagcactcctggaccagaaccagtgcattccagaattcttgaattgaggatactaagacagggattcataatgccctctgcttgatgtgctggtggttgccaggaggcttggcttcagattcagaggaagataccaaaaaactgatcgtttccttgaattggcttttctatttacttcgtctgtgtctctcatattgaatatcctaagagagatgctggaatattttggcgttcctctagaagaagttttaccgattggagaaaaaaaaaaaaaaaaaaaaaaaaaaaaaaaaaaaaaaaaaaaaa

SEQ ID NO: 2739 - DNA, 861 bp, Homo sapiens
aattcggcacgagtgcaccccaacataccgtgtttaactcttctgtcttttgtttttgctgctatttatattttcatttgatatgttttataatgtttgtccctagagttgtcctttattgaatacaagggtcttttctcaattgctataatgtctgttataatccagatgtagatatttgaacaatgtgaatacacatctttatgtgtattatcttaagtgctgtttaatattaaagtgtatttaaaatgaccagatttcaaattagtgcagttttgagatatttgttacttaggtcttaccaggtatgcacctgtgttgtaatttatgttggtatgctttagatctggtgtttccttggttttttgctgccgtatctcaagtggctagatttgatatttccttatccctgatctgacatttttatgtgaccaagtttctgtagcattttgttgaacaccaggtactgttgccactgtgcctaaccctaccatctccactccatgctatctcttactttacatgtaaatgacagttattttagtcacttttcacaatgtgaaatgtttctaggacacttgtccatgaacaggagcaaattgaaatttgaaatgatcacatctgattgacttgtaattagaggatgtttgggtgtggttgaatgtattgtatctgtacttattgaaaaacctgaaagacctggactcactatgttttgttctgcaacctggttagtcagctacgtggaagtgaccagagagttgaaagccaatttatttatccctccaagatgaataaaacataaattactcttctagcaaaaaaaaaaaaaaaaaaaaaaaaaaaaaaaaaaaaaaaaaa

SEQ ID NO: 2740 - DNA, 571 bp, Homo sapiens
ggcacgagataagatctagctttgcattaaggaagctagaaactgaagattgctatgtagtctatccttgatcattccttgacaattagagaacaaattgagcatggaccatttatcccctatttatatgcaaaattgttctaagtaagtattgatgatgttctctatagaaatttcaatcactcacttccttgtctgttctcctacacaatattatcagctctgctgcacatttcctcattggtgatccctgcaggaaaataggagataaggtcaattctagttgacttttatgagaatatgattatagcaggctttctttagttattggaatatgtgataagttaggacaaacaattatgcagcaataaatttatcttggttgttttaagttcatgtcaaaaattcagacatgctaatgttggtagctaagctcacacaactacctgcttatttacaaacttgcaattcaggaataaatgattgggatcttatatggcaagtgcatgatgccagtctaacaggagcagacgctctgtgcatttgcaactacaaaaaaaaaaaaaaaaaa

SEQ ID NO: 2741 - DNA, 446 bp, Homo sapiens
ggcacgagaaaacatatacatttatttaatataagtttatgtggcatgaaaaccttcagaatttgtgaagacccaaagatgcagtttgtattgaccacttatataaggaattagacaaagagcagtaaattgcagaaatgtgatgaggtggggggtcgggggcttgggccagggcaggtgattggaggagaatggctgggaaggaagggccagtatagcaggtggtacaggtttccctcagcctcagcttctggtccttgcccataggaatcatgcctcccacctggccaagggaggacacctttcacatgggaatgtcatctcctgcttttcagaaacagaaggaaggtcagagtgatcttcttgtacctgctttttgtttttgtttttgtttttgtttttgacagagtgagactctgcctcaaaaaaaaaaaaaaaaaaaaaaa

SEQ ID NO: 2742 - DNA, 780 bp, Homo sapiens
ggctttttgaaataacttagacaaataatttcacacaataccagcataaacaagtataaacccgttcacattaaccaggcatccttagggaagattctaatggcctgaatggacatttcaattacatatatgttgatcatgtgtatttttctagtaagcactagtaccttacttgccctcccctgattaaacaaaaactgaaggtataaaacctgcccaaatggaaacctattttttcatagaaaacattgacaattatattttcatgttattctatctctgtttctaatgcatttttctcatattcataacaggggagatagagttattcttcttaaaagagttgatcaaaactggtatgaaggtaaaatcccaggaaccaacagacaaggcatcttccctgtttcctatgtggaggtcgtcaagaagaacacaaaaggtgctgaggactaccctgaccctccaataccccacagctattctagtgataggattcacagcttgagctcaaataaggtaagaacatactctatcatgttaatgtaatattggaagctccaagtaagataatcggtgtgtgactttaggatattagattagaatatcatatctattgcagagaaagagatttacatattatgtttctacatgtgtgagtgccacatcagtaaatataagtcagtgtttctcaaataggtgctggcataaagatttaatgattaattttgctcatttcattttcaagttaaaatatcgaaaaaaaaaaaaaaaaaactcgag

SEQ ID NO: 2743 - DNA, 464 bp, Homo sapiens
cggcacgagctggtttctacatggaagactaaactcatgcttattgctaaatgtggtctttgccaactaaatttaagatgcagcattttagaaatttacatatcaatgtttctacagtattgtttgctaatttttaaataaagtcatgatcagtgtgcatttgtgattatatgtgtactcattctcttacctagcgaacaagatcttttcagagtggtgtttctaaaagagcatgtacaaaagtggcctgtggacatttaggcctgggtgatgcatttgctcttcctgtttgtgccaatgtatcaatgtagagttgctctgttttcttcaactgtatttattgctgcatttctcagcataaacttatcccattgtattttttataaataaatattttttttgaactttaaaaaaaaaaaaaaaaaaaaaaaaaaaaaaaaaaaaaaaaaaaaaaaaaaaaaaaa

SEQ ID NO: 2744 - DNA, 785 bp, Homo sapiens
gttttgttttaatctttgggggtaaaataatgcaataatgataaaacaaaattcaaaagcctgtaaagctatgggatctgcttgggattttcaagggtgagatagggtctataatagacatgtgtttactgattgtraccccaggcattggttttctgtscttcattgttaggataggtggatctggggacacagrctgrgtggagtggagaagaaaggatttattaataatcagggaggagcatgtgggatagatctgaggtatctgcaagcatttgagaactactgattgtaactatatgaactgaagatggctcagtgcaatcctgggtctttccacattccatatttaattaaaggcctttgccatatcttggttcctggctcaattttagtcagataaaatttaagttattataaaataataacaaatttggcatataaggttttaaactgatcacggtagctggacagcattagcaacaatagttgaaaaaatagagcttctttatgcagtgatatctgtataatctatttagctcaaagataacattgagtttatatccacgtatgtttatgaatgtgtaatttggacacctgggattttattgtatgtagatgttttatccgttccctttttaaaatccaatgttctatctgtaatgctctgccactacacattctttcaaaaaaattctgattctaaatctttaatgatgatatgcctcaatcttcttttaacatagatagctcttctggaaaaaaaaaaaaaaaaaaaactcgag

SEQ ID NO: 2745 - DNA, 410 bp, Homo sapiens
cggcacgagggcggattagccttcgcggggcaaaatggagctcgaggccatgagcagatataccagcccagtgaacccagctgtcttcccccatctgaccgtggtgcttttggccattggcatgttcttcaccgcctggttcttcgtttacgaggtcacctctaccaagtacactcgtgatatctataaagagctcctcatctccttagtggcctcactcttcatgggctttggagtcctcttcctgctgctctgggttggcatctacgtgtgagcacccaagggtaacaaccagatggcttcactgaaacctgcttttgtaaattacttttttttactgttgctggaagtgtcccacctgctgctcataataaatgcagatgtatagcaaaaaaaaaaaaaaaaaaaaa

SEQ ID NO: 2746 - DNA, 1304 bp, Homo sapiens
aaaaaaaaaaaaaaaaaatctaagatagaggtttggtcaacagtgcttaataataaataagaacctcctgccattctaattttcctgctgcaccccatcccccacacacccctcacgaacattgatataagcagtattaacacagtataaagaatgttcaccttgcatatgtcatttcaggcacatggattcaggagaagcacagttgagtggaagaaatggtagacttgtgaggcttgccccaggccttgtgtacacgcaataagtggtgagccatgggtctctccgtcagcgcctccctccccgccaccacttcaggccaacaatttaaggtgctgagttgtaaggctcctccattgtcagtacagggctcgcctttgtagccctgatcactaccagtacacttttcaagacaactgagtatttttgtatgcctttgccttccctttgtccatgaaacatgaagagttgtttatggttcttgacttctctgagcagagtgtctgcatctcttggagagttacacatttcttcatgagccatttttctcattcttagatgcacctgtttttatcctttgcagaccatcttctgccttcttattttcctgtctgtcaaagacagaaattacaggagatagggagggttttttagcatctctttcaaaagatgtatgtcagaatttcctttgcacaccaagaactggagcttagagccccactattctctaagccaggttctagtgccttacactccagaatgtcagatggtgggtgcagattggaagaaagagaaaagttcatctcggtgtgtgggttcccatccgccccacatagcctctccttcttcggaacaatgggcgtggggtagaaagctctttcagtgaagggtgttctagcagctcagttaacactttactctccagtcaacacttgggacatataaaaatgccattgtaactactgtagagtcctgtgactcatcgtttgtgtttgtcartktgcagttcagcttagcccttccctgttcctgtgtagttacaatctggccctgaagacatccgaggcacttcagtaagtgggatcttttctagagatcctgggtgactttgggtgcacagggtgaccgagcatttctgcccctgtgaatgtggcactaacactgtgcactgtctccaccaagcaaggtttccactgagtttcttctcatgttactgggtttgtaaatgaataaacacattttaactactcttgcacggctgcttgtgaaaaaaaaaaagaataaaaaaaaaaaagtttgtcgac

SEQ ID NO: 2747 - DNA, 1248 bp, Homo sapiens
  misc_feature (607)..(607): n equals a,t,g, or c
ggtttgtcagacactgttttaggtatgaggaaatgacagtgagcaatacaaaggccacattctcatggagtaaaattccagaggtggagacatgtaattaatacttaaatataaaacagtagattttctaaacgcagaaaacggaagagtaacaagaaactaaatcaaggagcattatatagcctagactgcagagactcaatataataaagttggcgattcttcctaattatcaaatttactgcaattccagccaaaatgtttcagtggttttttttgtttgttgtttttgtttttgttttgccctttagcttcacaggtttgttctgaaatttatgaggtataaattcttaagagcagcaagaaaaatttcgaatctatttgtagaaactgcatatgatgatggttcataccagtagagagaaagattggatttgggggtattactagtagtaaggggattcactagtagtaagggaaatgcaaaataaaatcacattgaactagttcaaaatcatcacattggcaaaagcattagagtgccaattactggaaagatgtggagcaataggaacactcatacggtgctataggaagtagttgtgtntagcataatttggcaatgtctagtaaagttgaagatgtgaataatctttgacccagcaattccatgtttaaacctctacataktctctcctcgtgtttcaaggaratacatatgatggtccattgcagaactgtgagaatgagaagttgaaagcaatctaaccattaggttaaatacaagatagaatgcaaactaaaatgaataactagagatatttctgtcaacatgggtaaacctcaaaaatagtattaatgaaattgaactacagactattttatataatacagtataacgtacaatttcaaaacatgcaaattagtgttatgtatttttgtcatggctaaatactatataaaaaggatctaaaagaattaataaaataatcatcagattcagaacagtggtgacctgcagggagaaagacaactgagattggggaaaggatgcaaatgaaaatacctttaattattcatttcttttaaaaataagcaaatactgtatagccaattcttaaaatttgataaagctggctgtgagtatatgagtcagttcttactctctgtatctttctgtataaactatttcataatgcaaaaaaataaagaatatttaaatgaaaaaaaaaaaaaaaaaaaactcga

SEQ ID NO: 2748 - DNA, 914 bp, Homo sapiens
cgcgtccgggcaccagctacctcagggacatggcacgggcacctgctctgtctgggacagatactgcccagcacccacccggccatgaggacctgctctgctcagcacgggcactgccacttggtgtggctcaccagggcaccagcctcgcagaaggcatcttcctcctctctgtgaatcacagacacgcgggaccccagccgccaaaacttttcaaggcagaagtttcaagatgtgtgtttgtctgtatttgcacatgtgtttgtgtgtgtgtgtatgtgtgtgtgcacgcgcgtgcgcgcttgtggcatagccttcctgtttctgtcaagtcttcccttggcctgggtcctcctggtgagtcattggagctatgaaggggaaggggtcgtatcactttgtctctcctacccccactgccccgagtgtcgggcagcgatgtacatatggaggtggggtggacagggtgctgtgccccttcagagggagtgcaaggcttggggtgggcctaatcctgctcctagggctgtgaatgttttcagggtggggggagggagatggagcctcctgtgtgtttggggggaaaggtgggtggggcctcccacttggccccggggttcaatggtattttatacttgccttcttcctgtacagggctgggaaaggctgtgtgaggggagagaagggagagggtgggcctgctgtggacaatggcatactctcttccagccctaggaggagggctcctaacagtgtaacttattgtgtccccgcgtatttatttgttgtaaatatttgagtatttttatattgacaaataaaataaaaaaaaaaaaaaaaaaaaaaaaaaaaaaaaaaaaaaaaaaaaaaaaaaaaaaaaaaaaaaaaaaaaaaaaaaaaaaaaaaaaaaaaaa

SEQ ID NO: 2749 - DNA, 1122 bp, Homo sapiens
  misc_feature (63)..(63): n equals a,t,g, or c
tgaacagagcagtgagctgtgatggggctggggctggggcccaggaaggagcaggcaggagantttgtatgcaccgtgattcaaatattataacaaaaatcatcgatcatgtgttaggcactttacagttcccaaagcactttcccatccatgccctgatgatctttgacacaacactgtgatgtgggttttattatttccagtacagatgaggaagactgaggcctgcatcagtgaagcaacctatccaagactacatagagaaggcagtaaatggcagggttagtctcagaacaggggagggtctgttccccccgcagtgggcagtcctaattctgaacttcacctatctgggggtgatagaggggaacaagaggaagcctgctgaagagaaaacctaaacatctgttttgtctacgtatgacttcctctgcttgtgggagagaaggaaggaaaggaacacattgttgtcagccccacaaccccaacagaattaaaccctggagcaggttgaacagcagaggcttccctcagatcaaggagccaggagcagatgatctatctctgtggccacacagagagatgtcaccttatgcaatttgcatatcatattcaattcccccaactgctctttctaatttattcaactggggaccaggctggtctcatgccaacctaggagatgtaccatagcagtatgagcagaattcctcaggaggaacaattagcaaaaactgcagttgcctctcgataggcctgagcagagagaggaacaatagctctcacgtctctcctcatcagattctaactaagcagatgttctcatgcttttttcttcttcctatgttctgtatactgacacctcttctcagtggcatatgaaatatgaaatgtcatgtgttgtgagtttgtataaatataaaggaatatatatacacagtagcaaaagagaagatctcatttacaaatatctatggtgtttccttgttctgtgttgatctgttttattgatacaaactgaattttcttaatgtatcttctatctctattatagtggcaatgatggtatatgcattaaagttcttctgaattgtgaaaaaaaaaaaaaaaaagggcggccgc

SEQ ID NO: 2750 - DNA, 1041 bp, Homo sapiens
ggcacgagcgactccagactctcttacaattggcaataagacaagttaaattacatgagtgtctcaatccctttctgtaaacagggaagaaacagtaccaatatcatgaagtttcaagtatcaaatggagcatgcaatgtgtttatcacagtatctggtatacagcaatggtaattcctttcctcttttccttccaaattattgctccctgatcccatccttccaatgtggctcaattatcgggttctagtcattaaatgctactcttctacaataagccacataccaggtctgagaaagagtctggatcagacaagagttcagcactgtagtagaaaacagattctgggtatcagaggatctggtctcaagtcctgactgtattacctatagctctatgaatttaaccttgctgagccttaactgcctcatctctaaaatagacttaatacttattcctatctaatgggattgttatgagggttaattaagctaatagacttgaaatcatttagtgaactgtaatgtaacaataacaatcaccatcattagcttcctcctgggtcatttacagactccctatctggaagacttgacctgccagagatcaccaagtctcaatacttaggtgcaaaggggaacggctcaaagctaaaaagaaataaactagagacaaataaaattaaagcctacttaatgaactacccaggaccttttaacgttgaagagatggtacaggctaaagatataaacaaccttaactgagttgggctacattttcagatgaaagattcatgacagtagcgacagcgtttcaccatgttagcctgaccaacatggcaaaaccctgtctctgctaaaaatacaaaaattagccaggcgtggtggtgcacacctgtaatcccagctacttgggaggctgagacaggagaattgcttgaacccaagaggcagaggtcgcagcagtgagccgagatcacgccactgtattcagcctgggtgataagctgagactctgtctcaaaaaaaaaaaaaaaaaaa

SEQ ID NO: 2751 - DNA, 900 bp, Homo sapiens
aatctctaggaaggttattcttgagataaccaatgtatatactttggtgtgcagaagtgcttatatgtgctttccattgtatcatacagagtactaaaaagatgtgcactcaaggatcaagactaaataaaattaataactgtgactgcttcttcaaggacgttcttcagtgaattttaagaaaaactggctttttaaactgttgagtacatagtgatgaacaatgactgctaatacagctggtgccatggctttgattcatgcccagtctggggaactggaagctatcaaagccattctgacacctcgttggaatctatcacttgagggaggaacagtagccataagctcagtgaaaaggagtttgtgaataattcccctgaaaagtttctctctcaatttgagcagtcatagatgcgttgcttctttttgaacctgtgtcttattctaattgagttataaagaaacaacaatgaactgtggaactgaacagtccactctgtgacaagttcctctgtacaggttggtcattgtgtgacttttctaacttccattatggtccaaaaagggggttacaaaggtatgatggctgttgtcagatctacacagacaggccagargcatgtwattccctctctaggaacaaacatcagtcaccctcaggggttagggaacccagctgtcagctttggtaggaaaacgcaaccttctccagaacaaggaaaataagamcacccaccacgtcacattcttgaggtgtttgtgctgatccttctctttaatcttaacattgtggaatcwccacggctktgctaaacctagccccaarcccacwcyaccttactaccagacaaccttaaccaaaccatttacccactatttaaaaaaaaaaaaaaaaaa

SEQ ID NO: 2752 - DNA, 1536 bp, Homo sapiens
ttggatacttgctgctctactgctagactctcctcctctacaggagtcaggaatgaattcctggccattgcattaatccctttagacccaagcatgaattagctgacctgtggttatttccccttgccctggctgccaggctgctggcaaagtgaccatttgcccacttacatcctcattatgggaggtagagccctcccgatgcctgtgctgattccctccgtgtaagaaggatgcgtagttgttggtagtcccacgaggcaaatagctacactcctttgcctggctctctggattctgcctcttttgtttttaccctctctgtgcttatggctctacccttctccaccttccatttcgctcagtttggtttccttactctctctagaccatgtctttttcatttccatgtacttaccattagtcatgtgtgcctcttacctaaaagtgtgtccgtctttcatttccttcgtaaatttaggcaactatatgagtattcctgggttgttttggattgagtgagccttaagatatgacagctctagcacacagtaggtactcagaaaatgttagcctctgtgctggactgatttcatattttaccccaagtggttcatgtaactagggggagttttgcttcacactattaaatccactttaaagaattagtattcatgaagcacttagaactgtgcttggcacatagtaagcactatgtgtttgtaaaataaaacttctaccttatttgactttttaaaaattgtaatttatttttatgagaataatgcagctctggttttgttacctatctcaaaaacttacttataaatgggtacagtaataatttataaaaaagaaaatgactttacatgttgttcatatgtgtactttccaataaagtcttggaatatggtgacaatttagaaatatgtggggttctttttttaaaggttgtactgatgaactctcattaaaaggaactgctatattttgttgtttattgtagaatggaagctacaaaagtattcatgcaatggccaaagatatagatctcctcgcaaaaaatgccaaaacttataatgagcctggctctcaagtattcaaggttagttttgttgttgttgttgttgttgttttccttggtaatagtagataatttaaggtcagtaatttttataaaacaactttattgagatataattcacataccatggactttacccattaaaagtgtttaatttaggctgggcgcagtgctcacgcctgtaatcccggcactttgtgaggcctgggtgggtggatcgcgaggtcgggcgttccagaccggsctggccaacatggtgaggccccgtctttgctaaaagtgcaggaattggctgggcgtggtggcgggcgcctgtggtcccagccgatcgggaggctgaggtaggagagtcggttgagtccgggaggcggaggttgcagtgagctgagattgcactccagcccgggcgacagtgcaagactctgtctcaaaaaaaaaaaaaaaaaactcga

SEQ ID NO: 2753 - DNA, 1388 bp, Homo sapiens
ggcacgagattgttactaatctttgtgactatttaatcttcaaatattgtgcttaaccccagcaatccgcacgtatcctgcaccccaccccaaaagagtcatctgtattttaatgccactggtcttatcggtccttttgtctgttgagaccagtcatgacagcattcaagattatgaaagtgttacaatgccgcttcaagtctgcaaaacctcaaacgtagccaacttgacaaatatttaagtgttacggcagatttaaaatccatctgggcacaccgtggtaggtatttgtacagttcttttaattacacatagctttaaaccatcaacctgatgagtttaaagcttttgcacccatgccttcacttcagaatgaacaccttcattgtgatcttatgttaacctgagaattgatttaaaggaagattgataatcctatactttataacgtaaaaatacaggggctacaggagggtacctaattagacagttctccaaacacagaacacacactggaaaattttccggccaattttgctacctcccaacttgatggattagaggtagcgcaaatgctggtgctcccatctaccttgtagacacttagccatcaagaatcaaggcacaagaagtgcactctctcattaacagtaaatgtttgcaagatattcagtttaactttcagcatcatgaatgttcttatccagattttgaatccgaaaaactataatccttttatgttatacaaaattactatgattttttacagttctgagcatattaaaattctactggatttcaaaaagagactaatacccaactgactaactaaacaaatatcaacttgttatactcaatgaatttttttggcatttacatttgaccgttggctttagtgaatgtccatatttaattttttaaggcaccattacacagtttatcctacatttatcacatttcttaaagtgttaagattctatggctcatttctatgtatttttcttactttacaaaataacctgaaacagtatagattttgtaacacttaatttgagcagcttttttattacattgaattatataaagtgcatgttaccttagaaaaattaatatttgctgctttactcttttgcaaaacatttgctgtaatgaatggatttgtatttccaatatgtatcttgactgcattttgtaatatttactgctttattcctaattctgctttaaagtactgaactgggcatgaaacattaaaatattaatgccagaaactgtataaactggatgttgcttaaaatctgtatcactgccatgttgaaaactcagactgcttttgtgatgtttcaaatgaataaaactatcctcccctcgttaaaaaaaaaaaaaaa

SEQ ID NO: 2754 - DNA, 1769 bp, Homo sapiens
gaaaaattaaagcacatgggtaatagcatgggcagagcagagactgagacgatctatgtccatgccaaaggaagcatcctagtaagtttctggctatggcaagatgacaaaactcggtgtacgttttatctggatcacttttggagcactaaagcagataaccaactttgtgctaacatacatgtgctcaggagagcctgattttaagactgacttcaccccattgctcttgtgttccagaaccttcaaggaacatcacctaccagatccaagctttgccagcttagctttcctcatgatcagctcctatctatctatcaatcaatcagctgtcagttccacccatgtgcccaagtgctcttcacaccttcacacctgcaatgstttcctgtgcagcctaccttggagktcccactcaatgctccacttccyttccagctcctttgaagactcagtcacacatgaatttggcatttamctttagtaatatmcycacaagtgtgttactagtgcctacctcaccttcaccagcctggagaaaaggctattttcagggtaccactgttgtgcagctgagccaagtcttcctgctctcaatcaatcaccctgctgctcttggctgccctgcatcacagccctctggatgatatgctcattgagggaggggccaactatatacaaaaaaaatacacgtttgctgaaattactcctagatttctagatgagtatgtaaatttttctgctcccaaagctctggcatctagtttgagtcaatctgagctctataacaggtgaagacatcatattagtttgcagactagactatcaataggagaaataggacgaaagcagcactttaaaaatggatattaaactaccacgatcttgagcaaacatctttatttaagaaatcaaatagggtaaaaattatgcaatttcacacaaggatacaagacaaagcttagaattacttgctcaaaagttactcagaatggaacaaaattgttcaagtgctcccaattagcacaggctgtattacttgcttttcaatggacatttactattttacattaagatctacttataggaacaaagagacaattcccagccccctctggtgtatcacctaaaagactgaatacaaatgttaatgtaatccaagcttttctttgacaacaatactaaaaattgccttacaattttttacaagtacgagtatcaacagtttactgtctgagggaaaggaaatataagaatataaagtgacagaagcaacacacttcactgtggcctgcaactgctcccagcstcctattttataaacatgatttgggttctcacattatagcaggatcactattcctagcctctggtggaagcagacatgtgacacttagcactgcacaagtgtttctttggcttcttgagtagtgctgtgtatactgcctatacatttttataacatctctaaatgcataatgtcaacgtatgtgctatcacatttcactcccaactgcagaatattttaattttaaatttatctaccaaatcttgactatgacatttatttttgggttgttacattaagatcaacctatctgggccgggcacggtggctcacacctgtaatcccagcactttgggaggctgaggcaggagaattgcttgaagtcaggaggcagaggttacggtgaaacaactgccattgcactccagcctggacaacagagcgaaactccatctcaaaaaaaaaaaaaaaaaaactcgag

SEQ ID NO: 2755 - DNA, 1502 bp, Homo sapiens
  misc_feature (806)..(806): n equals a,t,g, or c
  misc_feature (860)..(860): n equals a,t,g, or c
ggtttattttaaatttttaagtggtgtagccttttaacaaactatgtgtttccataaacttctgaaaaatttaaccttgtatggaaggcaaggcaggaatttttaaaaataaactttattttttggagttgtggatttgcaggaaaattgagaagatggcaaagaaagttcctgtatacctgatgcccagtttcccgtgttgctaatatcgtaggttggtatgggatctttgtttcgattagtgaaccaatattgatacattaaataaaagttcatatagtaagtcctcatttaagtcacagatagttcttagaaacccagagtttaagtgaaagaacgtctaaacatgccaaatttactatagactgattgataggaacaagagttaagttcctatggcaaatttctggttacagaaatatcacccagcttctaaataaagaacaaaacacttctaatattaaccactgaaataaataggagctatacatacatttcagaaagattaataaaaatcaataagataattactcagttattccagttcagggcggtggccagagcccatcctggcatcttggagcgcagggcaggaacagccctggacaggatgccctcccattgcaggtgacacacacgcacactcaatctgggaccatgcagacatgccagcttccctaatgggcacagctttggagtgtgggagctcgctggactacctggagaaacccatgcaaatacgtgggagaacatgcaaactccacacagacagtggcttgggctggggatctatttttttttttttncattctcgtcaatgctgtaatcaaatgatgctgaacaaaatgatgttatctganaacctactgtactttattcagatctcctcagttttcatctgcagtcccttttgagttccaggatcctgtctagcataccacattaggttttgtgatcacatctgactcctcttggctgtgacaattgtcaactttccttgtgtcgatgaccttggcagtttgaggtgtgctcgtcgggtattttgtaaagtgtctctcagtcgagattcgtctgatgccctctcatgttaagtctagggtgatgagtttgggaggagaccacataggtaaagtgccgttctcattacatcacatcaaggtacatactgtcaaaatgacttatcatctccatactgacattgattacctggctgaaataggggttgtcagctttctccactgtaaagttgttcttttccgtaataaaggattatggtctttattactgttctcttggaaggaagccactgtgtggaccccacacttcagaagtaaggaattatactccacctccttgggtgtgaagtatacacataaattatttggaattattctgcttaggagatttgtctcatcccccttaccacgctactcctacctatctccccttttatactaataatcttataaaaaaaaaaaaaaaaaaaaaaaaaaaaaaaaaaa

SEQ ID NO: 2756 - DNA, 2199 bp, Homo sapiens
  misc_feature (2143)..(2143): n equals a,t,g, or c
  misc_feature (2154)..(2154): n equals a,t,g, or c
  misc_feature (2159)..(2159): n equals a,t,g, or c
gcttactgtatggacaggttatatggaatggagtttgtagtatccacattaacaaagcaagtttatatggactggtatgatattagggatatgaattagaaatggatgttgttgcactcatttaaaatattttgcctctcactttatccccagttatagtgtccttttgaatttttctcacacagtgctactatatttcatgaactggtatataaacaaaccaaaattatttcttcaaatcaagaacttatctacgaagggcgacgcttagtcttagaacctggaaggctggcacaacatttccctaaaactactgaggaaaaccctatatttgtagtaagccgggaacctctgaataccataggattaatatatgaaaaawtttccctccctaaagtacatccacgttatgatttagacggggatgctagcatggctaaggcaataacaggggttgtgtgttatgcctgcagaattgccagtaccttactgctttatcaggaattaatgcgaaaggggatacgatggctgattgaattaattaaagatgattacaatgaaactgttcacaaaaagacagaagttgtgatcacattggatttctgtatcagaaacattgaaaaaactgtgaaagtatatgaaaagttgatgaagatcaacctggaagcggcagagttaggtgaaatttcagacatacacaccaaattgttgagactttccagktctcagggaacaatagaaaccagtcttcaggatatcgacagcagattatctccaggtggatcactggcagacgcatgggcacatcaagaaggcactcatccgaaagacagaaatgtagaaaaactacaagtcctgttaaattgcatgacagagatttactatcagttcaaaaaagacaaagcagaacgtagattagcttataatgaagaacaaatccacaaatttgataagcaaaaactgtattaccatgccacaaaagctatgacgcactttacagatgaatgtgttaaaaagtatgaggcatttttgaataagtcagaagaatggataagaaagatgcttcatcttaggaaacagttattatcgctgactaatcagtgttttgatattgaagaagaagtatcaaaatatcaagaatatactaatgagttacaagaaactctgcctcagaaaatgtttacagcttccagtgggaatcaaacataccatggaccccaatttatccaagttctaacacattagtagraatgactcttggtatgaagaaattaaaggaagagatggaaggggtggttaaagaacttgctgaaaataaccacattttagaaaggtttggctctttaaccatggatggtggccttcgcaacgttgactgtctttagctttctaatagaagtttaagaaaagtttccgtttgcacaagaaaataacgcttgggcattaaatgaatgcctttatagatagtcacttgtttctacaattcagtatttgatgtggtcgtgtaaatatgtacaatattgtaaatacataaaaaatatacaaatttttggctgctgtgaagatgtaattttatcttttaacatttataattatatgaggaaatttgacctcagtgatcacgagaagaaagccatgaccgaccaatatgttgacatactgatcctctactctgagtggggctaaataagttattttctctgaccgcctactggaaatatttttaagtggaaccaaaataggcatccttacaaatcaggaagactgacttgacacgtttgtaaatggtagaacggtggctactgtgagtggggagcagaaccgcaccactgttatactgggataacaatttttttgagaaggataaagtggcattattttattttacaaggtgcccagatcccagttatccttgtatccatgtaatttcagatgaattattaagcaaacattttaaagtgaattcattattaaaaactattcatttttttcctttggccataaatgtgtaattgtcattaaaattctaaggtcatttcaactgttttaagctgtatatttctttaattctgcttactatttcatggaaaaaaataaatttctcaattttaatgtaaaaaaaaaaaaaaccgaggggggccgnaccatcgccanaggancgatacatccggcgcgttacacgcggactggaacctgcta

SEQ ID NO: 2757 - DNA, 1385 bp, Homo sapiens
ggcacgagttatggtttaactcagcagaatttgttgaacaactacgacatgctggggatcatggcatggaatgcaacttgcaaaaactggctggcagcagaggctgccctggaaaagtactacctttccattttttatgggattgagttcgttgtgggagtccttggaaataccattgttgtttacggctacatcttctctctgaagaactggaacagcagtaatatttatctctttaacctctctgtctctgacttagcttttctgtgcaccctccccatgctgataaggagttatgccaatggaaactggatatatggagacgtgctctgcataagcaaccgatatgtgcttcatgccaacctctataccagcattctctttctcacttttatcagcatagatcgatacttgataattaagtatcctttccgagaacaccttctgcaaaagaaagagtttgctattttaatctccttggccatttgggttttagtaaccttagagttactacccatacttccccttataaatcctgttataactgacaatggcaccacctgtaatgattttgcaagttctggagaccccaactacaacctcatttacagcatgtgtctaacactgttggggttccttattcctctttttgtgatgtgtttcttttattacaagattgctctcttcctaaagcagaggaataggcaggttgctactgctctgccccttgaaaagcctctcaacttggtcatcatggcagtggtaatcttctctgtgctttttacaccctatcacgtcatgcggaatgtgaggatcgcttcacgcctggggagttggaagcagtatcagtgcactcaggtcgtcatcaactccttttacattgtgacacgcctttggcctttctgaacagtgtcatcaaccctgtcttctattttcttttgggagatcacttcagggacatgctgatgaatcaactgagacacaacttcaaatcccttacatcctttagcagatgggctcatgaactcctactttcattcagagaaaagtgaggggcttgtgaaacagattgttctacagatgaatctgtaagccagttacagtttgccttaactcatagacatcaatcagagagtgtcacagatttaaccttgatctaaagacaagttgtacccagagtatgtgaaaagaatgggacgacaagaatgtactggtttcttcctctaagaattgaaaggagttgaactgccttatgtttgggcatgtaactccaaaatactaggtagtataaggctttctcaatcagtgcaaaaatggaagatatataaagcaacaagttgtctgcatttgatcactggtcagattgtaaaaaaaaaaaaaaaaaa

SEQ ID NO: 2758 - DNA, 3787 bp, Homo sapiens
aattcccgggtcgacccacgcgtccggcattacctggtagtaataaaaataaataggtctaagccagaggccacaggttggaaatcttctgatattgcagcatgacatttctgacctggaaagatctatagaatgcaggcttcaccttgttaatttattgatgcacagacagaggcatgaaggggaggtgctttgtcagggccaacatcaatggccacaccagggctggaacccaggctcaccgactcccaggccactgtgcttggctctgccctctccctgaaccagccttagcacctcaaggcgggagttgatggtcctcattcccttccctctgtgtctccttacagcctagcagaactggagaaggaggtgggcaacctcaggaggggcctgagagcggtggaggtggagctggagtatcagaggcgccaggtacgggagcccagtgacaagtttgtccctgtcatgagcgacttcatcacggtgtccagcttcagcttctccgagctggaggaccagctaaatgaggccagggacaagttcgccaaggccttgatgcacttcggggagcatgacagcaagatgcagccagacgaattctttggcatctttgataccttcttgcaggccttctcagaggcccggcaggatctagaggccatgaggaggaggaaggaggaggaggagcggcgggcgcgcatggaagccatgctgaaggagcagagggaacgtgacaaggccggcaattaaccctcactaaagggaacaaaagctggagcccaccgcggtggcggccgctagaactagtggatcccccgggctccagggattcggcacgagggacttatgcaagctcaagcgcaccgcaagcgatcagggagccaggccctggaagttacccgggagcgggcaataaaccggctaaattattgacctggggaactagccacacaggaggccgggagacagggactggtgagaatggggctgagtggaggaggtggtgatatttaaaccatttggtgcttggtttagagccttgggctgggtcctgggatggggggctgtgtgaggctggaccaggtgtctccccacgcttaccttaaggggctcctcttatctccccttcacacgattccttctgtgccctggccccaggtattattctgaggctgccttggatggcctcaggccaggtaaccccaggctgaaggggccctgctccccatcccctaccatgggcacccatgtgctggcacagaacagttcgagatctagactggagaggtccacagccttgtccagagttcctgtgtagcacggggagcagtgatggagggagcccctgagagggaatctggtgagggaatccagactcccttctctcaaggggaggctcaacagaacattgacctgggggcaaactttcctcttgaatgggaaacagaggaggcattatatattctagttagatcagctctggtaggttccagagaacagtcaatgttggaaggatgatgcagggaccaaagccatcaggacagagtagcagtgtctgtttcccatgtcacaagtcctctggcctctccctgcatgtcttaagtatctttcccttccttctctaccctcacctccatcctgtctactaatccacagtcctagaagactcaccttgggtttccacagctatggctcactaccaggtgcttgatgaatctggcgaggggctcaagacagacctcatgcatcaccacacctcatgccttttgggcatctcccatgtccccatcttcctggacacctgccattgttgtgaagccagacagtgacctcaaatggtgccttggagtcccctacagcccctcagcagacggcagcacttgaatgcttagctccatcccatagttctctacttcatataaattgctcaagcccttccaccccttctctaacactagcttcaaggcagaagccacagcagcctctgtccagcctgcaggtggccacttggaaccatgtgtccactggcgttggggagttggttcctgagaggtctgagggccagagctgccctctacattaacatgctgtctctaagggtggcccctcctctcaggcgttcagatggtgcgaacagcagagcaggcaagggaaactggggagatggggatggaggaggaaggctgatatcctctggggagcacatcacctgaaggtgccaaggaggaaggctgagaggggggccaccccatttctggtacccaatttggttcttcagcccaacttgcaaggggttccttctggtcctcccatccactgccaccttccattttgtccatctcatgctggccttggtggatgggatggctgtatctagacaaaatttttctaaaactccatcaaggctcttattcaataccacgttccgagttggcctttcatcttctttgagactggccctgcctaacctctaccatcaatgagctcttgggccctttggcccttccctgtgtttctcactttccaacctaatccctggctcagggttattgccagtggagaactggtgagctggggcctactctcagctgcctatcttctgcctttcacttgcatccaactcctggggctgggaccgtagtagctgcgggggggaagaaacacagggtcggtgagcccagcatgtgcgttggtttgagggggcgggcggtgtgtgtgtgttctggtgggagggatctgagcaagtgcaagcctggctgacacaggtgtgaagaggccatcctggaacccaggtgagggcaagatgaaggcttccaggcagaacagctgcagagagtttggctatatgcatctgcagccccaagagctcccactgcaagacaagtgttggggaagatgggaggttgtgggtgaggcctctaaaggtcctctcccaaactgaccaggctgatgtcaacctaaccccctcagggccagggaacaggggagggctccacaagcgtgtctggcattcccacccaccatgggaagactggatacgcacctggaaacaaaaggactatggaagctgttcaagatacatttgatcttcagaaaagcagaatttggttcaactgttgacagaggacacaaatacgttgttccagagctcaaccttctcactctaaaagaaagatatttttctatttattttctacatctggccagtggctctggtgctagatgccactgtagccagatctccaacagtgccttggaccatggactcatactcaactgagtaagaaggggctggtgcccagtcggggtggctgagctggtccttaataggttgtttcttggtcttgctttcttcatgccctccccactgctcctgccacctttagataagtttctctagctaattttgtggccaatgtaaaattcgtcatcaacctaacaaacacaaccttctcagcagcatttctcccctgtgatggaaataaagtgtttagggcagtgggaggagaaaattctccaggtgaatggggaagggtctgttccagcctctccctactcccatcccatttccaccaactggggaactgtgactatctatctcccccgacttctaccagggatgccttcacgccaaggctgttctcaccagctgcctcagatgacaaatgaggctaatggacataatctacagtgtcctttttcacttgcaccttttttataagaatatattgtaatactaaaaaatattaaattcataccatccctaaaaaaaaaaaaaaaaaaa

SEQ ID NO: 2759 - DNA, 1705 bp, Homo sapiens
  misc_feature (170)..(170): n equals a,t,g, or c
atggggaccagcgggggccctgagcacttcccatctttggcacaagcccctgttcctagctcaccccagacttgctgatccccccatccctgcacgggccttggtcttggccatttctccaggttccctgagtggggaatggtgctgagaccctcctttgagtgattgtnttggacagtttttgttttcttgctgtctgtttarastartggttctcaaaccctgcttgggccatcccactggggarctgggacaccacctggcactgtggtggcagtgggggtgacactcagacaagggccatcgagggcccctggaccagaaagcgaagagggcgttgggggcaggaggcctgtggggccatgtgtgggggccgtctgggtggcgggagctgttggggcggggctgagcgccctcagcagcccactggagaaagcgctgctggggtcctcgtgtggggcccagggcccgacgtggaagcaatggagggctgcagggggtggcagtggggatgaatgagtaaggacagagtgcagcctgggtctcagacggggggtgggggacaggccacagagattccctatctcagcagagaggagacaggctcaggctgccacgccttgccaaaacccagcctggccaggccagcccggcaccttccacctagataagttgtgctgctccagagaaagagcctggggtcagagtggacctgcgatgcatggcacaacctgctggacagtggcgatgaggggttcagggacctgggcacccagaagcgggcacctgatattgtacccagcaaaactgctcctaataatgtcattttttctctctcttacaggcctcaggcccaggcccaaggccaagtgagagagcccaggccacaggacatgctgccattctgccaagagaggctcttctgggggccaggctgggactgggccccggaaaccaaaactccgtgccttacccagccggggccctcctggagccttcttggggtgttgtggctgggaacccgacaggcaccagtgccctgccaggcctggtgccctcctggaccgcctgcacgtgccagcctcccacctgcttcctaaaggcaaccctggcccacacccgcatgcgcccggtgcagcctgccaagggccagtcggggggtgctgcgtcctgccagtgtccaccacagctctgcctgcccttcagcccagcaaggtttaatcaaaatgcaatgctttgcaagtytttactgcttggaggtggctgagttgggggccctgggcaggggtaagctggcaggcagtgccatggcaggccagggtcccctcccatggggtctggcccccgttccagcatgtccagcccctgaagttggagtkgggggcggtctgcctttgctgccactgccaggcctctgccctgcagctgaaacttggccatcacatcaacagaaaacccctcccagtgccagctgcccagcgtgggcaggccctggggacaatacaggtccacctgaggggctgcagggtgacacccagcagccgctgccccctcactgcccacccagcgagggcagcctacccgagcctgccccctgccaggtgtgtgccctgaggctggcggctggatgcgtggccaataaaaagcagacctagaaaaaaaaaaaaaaaaaaaaagggcggccgctcgcgatctagaactagtc

SEQ ID NO: 2760 - DNA, 1067 bp, Homo sapiens
ccacgcgtccggtctactccaccgtcatcgacgtggagtagaggtcccgcagttgatgattttggtcttcttgtcccggttctcgtggaggaccgcgtttgcgcagatgaagaggaagatgccgatgcccatgatgaggggcccgaagaccttgagcttgtcagagtgcaggtagccagagaagatgcggaagaagaagcccacggacgtggaggaggaggacggggaggcggctcgtgctggaggcgtgctcctgggcgcgcccgcggaactggagttgacaccccctggagccctagggtggctcctggaccggtttttgctgccactgctactgctgttggccgtggttgggacccggtggctgctgcccgcagcggcagctgcttacccccctcccgattggtcccggtggccttgggccagtagcccaccaccgccatggctatgcccaccagcagcaccaggatcccacagagggcgatgagccctgagatggagcacagcttcagcttgcctttcaacaacaccacgtcgttcttgcgcctcttcttggctttccgcttgcgcttgggtatctggcttggggggcggagtggatcctgctttctggcggaaatccttagcaggccgcggtggcgatcatggcgagctcctggagtgcaggactagcctctgggatggaggcttgcacagggagggcgccaactgcccactagctgctcagccacctcctcctgccagggagaccgagggaggtcggggccggcgaacgggcgctcgggcgacacaaaggaaccatggagaaactttttcagcccgagccgacggcggagcgcagggacagcgccccggggccccgcatccgagcgcggctcagcagccccgcgggggcgagcgccgccccaggctcgcagtccccgccggcgctgtggcgggagccatttccaagagtttccaagaagtgtcaggtcctccgcatcccgcatcccgcctcggagccctcctctccgccgctcatctccggctcccggcgtcccctagcgcggcgctcccgggcgggccct

SEQ ID NO: 2761 - DNA, 2270 bp, Homo sapiens
aattcggcccgagtgcgcctgcacgcgtagaccgacccccccccagcgcgcccacccggtagaggacccccgcccgtgccccgaccggtccccgcctttttgtaaaacttaaagcgggcgcagcattaacgcttcccgccccggtgacctctcaggggtctccccgccaaaggtgctccgccgctaaggaacatggcgaaggtggagcaggtcctgagcctcgagccgcagcacgagctcaaattccgaggtcccttcaccgatgttgtcaccaccaacctaaagcttggcaacccgacagaccgaaatgtgtgttttaaggtgaagactacagcaccacgtaggtactgtgtgaggcccaacagcggaatcatcgatgcaggggcctcaattaatgtatctgtgatgttacagcctttcgattatgatcccaatgagaaaagtaaacacaagtttatggttcagtctatgtttgctccaactgacacttcagatatggaagcagtatggaaggaggcaaaaccggaagaccttatggattcaaaacttagatgtgtgtttgaattgccagcagagaatgataaaccacatgatgtagaaataaataaaattatatccacaactgcatcaaagacagaaacaccaatagtgtctaagtctctgagttcttctttggatgacaccgaagttaagaaggttatggaagaatgtaagaggctgcaaggtgaagttcagaggctacgggaggagaacaagcagttcaaggaagaagatggactgcggatgaggaagacagtgcagagcaacagccccatttcagcattagccccaactgggaaggaagaaggccttagcacccggctcttggctctggtggttttgttctttatcgttggtgtaattattgggaagattgccttgtagaggtagcatgcacaggatggtaaattggattggtggatccaccatatcatgggatttaaatttatcataaccatgtgtaaaaagaaattaatgtatgatgacatctcacaggtcttgcctttaaattacccctccctgcacacacatacacagatacacacacacaaatataatgtaacgatcttttagaaagttaaaaatgtatagtaactgattgagggggaaaagaatgatctttattaatgacaagggaaaccatgagtaatgccacaatggcatattgtaaatgtcattttaaacattggtaggccttggtacatgatgctggattacctctcttaaaatgacacccttcctcgcctgttggtgctggcccttggggagctggagcccagcatgctggggagtgcggtcagctccacacagtagtccccacgtggcccactcccggcccaggctgctttccgtgtcttcagttctgtccaagccatcagctccttgggactgatgaacagagtcagaagcccaaaggaattgcactgtggcagcatcagacgtactcgtcataagtgagaggcgtgtgttgactgattgacccagcgctttggaaataaatggcagtgctttgttcacttaaagggaccaagctaaatttgtattggttcatgtagtgaagtcaaactgttattcagagatgtttaatgcatatttaacttatttaatgtatttcatctcatgttttcttattgtcacaagagtacagttaatgctgcgtgctgctgaactctgttgggtgaactggtattgctgctggagggctgtgggctcctctgtctctggagagtctggtcatgtggaggtggggtttattgggatgctggagaagagctgccaggaagtgttttttctgggtcagtaaataacaactgtcatagggagggaaattctcagtagtgacagtcaactctaggttaccttttttaatgaagagtagtcagtcttctagattgttcttataccacctctcaaccattactcacacttccagcgcccaggtccaagtctgagcctgacctccccttggggacctagcctggagtcaggacaaatggatcgggctgcagagggttagaagcgagggcaccagcagttgtgggtggggagcaagggaagagagaaactcttcagcgaatccttctagtactagttgagagtttgactgtgaattaattttatgccataaaagaccaacccagttctgtttgactatgtagcatcttgaaaagaaaaattataataaagccccaaaattaagaaaaaaaaaaaaaaaaaaaactcgggggggg

SEQ ID NO: 2762 - DNA, 778 bp, Homo sapiens
ccacgcgtccgcccacgcgtccgtctagatcgcgagcggcagcccataaaaataaaaaattataacaaaccctgagaaccaaaatgaacgaaaatctgttcgcttcattcattgcccccacaatcctaggcctacccgccgcagtactgatcattctatttccccctctattgatccccacctccaaatatctcatcaacaaccgactaatcaccacccaacaatgactaatcaaactaacctcaaaacaaatgataaccatacacaacactaaaggacgaacctgatctcttatactagtatccttaatcatttttattgccacaactaacctcctcggactcctgcctcactcatttacaccaaccacccaactatctataaacctagccatggccatccccttatgagcgggcgcagtgattataggctttcgctctaagattaaaaatgccctagcccacttcttaccacaaggcacacctacaccccttatccccatactagttattatcgaaaccatcagcctactcattcaaccaatagccctggccgtacgcctaaccgctaacattactgcaggccacctactcatgcacctaattggaagcgccaccctagcaatatcaaccattaaccttccctctacacttatcatcttcacaattctaattctactgactatcctagaaatcgctgtcgccttaatccaagcctacgttttcacacttctagtaagcctctacctgcacgacaacacataaaaaaaaaaaaaaaa

SEQ ID NO: 2763 - DNA, 3268 bp, Homo sapiens
cccgggtcgacccacgcgtccggtctgcggccagcaacactggcacccccgatgggcctgaggcccccccaggcccagatgcctcccccgatgccagctttgggaagcagtggtcctcatcctcccgttcctcctactcatcccaacatggaggggctgtgtctccccagagcttgtctgagtggcgcatgcagaacattgcccgagactctgagaacagctccgaggaagagttctttgatgcccacgaaggcttctcggacagtgaggaggtcttccccaaggagatgaccaagtggaactccaatgacttcattgatgcctttgcctccccagtggaggcagagggaacgccagagcctggagccgaggcagctaaaggcattgaggatggggcccaagcacccagggactcagagggcctggatggagccggggagctgggggctgaggcatgcgcagtccacgccctcttccttatcctgcacagcggcaacatcctggactcaggccctggagacgccaactccaagcaggcggatgtgcagacgctgagctccgccttcgaggccgtcacccgcatccacttccctgaagccttgggccacgtggcgctgcgactggtgccctgtccacccatctgcgccgccgcctatgcccttgtctccaacctgagcccttacagccacgatggggacagcctgtctcgctcccaagaccacattccactggctgccctgccactgctggccacctcatcctcccgctaccagggcgccgtggccaccgtcattgcccgcaccaaccaggcctactcagccttcctgcgctcacctgagggtgccggcttctgtgggcaggtcgcactgattggagatggtgttggtggcatcctgggctttgatgcactctgccacagtgctaacgcgggcaccgggagtcggggcagcagccgccgtgggagcatgaacaatgagctgctctctccggagtttggcccagtgcgggaccccctggcagatggtgtggaaggcctgggtcggggcagcccagaaccctcggccttgcctccccagcgcatccccagcgacatggccagtcctgagcccgagggctctcagaacagccttcaggcagcccccgcaaccacctcctcctgggagccccggcgggcaagcacggccttctgcccacccgctgccagttccgaggcacctgacggccccagcagcactgcccgccttgacttcaaggtctctggcttcttcctcttcggctccccactgggcctggtgctggctctgcgcaaaactgtgatgcccgcctggagggcctggctacagaaggggaacctgaggcccagaaagaagggactcgccaaggcagcccagatgcgcccagcctgtgaacagatctacaacctcttccacgcggccgacccctgcgcctcacgcctcgagcccctgctggccccgaagttccaggccatcgccccactgaccgtgccccgctaccagaagttccccctgggagatggctcatccctgctgctggccgacactctgcagacgcactccagcctctttctggaggagctggagatgctggtgccctcaacacccacctctactagcggtgccttctggaagggcagtgagttggccactgaccccccggcccagccagccgccccagcaccaccagtgaggtggttaagatcctggagcgctggtgggggaccaagcggatcgactactcgctgtactgccccgaggcgctcaccgctttcccaccgtcacgctgcccacctcttccacgccagctactgggagtccgccgacgtggtggcgttcatcctgcgccaggtgatcgagaaggagcggccacagctggcggaatgcgaggagccgtccatctacagcccggccttccccagggagaagtggcagcgaaaacgcacgcaggtcaagatccggaacgtcacttccaaccaccgggcgagcgacacggtggtgtgcgagggccgcccccaggtgctaagcgggcgcttcatgtacgggcccctggacgtcgtcacgctcactggagagaaggtggatgtctacatcatgacgcagccgctgtcgggcaagtggatccactttggcaccgaagtcaccaatagctcgggccgctcaccttcccagttcccccagaacgcgcgctgggcattggtgtctaccccgtgcgcatggtggtcaggggcgaccacacctatgccgaatgctgcctgactgtggtggcccgcggcacggaggctgtggtcttcagcatcgacggctccttcaccgccagcgtctccatcatgggcagcgaccccaaggtgcgagctggcgccgtggacgtggtcaggccggccggatatgcagaagcaccgcgtggtggcatggctgtcgcagcacaacttcccccacggcgtcgtctccttctgcgacggcctcacccacgacccactacgccagaaggcaatgtttctgcagagcctggtgcaggaggtagaactgaacatcgtggccggttatgggtctcccaaagatgtggctgtatacgcggcgctggggctgtccccgagccagacctacatcgtgggccgtgccgtgcggaagctacaggcgcagtgccagttcctgtcagacggctatgtggcccacctgggccagctggaagcgggctcgcactcgcatgcctcctcgggacccccgagagctgccttgggcaagagcagctatggtgtggctgcccccgtggacttcctgcgcaaacagagccagctgcttcgctcgaggggccccagccaggcggagcgtgagggcccgggaacaccacccaccaccctggcacggggcaaagcacggagcatcagcctgaagctggacagcgaggagtgaggcccacaccagcctggacctgggttatttattgacacacccaaggggcccgaggggctgcgtttgggaggctggggacccagacttttggccccagcgctggcccccccagccccacaccctatatctccgtgtgctcctcggtgttacttccctttcatatgaggggacccagcgccggggggagggaggagggcgtgggcatgggcgcagaggcttttccagtgtgtataaatccatgaaaataaacgccacctgcaccccaaaaaaaaaaaaaaaaaaaaaaaaaaaaaaaaaaaaaaaaaaaaaaaaaaaaaaaaaagggcggccgctctagagga

SEQ ID NO: 2764 - DNA, 3350 bp, Homo sapiens
tctagctgtagtcgggctgcttgtcggcttggctccccctcccccctttgctctctgcctcgtctttccccaggacttcgctattttgcttttttaaaaaaaggcaagaaagaactaaactcccccctccctctcctccagtcgggctgcacctctgccttgcactttgcacagaggtagagagcgcgcgagggagagagaggaaagaaaaaaaataataaagagagccaagcagaagaggaggcgagaatggcatsagaactggcaatgagcaactccgacctgcccaccagtcccctggccatggaatatgttaatgacttcgatctgatgaagtttgaagtgaaaaaggaaccggtggagaccgaccgcatcatcagccagtgcggccgtctcatcgccgggggctcgctgtcctccacccccatgagcacgccgtgcarctcggtgccmmcttcccccagcttckcrsygcccagcccgggctcgggcagcgagcagaaggcgcacctggaagactactactggatgaccggctacccgcagcagctgaaccccgaggcgctgggcttcagccccgaggacgcggtcgaggcgctcatcagcaacagccaccagctccagggcggggggckcmtgcacccgcaccacgccgccgggccttgcacttcgacgaccgcttctccgacgagcagctggtgaccatgtctgtgcgcgactgaaccggcagctgcgcggggtcagcaaggaggaggtgatccggctgaagcagaagaggcggaccctgaaaaaccgcggctatgccmagtcctgccgcttcaagagggtgcagcagagacacgtccttggagtcggagaagaaccagctgctgcagcaagtcgaccacctcaagcaggagaaatacgagaagttggtgagmagcggcttccgagaaaacggctcgagcagcgacaacccgtcctctcccgagtttttcatgtgagtctgacacgcgattccagctagccaccctgataagtgctccgcgggggtccggctcgggtgtgggcttgctagttctagagccatgctcgccaccacctcaccacccccacccccaccgagtttggcccccttggcccctacacacacacaaacccgcacgcacacaccacacacacacacacacacacacacacacacacaccccacaccctgctygagtttgtggtggtggtggctgttttaaactggggrgggaatgggtgtctggctcatggattgccaatctgaaattctccataacttgctagcttgttttttttttttttttacacccccccgccccacccccggacttgcacaatgttcaatgatctcagcagagttcttcatgtgaaacgttgatcacctttgaagcctgcatcattcacatattttttcttcttcttccccttcagttcatgaactggtgttcattttctgtgtgtgtgtgtgttttattttgtttggatttttttttttaattttacttttagagcttgctgtgttgcccaccttttttccaacctccaccctcactccttctcaacccatctcttccgagatgaaagaaaaaaaaaagcaaagtttttttttcttctcctgagttcttcatgtgagattgagcttgcaaaggaaaaaaaaatgtgaaatgttatagacttgcagcgtgccgagttccatcgggttttttttttagcattgttatgctaaaatagagaaaaaaatsctcatgaaccttccacaatcaagcctgcatcaaccttctgggtgtgacttgtgagttttggccttgtgatgccaaatctgagagtttagtctgccattaaaaaaactcattctcatctcatgcattattatgcttgctactttgtcttagcaacaatgaactataactgtttcaaagactttatggaaaagagacattatattaataaaaaaaaaaagcctgcatgctggacatgtatggtataattattttttcctttttttttccttttggcttggaaatggacgttcgaagacttatagcatggcattcatacttttgttttattgcctcatgacttttttgagtttagaacaaaacagtgcaaccgtagagccttcttcccatgaaattttgcatctgctccaaaactgctttgagttactcagaacttcaacctcccaatgcactgaaggcattccttgtcaaagataccagaatgggttacacatttaacctggcaaacattgaagaactcttaatgttttctttttaataagaatgacgccccactttggggactaaaattgtgctattgccgagaagcagtctaaaatttattttttaaaaagagaaactgccccattatttttggtttgttttatttttattttatattttttggcttttggtcattgtcaaatgtggaatgctctgggtttctagtatataatttaattctagtttttataatctgttagcccagttaaaatgtatgctacagataaaggaatgttatagataaatttgaaagagttaggtctgtttagctgtagattttttaaacgattgatgcactaaattgtttactattgtgatgttaaggggggtagagtttgcaaggggactgtttaaaaaaagtagcttatacagcatgtgcttgcaacttaaatataagttgggtatgtgtagtctttgctataccactgactgtattgaaaaccaaagtattaagaggggaaacgcccctgtttatatctgtaggggtattttacattcaaaaatgtatgtttttttttcttttcaaaattaaagtatttgggactgaattgcactaagatataacctgcaagcatataatacaaaaaaaaattgcaaaactgtttagaacgctaataaaatttatgcagttataaaaatggcattactgcacagttttaagatgatgcagatttttttacagttgtattgtggtgcagaactggattttctgtaacttaaaaaaaaatccacagttttaaaggcaataatcagtaaatgttattttcagggactgacatcctgtctttaaaaagaaatgaaaagtaaatcttaccacaataaatataaaaaaatcttgtcagttacttttcttttacatattttgctgtgcaaaattgttttatatcttgagttactaactaaccacgcgtgttgttcctatgtgcttttctttcattttcaattctggttatatcaagaaaagaataatctacaataataaacggcatttttttttgaaaaaaaaaaaaaaaaaaaactcgaggggggcccggtacccaawtcgccctagtgatcgta

SEQ ID NO: 2765 - DNA, 3054 bp, Homo sapiens
  misc_feature (3040)..(3040): n equals a,t,g, or c
ggcacgaggtctccagcaccatgtctggtttgtctggcccaccagcccggcgcggcccttttccgttagcgttgcctgcgcagcacctcaagatcacagattctgctggccatattctctactccaaagaggatgcaaccaaggggaaatttgcctttaccactgaagattatgacatgtttgaagtgtgttttgagagcaagggaacagggcggatacctgaccaactcgtgatcctagacatgaagcatggagtggaggcgaaaaattacgaagagattgcaaaagttgagaagctcaaaccattagaggtagagctgcgacgcctagaagacctttcagaatctattgttaatgattttgcctacatgaagaagagagaagaggagatgcgtgataccaacgagtcaacaaacactcgggtcctatacttcagcatcttttcaatgttctgtctcattggactagctacctggcaggtcttctacctgcgacgcttcttcaaggccaagaaattgattgagtaatgaatgaggcatattctcctcccaccttgtacctcagccagcagaacatcgctgggacgtgcctggcctaaggcatcctaccaacagcaccatcaaggcacgttggagctttcttgccagaactgatctcttttggtgtgggaggacatggggtaccacctacacccaacaagtcaatgagggacttctttttaatttggtaggattttgactggttttgcaacaataggtctattattagagtcacctatgacaaaaaataggggttacctagataatgccaaagtcagcatttgtcctgggttcccttgtgtgatctgtttggactatgttttcttttcttctcccacttgctcagcagcttgggcttccattctagttcttttaccaagatttttgtgtgaccatgttgacttcatttggattgccctctttcaatttccttgtgaaaacacccttaactttctctttacccttagctgaaatgtttacatagcttctggtgatatcttttcatgattttatatctcttaaaatggtgatggatgtgacacctcataaaagtgagctttgaactgtagataactcttaaagaaaatgtcattttagacaattaaaatatttgtgctcaactgcttgaacttttttcgtgtatgtgtatttaattctatgcaatattatcacatgtgtagattcatgtgaccaccatcacaagagacagaacagttctgtcacatggatcccttgcactgcccttttacagccgcagccacatccctttcttataccctcaccccaacctgtggstaccactgktctgtccyccatctctgtaattttgtcatttcaagaatgttgtatgaatggaatcatacagaatgtaatcttacraggctgatcttttttcattcagcataattcccttgaaatccatccaagttgttgcatgtatgaatagtttcttcctttttttcttttaaaaatgttttatatatttagggggtataagtacagatttcttacatgcatatattgcatcgtggtgaagtgggggcagttccttttgattgctgagtagtattccatggtatggatgtaccacagtttgcttaaccattcacccactaaaggacataagagttgttttcagttttttgccctaataaagctgctgtgaacattcatgtacaggtttttatgtgaacatacattttcattttctgggataaatgctcaaaagggcaactgttgggttgtatggtaaacacatatatttttgtaagaaactaccctactctttttccagagtggctctactttttacatacagccactcatacaattcagacagcaatgtatgattgatccagtttcttcacatcctcaccagcatttggtattactactattttttatcttaaccattcacatagatgtgtgtaatgataccacatgtggttttaatttgcatttccaatggctaatgatgttgagtatctttttgtgtgctaatttgccatctatgtatcctcttcggtgaaatgtcttcatgtcttttgtctattttctatttaggtcatttgttctttttactattgagttttgagaggttttttatatatcctagataaaattcctctgttagatatgtggttgcttgaatttttaacataacttctaccaaggaaaaataagtaaaatttccaacccttgcatggccagtcacttacttaattcctgtccttcagtgttccatctagagaattaagagatatgatgtataaaatagacatcgagggccattaagagagtaaatacttaaaaatacatgttatgaaagcaaagccaataatcactgtaggagtatgagttgcctaagggccaaaactaatgtaaataagagaaagtgtggatataaatgaccattgtttataaacagtyatgaaaaatgctgtgacttgaaatctttcccacatctcccaagaaagtaggtaggagtttatcctttccgtaatctctttttaaccctgctgactattacagggcttgtttaatcacagtggcaagaattacatgtatcttacagtaaagaaacagaatactggaatcgttagagaaccctgatgtgttgacctggataaagtacaaaggtggaagagggaatgagttatgctgttaaaatctcaggctattctgttaatgttcctgctactatgaacccaaactttttttttcccccttttgactccttgtgtcttcctctcctgtggcataaaagtagttctgtcgttaacttgtacaacattgccatctgctgttgagaattggtaggtactgcttctgagaacctggctgcagatccttagcataggcagcaaatgttgagaaagtctatctgtagtattacatatactaagttacagaggatgcatycaagtagagaaaataatatgtgggttaagatacatccttaaactttttttttttggggggggggggacggagcttgctgnacgcccagctggag

SEQ ID NO: 2766 - DNA, 1029 bp, Homo sapiens
cccgggcagatatcctttataagaattaaacattttatcctttgtaattagaacaattattttatggattttgataaaccagtttttaaattttcaatgaattttgaaacatttgtgtacttgtgtggctacattaagtcaagataaagaacatttctgtcacctcagaaagaccctttttgttcttttgtggccatactccacccatggtcctgggcatccattgacctgctttctgtccctgtagattagttttgcctgttctagaattttatgtatgtaagtggaatgatgtactatgtatgtttgtgtttggcttatttttaccagcaagtttttgaggttcatgttattgtgtgtatcagaagttagtttctatttattgctcagtagtattcatctgtgaattaccatggtctgttaatatatccatctattgatgatgaacatttagattacttttagttttgcctattaaaaataaagttagtatgaatatgcatgtacaagttgtattgtggatatactttgtgataataactagaaccaggagtggttcaaaatttaatttacacatctactccctgtgttatttgcctgctcttagtgtgccaaatgttatttagtacatttgaaaggatgaatctcagtatagactgagtttgtattgtggtccccaatgtttagatcatatatctgtatacctatctctgcgatgattttcatcatcatttcagtaactcagatttaccaagttcttattctgtatcaggtgataattgtaatccctgtatgtcttatgtcacttaaactatacaactgaggtgggttctatccccatgttgcagtgaggaagctaaagtacaaactagctgttaagtggtagagacagaattcttgattggatttctgatcctgcacatataatttaacttgtaattatgatatctcttgatatttatactattatgtaaaagtgcttctgtaaaaaattaaatttgaaatttcaaaaaaaaaaaaaaaaaaaaa

SEQ ID NO: 2767 - DNA, 2319 bp, Homo sapiens
  misc_feature (121)..(121): n equals a,t,g, or c
gcggcaagaagacgccatggggcaagcgtggctggaagatgttccacaccttactgcgagggatggttctctacttcctgaagggagaagaccactgtctggagggggagagcttggtggngcagatggtggatgagcccgtgggggtgcaccactcgctggccacccccgtcacgcattacaccaagaagcccacgtmttccagctgcgcacggctgactggcgcctctacctcttccaggcacccactgccaaggagatgagctcctggatcgcgcgcatcaacttggctgcggccacscactccgcgccgcccttccccgccgctgtgggctcccagcgcagattcgtgcggcccatcctgcccgtgggccccgcccagagctccctggaggagcagcatcgatcccacgagaactgcctggacgctgccgcggacgacctgctggatctacagaggaacctgccggagcggcggggccgtggccgcragctggaggagcaccgcctgcggaaggagtacctggagtacgagaaaacccgctacgagacctacgtgcagtgctggtggcccgcctgcactgcccctctgatgctctggacctgtgggaggagcagctggggarggaagctggaggcactcgggagcccaagctcagcctgaagaagtcccactcgagcccgtccctgcaccaggatgaggctcccaccacggccaaggtgaagcgcaacatctcagagcgcagaacctaccggaagatcatccctaagcggaaccgcaatcagctgtgaaccagcaccacctcagagacactgttccctgctccaggktagacctgagatgaacctccctggaggagacttatttcaatgagtccaccatgacggatgaggcacytcctttccctgctgaargacaaaccttgtttccctgtggccctcattcttgtgctcctgaagctttcctaatattgctgtgctccccaccacccccatggcagtccctccgcagccccagtccctggccacgcccaagggaagagggaggtgaggacttgactttcctcccagagctcagcccatgtcaccctccaggccccagaatccagagtggcctcatttcctagacttgctgagaactcagcacttgtttgagaaccagtgcttatgtggtgtgcccttggcttctgggggagagcttggggcagcagaggcccctgggcagcccagccaggggagccacagccccgaggatggtcttgctctgggaattaggtgaccttcctggggaggccccaggagagtgaatcagggactcttgagaaattcctaaccagcctcctgtgacccagggagcagggtcgctaaggtcctgcccactgaggggacagccttctgggcagggacctcggggggcttcaagggctctgcacggctgtggggccctgtgcctttgtctccttgtgtctcctttcccccgaagtagatgaaacagtctcacatacccaactgctcatcaacagagcagagctgatggcatgagtragggctgggcggggtggggcctccagagctttgcagggaaccctggaaccctaggaacaaggagcctttgttccaacagagcagagcaaggaggttctctatgttcagaccactggagaggatagagaggtaaaaggtggcgacagtttcccttaggggtctgcctggcaggagccacagctcaggagagttgtgagggatgggacggaggctggcgaccaggcgaggcctaggccaggctcgggagacttttctgtgctcctttctacacatgccttaaaccttccttcctgtggggtgcctggaccccttccccatctctggcagctcagagggtctctgctgctctcccctgggaaatcccctcatcctgccctctggctgcctcccagctgggcttgttctctgagggaggttccggagactcatggacttggggctctgcctgtaggaaggaggctgggccggagggaccagccaccattgtctctgttcagccaagtgtgcaagtaggctgcccgccaagagggggcctctgctacccgctgctgcctgccggctgacacactgcctccccagccttcctgctaggccaccctcctcccttcccatgcttgtaaccagctctggggcttgcacctccacaaagtaaggttggcccttggaggccatgtttgggtctccggccagggcctagggctaggccatgcacccaatgggtgcacaataaataacaggtcaacaaaaaaaaaaaaaaaaaaaaaaaaactcgag

SEQ ID NO: 2768 - DNA, 2331 bp, Homo sapiens
  misc_feature (121)..(121): n equals a,t,g, or c
gcggcaagaagacgccatggggcaagcgtggctggaagatgttccacaccttactgcgagggatggttctctacttcctgaagggagaagaccactgtctggagggggagagcttggtggngcagatggtggatgagcccgtgggggtgcaccactcgctggccacccccgtcacgcattacaccaagaagcccacgtmttccagctgcgcacggctgactggcgcctctacctcttccaggcacccactgccaaggagatgagctcctggatcgcgcgcatcaacttggctgcggccacscactccgcgccgcccttccccgccgctgtgggctcccagcgcagattcgtgcggcccatcctgcccgtgggccccgcccagagctccctggaggagcagcatcgatcccacgagaactgcctggacgctgccgcggacgacctgctggatctacagaggaacctgccggagcggcggggccgtggccgcgagctggaggagcaccgcctgcggaaggagtacctggagtacgagaaaacccgctacgagacctacgtgcagctgctggtggcccgcctgcactgcccctctgatgctctggacctgtgggaggagcagctggggagggaagctggaggcactcgggagcccaagctcagcctgaagaagtcccactcgagcccgtccctgcaccaggatgaggctcccaccacggccaaggtgaagcgcaacatctcagagcgcagaacctaccggaagatcatccctaagcggaaccgcaatcagctgtgaagccagcaccacctcagagacactgttccctgctccagggtagacctgagatgaacctccctggaggagacttatttcaatgagtccaccatgacggatgaggcacctcctttccctgctgaaggacaaaccttgkttccctgtggccctcattcttgtgctccctgaagctttcctaatattgctgtgctccccaccacccccatggcagtccctccgcagccccagtccctggccacgcccaagggaagagggaggtgaggacttgactttcctcccagagctcagcccatgtcaccctccaggccccagaatccagagtggcctcatttcctagacttgctgagaactcagcacttgtttgagaaccagtgcttatgtggtgtgcccttggcttctgggggagagcttggggcagcagaggcccctgggcagcccagccaggggagccacagccccgaggatggtcttgctctgggaattaggtgaccttcctggggaggccccaggagagtgaatcagggactcttgagaaattcctaaccagcctcctgtgacccagggagcagggtcgctaaggtcctgcccactgaggggacagccttctgggcagggacctcggggggcttcaagggctctgcacggctgtggggccctgtgcctttgtctccttgtgtctcctttcccccgaagtagatgaaacagtctcacatacccaactgctcatcaacagagcagagctgatggcatgagtragggctgggcggggtggggcctccagagctttgcagggaaccctggaaccctaggaacaaggagcctttgttccaacagagcagagaaggaggttctctatgttcagaccactggagaggatagagaggtaaaaggtggcgacagtttcccttaggggtctgcctggcaggagccacagctcaggagagttgtgagggatgggacggaggctggcgaccaggcgaggcctaggccaggctcgggagacttttctgtgctcctttctacacatgccttaaaccttccttcctgtggggtgcctggaccccttccccatctctggcagctcagagggtctctgctgctctcccctgggaaatcccctcatcctgccctctggctgcctcccagctgggcttgttctctgagggaggttccggagactcatggacttggggctctgcctgtaggaaggaggctgggccggagggaccagccaccattgtctctgttcagccaagtgtgcaagtaggctgcccgccaagagggggcctctgctacccgctgctgcctgccggctgacacactgcctccccagccttcctgctaggccaccctcctcccttcccatgcttgtaaccagctctggggcttgcacctccacaaagtaaggttggcccttggaggccatgtttgggtctccsgccagggcctagggctaggccatgcacccaatgggtgcacaataaataacaggtcaacaaaaaaaaaaaaaaaaaagaaaaaaaaaaaaaaaagtcgac

SEQ ID NO: 2769 - DNA, 2331 bp, Homo sapiens
  misc_feature (121)..(121): n equals a,t,g, or c
gcggcaagaagacgccatggggcaagcgtggctggaagatgttccacaccttactgcgagggatggttctctacttcctgaagggagaagaccactgtctggagggggagagcttggtggngcagatggtggatgagcccgtgggggtgcaccactcgctggccacccccgtcacgcattacaccaagaagcccacgtmttccagctgcgcacggctgactggcgcctctacctcttccmggcasccactgccaaggagatgagctcctggatcgcgcgcatcaacttggctgcggccacccactccgcgccgcccttccccgccgctgtgggctcccagcgcagattcgtgcggcccatcctgcccgtgggccccgcccagagctccctggaggagcagcatcgatcccacgagaactgcctggacgctgccgcggacgacctgctggatctacagaggaacctgccggagcggcggggccgtggccgcgagctggaggagcaccgcctgcggaaggagtacctggagtacgagaaaacccgctacgagacctacgtgcagctgctggtggcccgcctgcactgcccctctgatgctctggacctgtgggaggagcagctggggagggaagctggaggcactcgggagcccaagctcagcctgaagaagtcccactcgagcccgtccctgcaccaggatgaggctcccaccacggccaaggtgaagcgcaacatctcagagcgcagaacctaccggaagatcatccctaagcggaaccgcaatcagctgtgaagccagcaccacctcagagacactgttccctgctccagggtagacctgagatgaacctccctggaggagacttatttcaatgagtccaccatgacggatgaggcacctcctttccctgctgaaggacaaaccttgtttccctgtggccctcattcttgtgctccctgaagctttcctaatattgctgtgctccccaccacccccatggcagtccctccgcagccccagtccctggccacgcccaagggaagagggaggtgaggacttgactttcctcccagagctcagcccatgtcaccctccaggccccagaatccagagtggcctcatttcctagacttgctgagaactcagcacttgtttgagaaccagtgcttatgtggtgtgcccttggcttctgggggagagcttggggcagcagaggcccctgggcagcccagccaggggagccacagccccgaggatggtcttgctctgggaattaggtgaccttcctggggaggccccaggagagtgaatcagggactcttgagaaattcctaaccagcctcctgtgacccagggagcagggtcgctaaggtcctgcccactgaggggacagccttctgggcagggacctcggggggcttcaagggctctgcacggctgtggggccctgtgcctttgtctccttgtgtctcctttcccccgaagtagatgaaacagtctcacatacccaactgctcatcaacagagcagagctgatggcatgagtragggctgggcggggtggggcctccagagctttgcagggaaccctggaaccctaggaacaaggagcctttgttccaacagagcagagaaggaggttctctatgttcagaccactggagaggatagagaggtaaaaggtggcgacagtttcccttaggggtctgcctggcaggagccacagctcaggagagttgtgagggatgggacggaggctggcgaccaggcgaggcctaggccaggctcgggagacttttctgtgctcctttctacacatgccttaaaccttccttcctgtggggtgcctggaccccttccccatctctggcagctcagagggtctctgctgctctcccctgggaaatcccctcatcctgccctctggctgcctcccagctgggcttgttctctgagggaggttccggagactcatggacttggggctctgcctgtaggaaggaggctgggccggagggaccagccaccattgtctctgttcagccaagtgtgcaagtaggctgcccgccaagagggggcctctgctacccgctgctgcctgccggctgacacactgcctccccagccttcctgctaggccaccctcctcccttcccatgcttgtaaccagctctggggcttgcacctccacaaagtaaggttggcccttggaggccatgtttgggtctccggccagggcctagggctaggccatgcacccaatgggtgcacaataaataacaggtcaacaaaaaaaaaaaaaaaaaaraaaaaaaaaaaaaaaagtcgac

SEQ ID NO: 2770 - DNA, 643 bp, Homo sapiens
aattccccggggctctgagggccctccagacctgctcgggtgctggggccatgccgagtcgcggccctgctcagccggaagaggctcccggacctggatgtacagggcagtctctcttcccggggctatgggctgggcctgtcctgccgtcatggccccctgcttcctgctccttggagctggctcccggactttgcccaccatccatgcagtggctcccagggcagagcctctccttgtactttggcagccatagaaagcgtgctcattttctgttttcctgtgttaggaaaaaaccacctgttttccaaggggagagggcggggcctgagggtgggggcggggcctcttcattggcccagcttggcgaaagcgaggcacactgcttactgccttggggttgtggagatggacccgtgacctcgtggaggccgtgtgggggcagcagcctggcctgtgccatggtgggtgtcctggggcctgtgcggagggagccacctcaccctgcagcccaggttgcaggtgtggccttgtttctccttgcccagcagtgctgccttcagcggccgtgacggggccagctggacacacggtgagattttctcgtatgtaaataaaaggcaatttggtaaaaaaaaaaaaa

SEQ ID NO: 2771 - DNA, 1620 bp, Homo sapiens
ggcacgagggaaccttcattggtgctcatttactgtggactgtaagcatgagtgaattctggttgtgtttcaactgctgtattgcagaacagcctcagcctaaaaggcgacggcggattgacagaagtatgattggagagcccacaaactttgtgcatacagctcatgttggatcaggagacctgttcagtggaatgaattcagttagctccattcagaaccaaatgcagtccaagggaggttatggaggtggaatgcctgccaatgtccagatgcagctcgtggatacgaaggcgggatagccctggtcctttctccaggttattgtgaatttctatattttctctgtccactattctgtaatttttttttgtcctgtgattgcttttattttgaattacaaaaaagaagtgtgatgggcaccttgtccaccctgtcgtgattattccagtgagatgttactgttctgctctgaagaagatactgtcagacgaatcctgcatttccttcagctggcatgcatgcctttggactcaatggacagagttctttggattgtcactgaattttcaatgtttaatcagtatggatctgatcttcgcatgatcttttttgtgaatgctaacaccattttgcagttttttttttctattttaaacatttttcttttcactgccgaccccctgccttacgattttattggaaagcaaggacctgctattatttgttaatttgccatcatttatgtatattttggaaggtatgagacccacaagcacaatgatcatttttatttgtttgtttgtttgaaacttcagcagaatagatatctgcatgctttatgaagttgttgcttcggtaagagcccatgggatgccagaaattaacatttctttgctgccatgggctgatgatgctgctattagataaagtttagctgtggcaccaagtcacatcattttcatagaaaaagattacttgtagcttattttagaagtatgaccttttggtctgtttgattgattgattagaattgcaataaaagaaaagcttgcattcataaggcattcattctgtgtaaatgttcaatatatttattttgagagcaaggacctgtggttgtaaacaggtgtggttacaggtgtggttatgtatctgagtgttgcggtcatactctcctccagtccaatcctgagcatcttcatcttattaattagctgttcgtttctttgtgcactcattcttttatttttacttctttttaatgttatggtatccagttgtttccagtagcagtttcttgaacttctggcctgtactactaactgcagacctccagagtcactggcctttctgtgctctacatattattttaggggccacatcagttgccaagagcaacatacataccgacctggctgaattattgccagtgaaaacaacctgtacgaagcctttgctcaggttctaaaatatgtttgtccttgcacgaattttgtatatttcaaatatttctgtaaaggtttcttcttttctgttagagtgtggtgttaagccagagtcagtggtttgtgttctcattaaaatgtttgtttaaatcctaaaaaaaaaaaaaaaaaa

SEQ ID NO: 2772 - DNA, 1095 bp, Homo sapiens
ggcaaagaccaagatttttgtcgtgtagtcaggctcatcatgcctgcctccttcttccctttggagaattctgagggatattcctcaatctctcagaatcaaaatcttaagtgtctaaacttccaaatgactgcagcttttctcaagttaagaagccaaactaaaataggttaccatcctcttttttttaggaaagagtttatgagtgtcacaagtgcctggtgtggagtttggattatttataggattattaaatgactctctgaggcacaggtgaatacataatttttttgagggagattgcctaatgaacatttgtgcggtaaatattaagtaagcactgtttcatgtgccagggataaaagattaaagatagttcttccatctggggaggagatagcaaaacacatggacaattaaaatatggcctaattaaatactgtgataattataaatatcaggtgctcagaagtttgtaggaaggcctttgggggagaagagcaaagggtaggcaggtgctgttcaagttgttttagaaaagggaaccctgatgagtttaggatacagttggccctccatatccgtgagttttgcatttgtggattcaaccaaccgagattggaaaataagttaggcccatgatcgttgtgcctgtgctgaacaggtacagacatttttcttgctagtattccctaaacaatacagtatagcaactctttacatagcatttccactgtattaggtattaataaataatctagagtaatgatttaaagcatacaagggccaggtgtggtggctcgtgcctgtaatcccaaaacattgggggctgaagtggatcctcaaactcctggctgcttgagcccaggagtttgagaccagcctgggcaacatggtgaaaccctatctctacaaaaaagtacaaaaatcagcagggtgtggtggtgcatgccagctactcaggaggctgagatgagaggatcgcatgagcccaggaggttgaggctgcagtgagctgtgatcgtgccactgcacttcagcctgggcaacacagtgagaccctgtctgaaaaaaaaaaaaaaaaaaaaactcgag

SEQ ID NO: 2773 - DNA, 2458 bp, Homo sapiens
  misc_feature (1092)..(1092): n equals a,t,g, or c
gggagtgaaggcctggttacctctccagtgaagattagccccatagagcttactctatggggaagaacttttctgactccttcctgtctagggagtgcgtgatcagaatggtgtctggacggttctacttgtcctgcctgctgctggggtccctgggctctatgtgcatcctcttcactatctactggatgcagtactggcgtggtggctttgcctggaatggcagcatctacatgttcaactggcacccagtgcttatggttgctggcatggtggtattctatggaggtgcgtcactggtgtaccgcctgccccagtcgtgggtggggcccaaactgccctggaaactcctccatgcagcgctgcacctgatggccttcgtcctcactgttgtggggctggttgctgtctttacgtttcacaaccatggaaggactgccaacctctactcccttcacagctggctgggcatcaccactgtcttcctcttcgcctgccagtggttcctgggctttgctgtcttcctcctgccctgggcgtccatgtggctgcgcagctcctaaaacctatccacgtcttttttggagccgccatcctctctctgtccatcgcatccgtcatttcgggcattaatgagaagcttttcttcagtttgaaaaacaccaccaggccataccacagcctgcccagtgaggcggtctttgccaacagcaccgggatgctggtggtggcctttgggctgctggtgctctacatccttctggcttcatcttggaagcgcccagagccggggatcctgaccgacagacagcccctgctgcatgatggggagtgaagcagcaggaaggggctcccaagagctcctggtggtgcagcctgtgctcccctcagaagctctgctcttcccagggctcccggctggtttcagcaggcgactttcttccaatgctgggcccagacttcttgcctgggtgctggcctgccctctccggccgcttgctgcctgtctgctttccttggtggctttgctgggtgctgggcctgccctctccggccgcttgctgcctgtctgctttccttggtggctttgcntgggtgctgggcctgccttctctggctgcttgctgcctgtctgctttccttggtggctttggcttctgcactccttggcgtcasctytcaggtcctccattcacacgaggtcctcctcgctctggccgctcttgctgctcctgtctgaagaaatcagactgatttcctcttaagactcctagggatgtggtgaagagctgggactcaagtgcagtccacggtgtgaaacatgagggaggtgaggtgtccgtccacttcccccataaaggtgtgcatttcagttaggctgccccgccacagagcaggcttcatctgctctgccatccagccccatctggatgtgaggtggggtggagacatcatggggtgattgcagaaagggggagtggcggcccacgcagcttctgctgaggagctgaccgctctgagctgttctgtttcgtattgctgctctgtgtctgcatgtattgtgaccgtgcggctccacctcttccagctgctgctacagctgaggcctggatcccggcctttccctgtgacttacgtgtctgtcaccggcaggcagccctacaaatcctggtgacctgctctcccaagaacagagcctgtccccagatgtcccagtagcgatgagtaacagaggtggctgtggacttcctctacttctccttgctggatcagggccttcctgcctcccgctgggcaggtctggccttgctctcttggcagggccccagcccctctgaccactctgcagctcaccatgcagctgatgccaaagttgtggtgtccagtgtgcagcagccctgggagccactgccaccttcagaggggttccttgctgagacccacattgcttcacctggccccaccatggctgcttgcctggcccaacctagcgttctgtgccatgctagagcttgagctgttgctcttcttcaggggaggaaatagggtggagagcgggaagggtcttgctcctaagtgttgctgctgtggcttttttgccttctccaaagacgcactgccaggtcccaagcttcagactgctgtgcttagtaagcaagtgagaagcctggggtttggagcccacctactctctggcagcatcagcatcctactcctggcaacatcaggccaacgtccaccccagcctcacattgccagatgttggcagaagggctaatattgaccgtcttgactggctggagccttcaaagccactgggatgtcctccaggcacctgggtcccatgaccagctccccgtctccataggggtaggcatttcactggtttatgaagctcgagtttcattaaatatgttaagaatcaaaaaaaaaaaaaaaaaaaaaaaaaagggcggcc

SEQ ID NO: 2774 - DNA, 1127 bp, Homo sapiens
ggcacgaggggaaccttctgaccagcctcatgggctcctcagagcaggaggatggggaggagagccccagcgacggcagccccatcgagctggactgaactggccaggccacgtggagacaccacggtcgacgacggctggagggacgtttcagaggcgagtcctgggtggctcctcgccttgggggctcctggccctgaggctggcggtggccgcatgccggcgcgtgtctgtttctgtgcggcggctcagggtggcgcggctgctgctcactgtgctgctgggacccaagagtggggcgtcgcccctgctggccgccgcgtcccccgagattgacccacaataaagcacaggccttaccgcggcgtcaccctctcccactcctttgttctgggtcctttcgggagggctgatgggcagcacaggaggcccgtcctcggggggctgcgcacatcacgctccttgccgggcgtccggcacagctgcggtcaccaaagcaggtgctggccctcggacctgagagcccagccagggcccatgtggtctgcaaatgggagcggctgtttttgaacacggggtcattctgcagtcaggacgaaccggtccccgtcgcagacggagtgcacgtgccctgcgccacatcctcacgctcggtggagggacgcgtgcggcgggacggtgcctacgggtacttgcagctgtgtcccatgtggcatcccagagctgcgccctgctggtctctgtgagcgccacgctgctgtgctggaaatgccgctttaaaaagggataccgtgggactctgcccgtctctttcataacgcaatatttatttgtattgggtgatgattgattctttcgacctaacattttgggttttaaccaaataaccggtccaggagtgagcagctccgttctgtcagatgctactccaaatgttaccagaacgatgacaaaaggggagacgctctattttttcacagttaaatgacagttgtagattgatacgcagttgtgcatgggaaggggaaacgcacagctttatttactgtaaagtggaatttcaggaaggcttgtgtgaaccgttgcgcataaataaaccctttctaccggaaaaaaaaaaaaaaaaa

SEQ ID NO: 2775 - DNA, 378 bp, Homo sapiens
ggcacgaggcaaaatcagagaggggtgcaagatcctgatttttcaggcagagagaggagaattcagccacctgaagtcagcacctacagaagcacagtctcctggctttgcctctgaattattaacagcagagcagcattaaagagcccacacactagaaggaggatatgaagaaacacccagagaatgtcacaaaaacccagaatgtcacagtattgttttcttcttgctggtgtcctatcctctctcctaacaccagccaccaaagctgatttttaaaaaatgccatgatttctcttgtttacaagaagctgtttcctataccctattcttgaaggataaagaaatagtcattcaaaaaaaaaaaaaaaaaaaaaa

SEQ ID NO: 2776 - DNA, 2056 bp, Homo sapiens
tcgcgagaatcgtctcctcgataccaagcgcctgtgtctggcagagctggtgtgagacgagacaatcctgccccgccgccgggataatcaagagttttggccggacctttgagcatacaccgagagagtgaggagccagacgacaagcacacactatggcgctgaaacggattaataaggaacttagtgatttggcccgtgaccctccagcacaatgttctgcaggtccagttggggatgatatgtttcattggcaagccacaattatgggacctaatgacagcccatatcaaggcggtgtattctttttgacaattcattttcctacagactaccccttcaaaccacctaaggttgcatttacaacaaggatttatcatccaatattaacagtaaggagctttgttcgatattctaagatcacagtggtcgcctgctttaacaatttctaaagttcttttatccatttgttcactgctatgtgatccaaacccagatgaccccctagtgccagagattgcacggatctataaaacagacagagataagtacaacagaatatctcgggaatggactcagaagtatgccatgtgatgctatgctaccttaaagtcagaataacctgcattatagctggaataaactttaaattactgttccttttttgattttcttatccggctgctcccctatcagacctcatcttttttaattttattttttgtttacctccctccattcattcacatgctcatctgagaagacttaagttcttccagctttggacaataactgcttttagaaactgtaaagtagttacaagagaacagttgcccaagactcagaatttttaaaaaaaaaaatggagcatgtgtattatgtggccaatgtcttcactctaacttggttatgagactaaaaccattcctcactgctctaacatgctgaagaaatcatctgagggggagggagatggatgctcagttgtcacatcaaaggatacagcattattctagcagcatccattcttgtttaagccttccactgttagagatttgaggttacatgatatgctttatgctcataactgatgtggctggagaattggtattgaatttatagcatcagcagaacagaaaatgtgatgtattttatgcatgtcaataaaggaatgacctgttcttgttctacagagaatggaaattggaagtcaaacaccctttgtattccaaaatagggtctcaaacattttgtaattttcatttaaattgttaggaggcttggagctattagttaatctatcttccaatacactgtttaatatagcactgaataaatgatgcaagttgtcaatggatgagtgatcaactaatagctctgctagtaattgatttatttttcttcaataaagttgcataaacccaatgagttagctgcctggattaatcagtatgggaaacaatcttttgtaaatgcaaagctgttttttgtatatactgttgggatttgcttcattgtttgacatcaaatgatgatgtaaagttcgaaagagtgaatattttgccatgttcagttaaagtgcacagtctgtaacaggttgacacattgcttgacctgatttatgcagaattaataagctatttggatagtgtagctttaatgtgctgcacatgatactggcagccctagagttcatagatggacttttgggacccagcagttttgaaatgtgtttatggagtttaagaaatttattttccaggtgcagcccctgtctaactgaaatttctcttcaccttgtacacttgacagctgaaaaaaaacaacatgggagtaataatgggtcaaaatttgcaaaataaagtactgttttggtgtgggagttgtcatgaggctgtgttgaagtgacttatctatgtgggatattgagtatccattgaaatggatttgttcagccatttacattaatgagcatttaaatgcaacagatatcatttcaggtgacttaacatgaatgaataaaagtcaatgctattggaaaaaaaaaaaaaaaaaa

SEQ ID NO: 2777 - DNA, 2366 bp, Homo sapiens
tttcaatcaatttatactgagtgtattaggatttctgctattaaatgcgtgatccctcttctgcttcagtttctggcttggctttgtctgtttcaaaatatgtagcttcctctttggcacaacaaaaaactcattttcacttttattaaatatacggtgttatcattgattttattttctcttatgtatctgtaaagatttttggcacataaatgtaatataaagtcagtggatgctataacttgcaatgtttgcatcatgtccaccttttttaaggagtgaaaaagccctagtatgtttttaaagaatagccagtgcaagctcagtactagagtgactacacacactgcatgttttcatatgtgggcactttgatgtaccgtgttgggttattgttctagattggactgttaaatactatgttcaaggctgggttgtcatttttataaaggtcttggtgttttatggccattagttattacttttgatatagagaatgagctacgtgcatttctaaagccaataaggaggatgtatttaatgtgccttgtttttgaaactgaataaggaaccggtaagcatggaatcaatgaagaacctgattaaaatggtcaaaaaaaaaaaaaaaaaaaagtggtgaagtatttatgttttcctttaaaacacatgcagaacacatatacgcatgcttgcgtgcacgcacacacacaacttacacacacgactctcacacacacacacacaccagccaaacagtccacctaaatggcgctgtggtggtgagagctctgggcaatggaatcttaccaaacgtgcagtgctctgttttggagacagggacaccctttttgtttatttcagatataaaacaatgcaggctttgtcctgaatatcattatccaaacaagaaaagggaacataccttctcaaataggagaccttcctggcctatgatgaaactttgggcctgactctggcatgcacagccttgttctactctgtcctctctgttctgatccttgtggagtttgtgtggcaccaaaacactcccatagtcaaggccagcaaccagactctgagctacaccctccttgtctccctcacactctgctttctctcttcctcgctcttcatcggccgccccagccctgccacctgcctcctctcacagaccacctttgcagctgtgttcacagtggctgtgttttctgcagggccttccaggctataaggccagaaagcaggatccgaaagtggatgggtccccaaaaaacaaattctgttgtcttcctttgctcctttacccaagtgaccctctgtggaatctggctggggacagagcctcccttcgtaaacaaggaccctcagttcatgcctggctacatcattatccagtgtaatgagggctccgtcactgccttctactctgtcttgggctacttgggcttcttggttttagggtcccttgctgtagcctttctggcaaggaacctgcctgatgctttcaacgaagccaagttcctgaccttcagcatgctggtgtcctgcagtgtctgggtggccttcctcccgagttactaaagcacccagggcaaggccagagtggccgtgagatcttctccatcgtgggctccagcactgggttacttggctgcatctttgctcccaagtgctatgtgatcctccttcatctagaaaggaacactattcaatgtttaaagaagcctagtccaggcatggtggctcacacctgtaatcccagcactctggaggccaaggcggctggatcgcttgagcccaggagttcgagaccagcctgggcaatgtggcaaaaccccatctctacaaaatatacagaaattagctgcaggtggtggcatgcgcctgtagtccccagctactcaggtggcggaggtgggaggattgcttaagccccaggaggtcaaggctacagtgagcccaagatcacaccactgcactctagcctggaaaacagagcatgactctgtctaaataaataaataagaagcctgagaaaccataaacagaccaaacaataaacaggctgagaagaggaattgtaatgatcattagtggcagagaatttgtaacctgattgtggaaagcacatctgaaaacaaagattgaatgaactatttgaaaaaaatggcaatgaaagaaaatttacagaggcaaaacctgaatatccagtgaataataaaaagattctggctggctcaaaggtagtgagttctaccaatgtattgtccacagtcagttacagaccaaattccttgttctactctttcccccctcctcactaatgcacttgactagtctttaacgaagaaaaaaaaaaaaaaaaa

SEQ ID NO: 2778 - DNA, 2761 bp, Homo sapiens
cacgagtgaccttcaaaattgcttccacttctaattttgttttaagacactattgactacacttctcctaaaaattgatctttttgacgtgattgggctcttgagacttttttaccctttgtcctgatctgattctctccatgaatcaattttgttcatctcatctgtcactcttcctctgtatgctttgtaacctgcatttcctctacttctggcacttttttgccaatggaacctgcaattctactctgcaaatagctagggttgtttcctccctcactcccagccaaaatacagcttttatagtagtatctctgagtagggagttgggctattgaaaaaacatgctatagcccaaagtccctattttaaaagagatagagattggaatgatatgttctttttagggtgtggatgttttaggctccaatgaccataatcaaaatagatctataaccaagccgtaaaagggtaatatatgtgaattttctcataatatgaatcctaacacaaaagcagttacaatactttaagcgtaaattacatagtctgcaccatgattttttcaaaatttgtcttacgaacctcaaggaggaaaatgtaccccactggttaggaaagaattattttctctaggttccataacatagaaggagtgttttatttcctcactgccttgtgcctgggaatactgaaatgatagattcagccatgttttaataaaattcctctgtaagaatattagcatggagagagattggtataaatacatgaatgtgcctggattttgaaggtaaatcctatagctatcagattgctattcacttaattgccacaatctaaaatttatctgttagtgtttcttttctaattgttactagtgtgataaaaagaaaaactcttatttatatatagattatttgtttcaggacattaactgagaatatagtattgaaatgacttgaaattgaaggaatcagattttctactgcttatttattcagaatataacttacccaacaaggtctgatttaatttattttgaggagtagtatttagaagcaggattactcttatttaggaaaagaatctggatcttagatatacagtgacttgcccagagtcacctagtaaatgaaagaactataagtcaccacttgggcgtgtgattcatgatcttgactatgaattgataccagtactttacatgaaatggccatactctgaaaattatatttttagatataaccttaataaatatacttgcctttcacagaatattagaaccaattcctccttatcttcatggaggagcatacttaatgatatatgtactgatgagatttcgtcttatttttaaaaacttccaagaaagaatgtttcatagctcccttcattcatctactctggtgcttaattagatttgatacgagaacgctttctttcttatctaacttgaatccctcatgctgtagcttaagtctggtttctctcactctgcctaaggatgccaaaagcagctaatcaccattatccatagtaatattcacaaagtcctccttatgtttgaaatgttagcgctataactgacagtaaacataacccccaagtatcagcaaattataaactagagaagagggactagcttgtagtaaatatagatgacatattagtatttagttgtgatgaatgaataacactaaataacgtgacttaagcattaagcagactaaatgaaaggcattcttctggtaactcattcacttaaatatttattaggcacctactttgtgatgctatgctacattcaagactttcaatgaaaatgatttttaaaaagtaaaacttattaagtatatttctcaaaatgtgaatgtacaatagcctaatattaacaagataaccctgtgccttatctaatcatcctgtggaatttacccatattttggaggtggggctgaaaaatagtctgattattagaacatttgtgtttatatttacagctgccctattactaaaatatgcagttggcatcaaaattttaccatacacagtcactgagcccttcacctggaagcctctttatttcagcattactgctgaagagttacctgtgtctttctgtgtgcatttgaacatgtgtgagcatgcagccagtgtagcactacaagatgcttatcgctagaaataaattatagagtcgtgcagcatgaaaattatatgcccgggaatgcagaacacagggttaccttctgcctcctttctttgtcatggacagcagaggcagaaaggagaaagagatttattctaaagccatttgaagctgaccaagcaatttataacagatgaaatgctgatttattgctgcagagaaaataatgggtgttcttgctaaaatgccattaatagctttattgtttaaagtgcaaattatattcagcaatttgttagtcctcttttgaggcaaagttgaagtaattcaatgtaggcttttagcagaaaaaaggacaaagtaattaacaaatcgtaaaagaattcattcaccaagattggctgatagttgaattctctgtctgaactataaagacatagggaaaatttgcacttaagaaatacaagatgactcaagtatttgtttaaaactgaaaagccataaggaagttggagttgggacactacagatttaggagtatgccttctgttggtgtccactgtgtctgcaagatgtggtagtcaaccagagaaaaaaaaaaaaaaaaaa

SEQ ID NO: 2779 - DNA, 1601 bp, Homo sapiens
  misc_feature (22)..(22): n equals a,t,g, or c
ggtcacgagctgggcctcccgnaaggtaaaactattttaaagtgtacagttcagtggcaataagtatattcatgatgttgtgcaactgttaccactattggaattccagaacattttcatcaccccaaagagaaaccccacaaccatcaggaaccagtcctcattctcccctttcctcagcccctggcgatctctaacctactttttgtttgttttccaattctggacatttcctgtaaatgggatctaataatatgtggccttttgtgtctgcttctttcactaaggaaaaatgatttgcattttactcttgcatgttctgtgttgtttgtgtgggcgtattcatctaggagaaatcttcctgaagttccttctgtaactaattctgcactgtccatggagtcatgttattgtcagactggtggccttagagacatgctgttttctgcaacatcgtgacacaaaagggtgcaccctgtaagaatcatttgggaatttttgttctcttttcacaaacactacatctcaaatttttaatttgatcaaatttgactctcggtgtctgcaattttctttagaaattaagctaacaaacattatgacattgtaatattgtgaaccatgataaaatcttaaatagtgacaaatgaagcatgtgataacacaatattttctactttttacataatgcagagatggcaaaattacacatttaaaataagtagatatatttttccatccattaaatggttctaatttgcttactgcttctgcctgtatttacttccaaaccaggtatctgcgagcttttcctgcggstactttggaacagaagaagccatagtaacatagaggtgaaaaaggggtaaaaggtttcaggagcacctaggatttcagscccagtgagaaatcacttcamccaaattgcagcaggggagctggtctcaggttgggaggagagaggggagacttattycatgatcttttctctattycccatacagggaagagatagtattttattattttttatgkattattttgkatttacttatttatttattaaaatagagacsggggtctcaatattttgcttaggctgatctaaaactcccgagctcaagccaccctcctgccccagcctcctgaataggtgggattacagatgtgtaccaccactcctggcactgggaagatattttaatatgttttagaccaatttagaaaatgaagctaaaagaggtcatctaagggaaatcgtttcctaacattttgatcccgcatgcctatcagcagagaatgttttgagcatgtactcctaatgtgtgtacatttatttaaacattctatgatgkaaaattcttaatttgtatactatttactgttctactttttaaaactttttaaaatyaattttattgaggtatgatttacatacaataaaatgtacccatttaaagtgtatggaggccgggcgccatggctcatgctgtaatcctagcactttgggaggccaaggcaggcggctcacttgaggtcaggaatttcaccagagatggtggaaccccatctctactaaaaaaaaaaaaaaaaaactcgag

SEQ ID NO: 2780 - DNA, 1514 bp, Homo sapiens
  misc_feature (453)..(453): n equals a,t,g, or c
  misc_feature (1107)..(1107): n equals a,t,g, or c
ggaactgatgcctggctgtggattgaaatggcttcctggccaactcctcttggctgtttaaaatgtttgtgaccccacctagacttaccttcaatttatttacactacgctcctggttctacgtttgtgactgtttattgtctttactcctttcaccttctggaaggtaaatgatagctattattaatatattaaagaggactagatccaaaagtttgtagtatatgtgtggtggggggggctttccctcatagggaagaaaaagtattagctttttcccacctgtcactaggttcgtggctragtcacctttaacagactacagattaagaagagaaaatamcmcaawtttatttaataaaagtttcacatgmcatgaagttttcagaaatgaagacccaaagatmcagggaamcctgtgtatttcagtgcttggatttgatgaagaatagncagtggtggggaaatgtgattggtcaaagcaggtaggatctaatggtaataaactggaggggagcttamcaaggcctgtttgtgcagattcttaatgttcctgtgttttcagagataasgacatttcctttcctcagggaatagcgagggcacctctggaatgagggtcttatgacttactttaggggaaggtcagaaaattgttttatggcctgtttcaggggagaagggtgggaggaggtcagaaaccttcctgcttctgctactttctcaaataccaaggtaccatattttggggtagcatttactgaaccctatcaccctcaatgttttcttcctttcactcttcactagcaacactcaagcatttttcccaactcatcattatgtctgaggcaggactttctcctcagaaagtggttcctgatgacctggttgataatccatgctttacatactcatcttcagcagtcatccactctgacattatctcccgtcactcactctggataggatttccaggtgtccattatttttatagacttttagcccttggcttccattttcagtcacctgtggaactcttcctcgtggatgtttagtaagtacttctaattaaatatgtctaaaatggaactcatccagttttccctncatcctcccaccaataagaaagcctgttgctattctgatgcaccgcctcccccggccccccactcctccccacagacacacacttaaatttttaatccttggccaggcacagtggctcacacctgtaatcccagcactttgggaggccgaggtgggcggatcgcctgaggtcgggagttcgggaccagcttggccaacatggtgaagacccgtctttactaaaaatacagaattagctgggggtggtggcacatgcctgtagtcccagctgctcgggatgctgaggcgggagaatcacttgagcctgggaggcggagtttgcggtgagccgagatcgcaccactgtactccagcctgggtgacaagcgaaactccatctcaaaaaaaaaaaaaaaaaaaaactcgag

SEQ ID NO: 2781 - DNA, 1079 bp, Homo sapiens
ccacgcgtccgctttagcctcccgagtagctggtactataggcacgcaccactacgcctagctaatttttgtatttttttgtggagatggggtttcaccgtatctcctaggctggatagttaccaatattaactgtcaatatttgatagcaaaatctgtcttaaaaatgtctttttacagattggttcattcaaatcaggatctaaacagtttaaggggtttgctcatggaatttgtttttctctttcatctgtttcagtctaaagcagtctttccttctttttcttttccttgctgttgccttgtagaaatccagtcatccatccagtagaatgtccagcattctaaggacattctaaggcttttttttttttaatcctctttgtagcgagcttcttcctctatctcctgcattttctataaaatgaaagtttattatataggcttgattcagttcaggtccttttttgaggaagaatagaatacttcataggtagtggtttattcatcagactgttagaagatacaaaaggtttcgttgtccttcttttagttatactaagataaattgctggattcaagtaataagcctaatactgccattgtggaattctccatcagattttaatcatccattgataatcattgctggaatttattatttcatttaggattacaaaagggtaatatttatttatttgtttgtttgttttttattttttttgagacagtgtctcattctgtcacccaggctggagtgctgtggagcaatctgagatcactgtascctccacctcccgggtacaagcagttctcctgcctcagcttcccgagtagctgggactacaggcatgtgccacaacgcctggctgatttttgtagttttagtaagagaccgggtttcgccatgttggccaggctggtgttgaactcctgacgtcaggtgatctacctgccttggcctcccaaagtgctgggattacaggcatgagccaccatgcccggccaaaaggataatattttaaatctgtgattccttccccagttactagctgcaattctgtaaaaaaaaaaaaaaa

SEQ ID NO: 2782 - DNA, 2814 bp, Homo sapiens
  misc_feature (1565)..(1565): n equals a,t,g, or c
ggaaagggtggccgagcgcgggcggaggacggagaagggggcggcgagggccggaatctcgagcttgttttcacttgctttttaaakacagaaagctcatggtgcaaattgttatttccagggaatccctgtgctgatcgtggggcatcatatcctgtatgggaaaatcatccacctggagaaaccttttgcagtccttgtcaaacacactcctggggatcaggactgtgatgagcttggccgcgagactggcacccggtacctggtgacagcactcatcaaagacaagatccttttcaaaacccgccccaagcccattatcaccagcgtccccaagaaagtatgaaagaacctcggattttccctagagagcggccaactccttggactcgtgctccgctgccacctcgaggacggctcgacggttccctgggaccacaggggggtcctgttctgaacacaggccacccactgggtgtgaactcggatcccttccttatggcggccggttctcttggtggaaatctgaccccatttccaaggaacccatctccttttccagcttcatcaggctcattggcttcaaatccagcacctttcccggctggtgctcgtgacccaagtatggcttcttttccaagagggatgaatcccactggcacaggtgcagtttctttcccaaggcctggtggcctcttggggccaggcccaggcccaggccccaccctaaaccctaggacaggggctctgccaggcccagggcctctgtctaaccccaggttagggggtctcccaggaccaggtcctatgtccaacccaagggcaggtggtctcctgggagcaggtcctgaccccagaggtggtggtcccatgggccctggatctkgacctaacctgagagccggtgttctgttaacctctgggaatggtcctcccaatcctaggccagttggctgggcccaggaccaaaccccaatctgagatcaggctttttagggacaaaccctgcccccaggtcaggtgtgtttccaggcccaggccttgggcccaacccaagaccaagtggcctgggcccaggccctaatctagatgccagagcaggtggcctcttgggcacaggatctggtcttaacttaagaatggctggacctcaaggcctcgatcttgcccccattctaagagcagcaggtcttttaggagcaaattcagcttctttctcacaggcttctggaaacatgggcacaagcccatcctccatggcaagagtacctggccccatgggcccaaactcgggtcctagctctcggggaattggccttccagggccaaatccatctcccatgtcaagggctcctggccccataggccctaattcagctcatttctcaaggccagttggccccatgggggtaaatgccaatccctttcccaggggagcaggttcatctgccttttctcagtcttctggcacattggcatcaaacccagctaccttccaaaggtccgctggcctccagggctcaaatccaaccattttcccaagagcctctgggccacttggcccnaacccagctaacttcccaagggccactggcctgcagggtccaagtccaactaccttcccaaggtctactggcccattaggccctggtcaagttactttccccaggccagctgccgggcatctgggcccttctccagctggccctgtgggtatcaacccagctcctttcacaaggccaactgggaccctgggtctcaacccagcttcctttccaaggatgaatggccctgcaggcaagagtttcgtcccatttcctagagtggggagcctccctggcacaaacccagctgctttccccagaccagggggtccaatggctgcaatgtacccaaatggaatgttgcccccttaaacaccattttccctccaggaccaccttggtttctaggcactgtggttcttggcaggggctgtcttaggtaaaagggtagttgtggagctacagtctgaagaacatagcttgggctcaagttcaaatgagccatctttttcctttgcgtttttcttgactgaaggtgagatgttatttgtggcatgtgaactgtggcaggtgggaataatcctgcccttgagagaaaggatctccagcctcccagaagcctgctgtgctttcgtcccacagctttctgcccattgtttcttactagtttcttgaattgttcttgtggacttttcctcagggatacattggcctgcaggtcccagttcacatgtagtcccctgctcaccattggagaatcagctcactgctctctagaaacgtggcgttggtgaacggaccatgcttccgtagctctgacctgggcagcttggacctggtcatcctctactgccatacctttccctgggggcttgaacacagaacagggagatggacaaccacttcaaagaaagacccaccgaatgcagtttctgcttgactgactgggcctgcagctcccttctcctgggacttagaggtggccagatttaaggcccctctactcatccaactccctcttcactggtactcccaatcaatcaaagaacctcaaaatttaaactgatgtggatgggaatatgggaattagggtgggggtgggggatgaagggaagaaatcactgtgctttgttcggcctggtgtgcaaggatggttggtggttttcctgcattgtatcttttcttactgtttctttaataaatgggatgagagggcaaaaaaaaaaaaaaaaaaaaaaaaaaaaaaaawaaaaaaaaaaaaaaaaaaaaa

SEQ ID NO: 2783 - DNA, 2200 bp, Homo sapiens
ggcacgaggaaacttctagcttggaatagcttgtacacatatacatatgatcaaatactcctgcccatgatccattcccttttgttattgttgttgttgttgctgttgttgttaattttgttaagaatttcaatatcaagactgactggcaccaacactttggtattcaatttgattctatgactgaagtactggaatttattatgtggctaaagtgctctatttattaagaactatatttaataccaccaacaaatataggggttaaggaaaaaaaacgttgagctacatgtgtaagaaggccctgcatgtgtatgagtcctattctgggcaaatagattcttaaagtggctttcaacttcaagatgaaggagcttaataatggttactcattttatcaggggaatttcagggaacgtaggcgtcaaagagccagttatctttagcagatattaaaaattgaaaactttggagaactcatttcaagttatgattcagtgcattttcaacattgatttttgatagactgaagtgccagatcaaaattgttacccatttgaaagaatattagttgtatataaaattagattagaaagactttctaaatctctatctctttatatatgtcctattcattcacaatggattatacaaaaaaaagtgtattgcaagtgaaataatattgatttctgccctcagcttcaaataaagtaaattgaaatgggaacaatatcaatatggtgtcttgatatatttataaatatgtgattatcatttatttttaaaataatttatcaaaaaacaagtctttagtgttcaaatacttcaaatcatatcctcagatatatttttagcccatggttttatataatctttaagaactaattttaccactgttataggttcaccattaaatataattggctaataaaaattttaaggttgactaaattaagaagaaattatttaacattttaatgtgccataaaagagtaaatgataaataattaaatgccactatgtgttctattccggatgttctagctagaagtcattttaagattttgataaacaactttggttgaagaaattccttaagtattcaacacaaacctttctaatatcttttgttagggttataccatgaataaaatgcttctttagcttccaagctatgcaagctcccagaggtaatagagtgacacatgatttaacttatatgtaaggtttaaaaaagtatttatcattataaacatacataccatttgggagcaggtttattaaccttgagagccaaaggtttccttaggccctgtaacattcagaacctttggtgtttcaagtggtattatagctcaaatagtgacaggacagggaatgcgttccaaaggaatattggagcaattttaacattgcagaaacctgctctgggtgtgtctctctgtagagataacctgatgattattaaatgtaaaattaaggcaactcatgaatatttttatttacaaagtgcttgaaactcagccaaggagagaaagctaagtacttcctatataattcatcacttttctggctacagcaggacagaatatgaccatcttcgtttgaaggcaccaaatcgtcgcagtgtctttgccataagttgcagggttaaatgcgggaatctctcctcgcgttcctgtctggcgtattctgaagaaaagaacagaattcttgtgcctacctaagaatttgagtagtgtctaaacaaacaaagcagttaggtcattttaactgacttgattatccaactggtctttgacagatttgactgttcatatttagtttatgtttgtctgatcatccagtttgctttattttgctgtgttttattttgttgtttgttttgttttgtaccagtgtactaaaactagtcaaaatacttgaattagtttgtttgtgcaaagtgtacaagcttagtaaagtgtccatgaagcaatagccatgaatgctaattatttctaaatagggccacatggttttaaactaatgatggtgaaagaaatacgatgactgagaaagtcatttcgcatgtttactattgttatattcgtgctttacttcaagagtgcagaaatcataataaataacaaactatttttgtgttttctcaaaaaaaaaaaaaaaaaaaaaaaaaaaaaaaaaaaaaaaaaaaaaaaaa

SEQ ID NO: 2784 - DNA, 966 bp, Homo sapiens
caagcggcggcggccactgccacgtattcccggcagtggtggcggcggcggcggcggcgcccgcgggcaggaataactcaagtcacctgtactggaaatcagtttgctgaaattaatcaacgattcttgaagttgaagaaaaggaggttccagccttggcaagaggagtgtggcccttcctggaatccctctggacacaccctcctagcatcctctaggaaagatgcggcagctcaaagggaagcccaagaaggagacctccaaggacaagaaggagcggaagcaagccatgcaggaggcccggcagcagatcactacagtggtactgcccacgctggccgtggtcgtgctcttgatcgtggtgtttgtgtacgtggccacgcgccccaccatcaccgagtgagccccgcagccggccgcggaccccatcggcagggagaggaggcgcgggagggggacgcaaacaaaaaatggctttcatattcagagatgttcatgttgctgagctgtaagcaggagcaccctgtcttctctggtctttgacttgattaaagtatctccgctttcttgggagggaataggggatgttttatcagtgaatgtgccatacaccttatggtccacttcatgtgcctttcagacttcaaarcgcgcgcgcatgtgtgtgtgtgtgtgtgtgtgtgtgtgtgtgtgcttctttttctctcctaaaaatcgataagtagctccacctgaagagggatggaacctctgggtcaggaaacagctggaatccacactcacctcattcccattgtttggatcatgcctctttccaacacgtgttcacaatctccaaagggactgtatttcttctctgtgcttaatgtgatttgaaatatgttgaatcaaagtgaaatatttattttttgaataaaggagataatagccttaaaaaaaaaaaaaaaaaaaaaaagggcgggccgc

SEQ ID NO: 2785 - DNA, 1512 bp, Homo sapiens
ggcacgagcttccttggagcctgagtgtgagaggaagctaatgtcagccgggctagacaccgtttaaagtctaatccatgaaaccctaagccgcaaatgacacttggggctttgcagacacccgcagactcagcagatactcctgcggtaacacactgtgctggaaaacgcctggagccatgacacattatgtatttttattattatttatggtaggaagaggagatgagggaaaatcgggctgaatctaagcagcctgacaattcagctagttaatatttagccagttaagaaaggtggttgtaatccctgcaaggcagtgagctctcctttgatttctctaatagcttaaaaaataatttcttacaagacaattagaaattctgcctatggatgcaaatttcatagaaaacaatgttaagccttgaaagtgggtaaaatgtgccttcgattgaagtcatttattctgttgatacacttctacaacatatatattttaaacctgctcagataaagtgaaatttagcaaaaggatatcccctcccacccccaaatctaacatgccattttaaaaacagcacaaaggaacaaggaaactaaatattattttgagccatcattacttagtgaaatacaaacatccaaatagaaacgattgttgttccaccagaagattagaagttaaattatttccacacaataggaatttcacttcgtgtcatcggggatgtagtaggagttgcattatttgtcaaaccaaatagaaatgcgtgggctgactgctgaaatacaaaagaattgaaccttatctgaaggcgttttctaagtggcccctcccatagaagccgggaagttgtccacccctagcagaagccacattaatatttacaaaatggttataaatccttgaagacatttttgcccattttgtataagaaacaggagtaaacaaggtgtttatacttgttatgtttcattaatgaaatattattactttacatcttggggaatgtttgttttctttagaaatgaactaatgatcactacaaaggaagaattcctgacagcatttcctagagaaaaagcttaggtacgcgtctccaaatgatggtttctttttctacaccttagctttttcatagctcaattcttcttacaacttctcttgtgttttttctttgattgtcagttttctttcaaagtttattttttgttacttaatgcagaaaagtgagctctggtctccccagtgtaaaagtcgattgtgtctagaaagaaggcagtaaaaacagcaaagcaggcgctgctttcaaaaagccctgcccaaatcatcccgcccagaaccttcttaggtttgcatcctcatttccccctcccctaatttcaatagctggaaagtaatcaagtatcccgaggaccaatttatgcactagactccaaataaataaaatatttttttcaaagtgtcaaaaaaaaaaaaaaaaaaaaaaaaaaaaaaaaaaaaaaaaaaaa

SEQ ID NO: 2786 - DNA, 946 bp, Homo sapiens
ggcacgagtgcagacgctggtctggttcctgctcaccctgctgctggcgctcttcatccctgacatcggcaaggtgatctcagtcattggaggcctggccgcctgcttcatcttcgtcttcccagggctgtgctcattcaagccaaactctctgagatggaagaggtcaaaccagccagctggtgggtgctggtcagctacggagtcctcttggtcaccctgggagccttcatcttcggccagaccacagccaacgccatctttgtggatctcttggcataaccactgcctcccagggaacacaaggcctttgccattggtcgcaggaacccatctcttagagctatggggccattcttagtccacgatcattccaactggtgggatgacatccggacatcctcttccagggactggggcaaactcaggccccacacctctggacagctcaaatccagtcccctctcctgctccccagtcctggcagtgccgtggatggcggcaggaagtctcacatcaaggaggacccctcctcctctcccagttctcaactttctcatgcctggaatccacgggtgaagagagtcggtagatctcataagaaagaatccagtctgacttccctctggagaatgactatggacagaaggccaccatcctccacagagcaccctgtcctgagtaggggttgtgctcattaccccaggccagtggtagcttcctcaggagcctggccacttccaacggtagcactgaagtcatgcaaatgcatagtcaggtagattcagaccttgtccacaccttcctgggcaacccccaccatgaacctgtcagcctctttcccatagctaatagacatttcccaggccttaaaaaaaaaaaaaaaaaaaaaaaaaaaaaaaaaaaaaaaaaaaaaaaaaaaaaaaaaaaaaaaaaaaaaaaaaaa

SEQ ID NO: 2787 - DNA, 1570 bp, Homo sapiens
  misc_feature (412)..(412): n equals a,t,g, or c
  misc_feature (502)..(502): n equals a,t,g, or c
gaattcggcacgagcagataaccaaaccagactggaagaggataacaagatcccaaagaggaaaaaaaattgttcttccaggatgtcaaacctatctttgagatattcatcatccaaagggtcctggggttctctttttccaaatattaggataatgcaaatattcctgctcatggtggacgcacactgtgtttacatcagtcaacccttcaaacatgagtcagagaaatctttctctaaatgaaggtgccatttctattgacagctcaacttcgtaaaggtatgactttgagttgttttgactagtagaaagaaacatttgcccytttttgctctgtttctgtatttaggctttcacttgtcctagccaagattatttagatccccatacggraggtcaaatatgttaaangctaaataattagattctcttgatttacacaaaaaacataactaactaaaatagaaacttttaattatctgtattgttgtataaaatgtnttatatattaggaatctaaaaatttgttttttgcttgtatcctctgtcataggaagaaactcatgtctctgtttactgtaaccattaataaaggctaataacagacagtacatgatgatacttttaactagggcaaacaaaagtaatattttaacaatgaggtttggtctttgctatctatacctcatgtctaattttccctacaatgtaaatgtcattcctcctctctacccatttgtaagggtctcagttttctgctcttgcatgacttattttaaagggtcacaataaggccaggtaattcatattttaaaaattccatttagaataattacatctaaaaattcacaagaaagacaatttcaatataaaataataaattactaatattggaatttcaagcatkagtcatggcaaaaaagagataatttgtagcagaatattttaatggcaactttcttattctatcacttattgtgttctatttgttatgaccaaagaaattactctatatccactacaattcataaaacaggcatgaggaagtctttttttcttggtgctcatgtctaagaagatgamcctcagaggtatgtcatttttcaatactatgttctgaacagacagcacacattatttttgaatggacaacaaaatctcaaaacatatatagagaggtatggtttgaggtgtgtccagtatgaggataatatgacccagcggatgtwaaattggattttattattaaaggaaaatggggtgtcttcaaaaagataaaacagcgggagttgggatgagtactgagaaaagagcacaaaaacaggcttgtagaggaggaagatctcaacagagctgactcttatctgtgctcacattcaaaactgacttttgaacaaaagctgcatcctttgccctatactatagtcccaactactctggaggccaaggcaggagaatcacttgaacctgggaggtggaggttgcagtgagccgagatcgtgccactgcactccagcccgcgcaacagagcaagactctatctcaaaaaaaaaaaaaaaaaaaactcga

SEQ ID NO: 2788 - DNA, 2418 bp, Homo sapiens
  misc_feature (138)..(138): n equals a,t,g, or c
  misc_feature (171)..(171): n equals a,t,g, or c
gctcgtgccgctgttgaccccactgagcagtgctaagtgttggtttagtggatgttcgtggaattgctgacccatccaagggcgtcctttggagccagtggagcctgccggcgcatctraggggcagaatgctgctancacttgaatctgggatctcgccttattctcaantagcaaggcatctcgacaagcatggtctargtctggtggccagcttgccartacctgagccggtcgggtcatctgcctctgagggaccgtcctcaccgagctcctgcatcccttgagtgttgatcaggaggcgtccacagcattgttctcgcctctgaatgatgcttctttctgtgttggagcctggcgaagttgtgttttcaagccctttactttttttttccaagtggggtaggagcttttggcagtgtttactttacctagatggcttatataatccagtaagagatgcaaagataaaattgctgcggttgttacagaagcatggcggcctccagactgacccattggttgccctttagattttgtaaggatgcggtgctggggaggtggtgcttccctaccccctagaaatgctgccttccaactaccactctcccagatgtgacccttgcgattatttcctctgaggtttgaggatgaagataagttggagggaaagagagtaactaataggggatgaaatatagcagaagctagaagaaagcggtgaggtgagagagatgcatctgcacgttttcttcaacagcaccaggtgattcagcatattcctaattacctttcactattcgtgtatataagatcgtttacttgcataatatatcatcaatttgacatattcttaaaactagagggtgtgagaagcacagcaataggaagtctctccacaaactaggggaacacaaatggggtcattcacgtgcctggactgtcactatgtggctgtcacgtgaagtgctggtgttgatttccatttcagccagtgggtagctgataagccagtgccagcatccagcatgagcagatgtcggggagactgggaagtctccagcgttactgctctccttcccttcatgataagccagtgccagcatccagcgtgascagacgtcggggagactgggaagtctccgatgttactgcctgccttcctttcgtgtgaggggctgcacttgcttttcttgtgatctgttagtggacgaggtcttccaaggaagtgctttgcacactttctttgctcctttttacagtctttgtctttgcagcaagcaaatgaaattaagccactttgggataatgaacattcagtataattctactttgtctcattttggatctcactgttgtctttataaaaatggcacattttacaaagtagtttattcttattatactttctgctggagagtgccttgaaataaaatgtgagagtattctggtactctgtgttccagatgcatgaaattgggtgaggaataacccctagtctggaatctttgtgaagcatagggttattgcaaggcaaatgggaactaacacatcttgccatttgaatcagggtctccagtttctagaaaaggcagacactggttgggaccaaagtctccatggcacatgactgaagactggtggtcgtgtgtgtgcggagtccacrgaagcctcggggaggtggagctgctccttccattccgtcaggacgtgatctgaaaacatgtagagaagatgagttgaggacagcttttctaaggcaatgtgatgtctttgctttcttatttctctttctctgcgttgttagttttgaagagtggaggagctaggggctccagaaagaatcttacacatgtgttgaagacattgatgtcatagggagcggggagctgcattcccttctgggctgttactgctaaatctcagtatgaacagaccaggcggaaagcttggtggccaagcagtctgtgtgcttccccgctgatggagaacgttgcgttgttcacaatagggcctcatgggtgtagccgcatggcagacccatggctggcgcagctgcctgttgccgtctgtcttcagtaactgctgctctgttaactgttctattctgatactacgcgtgttgttttttacaacaggtatgtttttgtttcagaaatatgtattgcttttctcatattttttgcaaattgtattgtcaacatgggtcatttaaagtcctgtatgaaccataacctgctgtggtacctttgtacatgtttgattctgtattctttattccagtgtggcatatgtgcccctctgtatcttttgagaagtgcggaataggttgcttctaccacctgttcttaatgtaacagtaaaagttttcacatttttctcagaaaaaaaaaaaaaaaaaaaaaaaaaaaactcgag

SEQ ID NO: 2789 - DNA, 2220 bp, Homo sapiens
gaattcggcacgagagaaaatccaactgagtttcggcctaagagtactcttgagggtcaattgaatgaatccatgtttcttctcagttctcgtcctactcccagaactagcactgcagtggaagtaagtcctggtgaggatatgactcactgttcaccacagaagacttctcctctgaccaagattacaagtggacacctgagtcagcaggacctggaatcccagatgagagagcttatctacacggactcagatcttgttgtcacccccattatcgacaatccaaagataatgaaacagccaccagttaaatttgatgcaaaaatattgcatctaccaacatattcagtggataagttattatttctgaaagatcaagattggaatgactttttgcaacaagtgtgctcgcagatcgactccactgagagagcatgggggcctcccgagccaagctgaatctcctttgctatttgtgcgtggtggctggtcaccaggaggtggccaccaggctcctccattcccccctgttccaattgctaatccagcatttgcggatagctccaaactgggatatacgggccaaggttgctcacgtgattggtttactggcttcgcacacaactgagctccaggaaaatacacctgttgttgaggcaattgttctcttaactgaattaattagggaaaacttcaggaacagcaaattaaaacagtgccttttaccaacccttggggagctgatctatcttgtagccacccaggaagaaaaaaaaaagaaccctagagagtgctgggctgttcccttggctgcatacacagtgctaatgaggtgccttcgggaaggggaagagcgtgttgtgaatcacatggcagcaaaaattattgaaaatgtctgtaccaccttttctgctcagtcccagggctttattacaggagaaataggacccattttgtggtacctattcagacactccactgctgattctcttaggataacagcagtatcggccttgtgtagaatcactcgccattctcctactgccttccagaatgttattgaaaaggtgggactgaactcagtaataaactccctggcctctgccatctgcaaagttcagcagtacatgttgaccttattcgctgccatgttgtcctgtgggattcatcttcaaagactaatccaagaaaagggttttgtctccacaattatccgtttacttgacagcccctcaacatgcattagagcaaaagccttcctggttcttctatatattttgatttataaccgtgagatgttgctgctcagttgccaagcaagactggtgatgtacatcgagagagacagcagaaagaccactccaggcaaggagcagcaaagtggcaatgaatacctgtccaaatgcctggatcttctcatctgtcacattgtgcaggagctgccacgaatcctgggtgacattcttaactccttggctaatgtttctggacgtaaacacccatcaacagttcaagtgaaacagctgaagttgtgtctccccctgatgcctgtagtgcttcacctcgtaacttcacaggtatttcgacctcaagttgtgacagaagagtttcttttcagctatggaactattcttagtcatattaaatctgtagactcaggagaaacgaacatagatggagccataggactgacagcatcagaagaatttatcaagatcacattgtcagcttttgaagcaataatacagtatcctattttattgaaagactatcgctccacggttgttgactatatactgccacccttggtgtccttggttcaaagccaaaatgtggagtggagactctttagcttgcggttgctctcagaaaccacatctctactcgtgaaccaggagtttggggatggcaaggagaaggccagtgttgattctgacagcaatcttctggctctcattcgagatgtcttacttccccagtatgagcacattcttttagaacctgacccagtaccagcatatgctctgaaactgctagtcgcgatgactgaacacaacccaactttcacaaggtactggaagttcaaatttctttttcttgtgtctcacctctaaaatgaattttatgtgttgtgaaaatgttattaaagatgagattccaaaagaaaaaaaaaaaaaaaaaaaaaaaaaaaaaaaaaaaaaaaaaaaaaaaaaaaaaaaa

SEQ ID NO: 2790 - DNA, 1721 bp, Homo sapiens
ggcacgagcaaaagatgaatttgaggagcgagcaaaggctattattgtagaatttgcacagcagggtttgaatgctgctttgttttatgagaataaagatccccgcacttttgtgtctttggtacctacctctgcacatactggtgatggcatgggaagtctgatctaccttcttgtagagttaactcagaccatgttgagcaagagacttgcacactgtgaagagctgagagcacaggtgatggaggttaaagctctcccggggatgggcaccactatagatgtcatcttgatcaatgggcgtttgaaggaaggagatacaatcattgtgcctggagtagaagggcccattgtaactcagattcgaggcctcctgttacctcctcctatgaaggaattacgagtgaagaaccagtatgaaaagcataaagaagtagaagcagctcagggggtaaagattcttggaaaagacctggagaaaacattggctggtttacccctccttgtggcttataaagaagatgaaatccctgttcttaaagatgaattgatccatgagttaaagcagacactaaatgctatcaaattagaagaaaaaggagtctatgtccaggcatctacactgggttctttggaagctctactggaatttctgaaaacatcagaagtgccctatgcaggaattaacattggcccagtgcataaaaaagatgttatgaaggcttcagtgatgttggaacatgaccctcagtatgcagtaattttggccttcgatgtgagaattgaacgagatgcacaagaaatggctgatagtttaggagttagaatttttagtgcagaaattatttatcatttatttgatgcctttacaaaatatagacaagactacaagaaacagaaacaagaagaatttaagcacatagcagtatttccctgcaagataaaaatcctccctcagtacatttttaattctcgagatccgatagtgatgggggtgacggtggaagcaggtcaggtgaaacaggggacacccatgtgtgtcccaagcaaaaattttgttgacatcggaatagtaacaagtattgaaataaaccataaacaagtggatgttgcaaaaaaaggacaagaagtttgtgtaaaaatagaacctatccctggtgagtcacccaaaatgtttggaagacattttgaagctacagatattcttgttagtaagatcagccggcagtccattgatgcactcaaagactggttcagagatgaaatgcagaagagtgactggcagcttattgtggagctgaagaaagtatttgaaatcatctaattttttcacatggagcaggaactggagtaaatgcaatactgtgttgtaatatcccaacaaaaatcagacaaaaaatggaacagacgtatttggacactgatggacttaagtatggaaggaagaaaaataggtgtataaaatgttttccatgagaaaccaagaaacttacactggtttgacagtggtcagttacatgtccccacagttccaatgtgcctgttcactcacctctcccttcccaacccttctctacttggctgctgttttaaagtttgcccttccccaaatttggatttttattacagatctaaagctctttcgattttatactgattaaatcagtactgcagtatttgattaaaaaaaaaaaaaaaaaaaaaaaaaaaaaaaaaaaaaa

SEQ ID NO: 2791 - DNA, 2267 bp, Homo sapiens
gggtcgacccacgcgtccgcccacgcgtccggaaggctttgggcacagaccacacaaggatctatgggcaagcaaaaatgaaaacgaagagattttggagagaccagcccagcttgcaaatgcaagggagacccctcacagcccaggggtagaagatgcccctattgctaaggtgggtgtcctggctgcaagtatggaagccaaggcctcctctcagcaggagaaggaagacaagccagctgaaaccaagaagctgaggatcgcctggccaccccccactgaacttggaagttcaggaagtgccttggaggaagggatcaaaatgtcaaagcccaaatggcctcctgaagacgaaatcagcaagcccgaagttcctgaggatgtcgatctagatctgaagaagctaagacgatcttcttcactgaaggaaagaagccgcccattcactgtagcagcttcatttcaaagcacctctgtcaagagcccaaaaactgtgtccccacctatcaggaaaggctggagcatgtcagagcagagtgaagagtctgtgggtggaagagttgcagaaaggaaacaagtggaaaatgccaaggcttctaagaagaatgggaatgtgggaaaaacaacctggcaaaacaaagaatctaaaggagagacagggaagagaagtaaggaaggtcatagtttggagatggagaatgagaatcttgtagaaaatggtgcagactccgatgaagatgataacagcttcctcaaacaacaatctccacaagaacccaagtctctgaattggtcgagttttgtagacaacacctttgctgaagaattcactactcagaatcagaaatcccaggatgtggaactctgggagggagaagtggtcaaagagctctctgtggaagaacagataaagagaaatcggtattatgatgaggatgaggatgaagagtgacaaattgcaatgatgctgggccttaaattcatgttagtgttagcgagccactgccctttgtcaaaatgtgatgcacataagcaggtatcccagcatgaaatgtaatttacttggaagtaactttggaaaagaattccttcttaaaatcaaaaacaaaacaaaaaaacacaaaaaacacattctaaatactagagataactttacttaaattcttcattttagcagtgatgatatgcataagtgctgtaaggcttgtaactggggaaatattccacctgataatagcccagattctactgtattcccaaaaggcaatattaaggtagayagatgattagtagtatattgttacacactattttggaattagagaacatacagaaggaatttaggggcttaaacattacgactgaatgcactttagtataaagggcacagtttgtatatttttaaatgaataccaatttaattttttagtatttacctgttaagagattatttagtctttaaattttttaggttaattttcttgctgtgatatatatgaggaatttactactttatgtcctgctctctaaactacatcctgaactcgacgtcctgaggtataatacaacagagcactttttgaggcaattgaaaaaccaacctacactcttcggtgcttagagagatctgctgtctcccaaataagcttttgtatctgccagtgaatttacygtactccaaatgattgctttcttttctggtgatatctgtgcttctcataattactgaaagctgcaatattttagtaataccttcgggatcactgtcccccatcttccgtgttagagcaaagtgaagagtttaaaggaggaagaagaaagaactgtcttacaccacttgagctcagacctctaaaccctgtatttcccttatgatgtcccctttttgagacactaatttttaaatacttactagctctgaaatatattgatttttatcacagtattctcagggtgaaattaaaccaactataggcctttttcttgggatgattttctagtcttaaggtttggggacattataaacttgagtacatttgttgtacacagttgatattccaaattgtatggatgggagggagaggtgtcttaagctgtaggcttttctttgtactgcatttatagagatttagctttaatattttttagagatgtaaaacattctgctttcttagtcttacctagtctgaaacatttttattcaataaagattttaattaaaatttraaaaaaaaaaaaaaaaactcgagggggggcccgtacccaac

SEQ ID NO: 2792 - DNA, 2158 bp, Homo sapiens
gagattttggagagaccagcccagcttgcaaatgcaagggagacccctcacagcccaggggtagaagatgcccctattgctaaggtgggtgtcctggctgcaagtatggaagccaaggcctcctctcagcaggagaaggaagacaagccagctgaaaccaagaagctgaggatcgcctggccaccccccactgaacttggaagttcaggaagtgccttggaggaagggatcaaaatgtcaaagcccaaatggcctcctgaagacgaaatcagcaagcccgaagttcctgaggatgtcgatctagatctgaagaagctaagacgatcttcttcactgaaggaaagaagccgcccattcactgtagcagcttcatttcaaagcacctctgtcaagagcccaaaaactgtgtccccacctatcaggaaaggctggagcatgtcagagcagagtgaagagtctgtgggtggaagagttgcagaaaggaaacaagtggaaaatgccaaggcttctaagaagaatgggaatgtgggaaaaacaacctggcaaaacaaagaatctaaaggagagacagggaagagaagtaaggaaggtcatagtttggagatggagaatgagaatcttgtagaaaatggtgcagactccgatgaagatgataacagcttcctcaaacaacaatctccaccaaggaacccaagtctctgaattggtcgagttttgttagacaacacctttggctgaagaatttcactactcagaatcagaaatcccaggatgtggaactctgggagggagaagtggtcaaagagctctctgtggaagaacagataaagagaaatcggtattatgatgaggatgaggatgaagagtgacaaattgcaatgatgctgggccttaaattcatgttagtgttagcgagccactgccctttgtcaaaatgtgatgcacataagcaggtatcccagcatgaaatgtaatttacttggaagtaactttggaaaagaattccttcttaaaatcaaaaacaaaacaaaaaaacacaaaaaacacattctaaatactagagataactttacttaaattcttcattttagcagtgatgatatgcataagtgctgtaaggcttgtaactggggaaatattccacctgataatagcccagattctactgtattcccaaaaggcaatattaaggtagacagatgattagtagtatattgttacacactattttggaattagagaacatacagaaggaatttaggggcttaaacattacgactgaatgcactttagtataaagggcacagtttgtatatttttaaatgaataccaatttaattttatagtatttacctgttaagagattatttagtctttaaattttttaggttaattttcttgctgtgatatatatgaggaatttactactttatgtcctgctctctaaactacatcctgaactcgacgtcctgaggtataatacaacagagcactttttgaggcaattgaaaaaccaacctacactcttcggtgcttagagagatctgctgtctcccaaataagcttttgtatctgccagtgaatttaccgtactccaaatgattgctttcttttctggtgatatctgtgcttctcataattactgaaagctgcaatattttagtaatacttcgggatcactgtcccccatcttccgtgttagagcaaagtgaagagtttaaaggaggaagaagaaagaactgtcttacaccacttgagctcagacctctaaaccctgtatttcccttatgatgtcccctttttgagacactaatttttaaatacttactagctctgaaatatattgatttttatcacagtattctcagggtgaaattaaaccaactataggcctttttcttgggatgattttctagtcttaaggtttggggacattataaacttgagtacatttgttgtacacagttgatattccaaattgtatggatgggagggagaggtgtcttaagctgtaggcttttctttgtactgcatttatagagatttagctttaatattttttagagatgtaaaacattctgctttcttagtcttacctagtctgaaacatttttattcaataaagattttaattaaaaaaaaaaaaaaaaaaaaaaaa

SEQ ID NO: 2793 - DNA, 763 bp, Homo sapiens
gctgcaggaattcggcacgagcagaggccaagatgaaatctccaccgacagaccttgctggattttcccactcagtctgtgactattagattatacccctttgtccaattgcatttgtacacagttgttcatgcttcagtcatgcctattcaatgaaatttccatagaaggcccaagaggaaagagtttgaagagcttccagaaaacggaacatgtggaggttcctggaagatagcaaggccggagagaacattgaagctttgtgagccttccctcatacctttccctatgcatctcttcatctgcaccctttggaatatcttttgtaataaacccgtttcctggagttcagtaagctgctctaacaagtttatcaaacccaaggagggggttgtgggaataccaatttacaggcggttggttagaagcacaagttaaacaacctggggcttgtgattgacattggaagtgggggcagtcttgtgcgactgggcctgtggaatctgatgctatccccagagaaatagtcagaagacaaatggaggacagcaagctggtgttggctgaataattgattgcttgcttgctggtagggagagatccctacacatcttgtcatataagtcttatgttgattgctgtgatgtgagagtcagaggaaaaacagctggagttgtttttttttttcctaaccgtagtataaaatgtattcaaaatacaataaaaatattgctgaattaaaaaaaaaaaaaaaaaactcgta

SEQ ID NO: 2794 - DNA, 1134 bp, Homo sapiens
cggcacgagaaaagttccacaggaatagtttaagcatgatcctgagcacaaatttatttacagatttgttcatactctttttagtgctgcacagctaacagctgaatgtgcaacagtaactctggtttacttagaaaggcttttaacttatgctgaaatcgacatttgccccactaactagaaaaggattgttctgggagccactcttcttgcctccaaggtttgggatgatcaggctgtatggaatgtggactactgccagatcctcaaggacattacagttgaggacatgaatgaaatggaaaggcatttttcggagcttcttcagtttaatattaatgttcctgctagtgtttatgccaaacactaccttgaccatcgctccttagcagatgacaacctgaattttctatttgctcctcttagcaaagaaagagcacagaacctagaggctatttctagattatgtgaagacaaagacttgtgtggagcagctgtaagaaggtctttcagcgctgatcaacttcattggtattcagcactctaaagccatcctctcttaaagggagaaatgaggggttataatgtcacgggaccttcatctacaaagactggagaaataccacctttcctgctcaaaaaccagcaaaattagtgttttcatcaaaaggaaagatctcaaattcaagagacgcacggacaacaaggatcatactccatagaaaagaatggaaccttgtcaatgcaacaaaacactcttctgtcctttttaatgtaaacagagtcaccaaaaccactccaaagtgaaggctcccatcccacacacagatatttgcttacaatgtgggccagtaactgaactatgttaggttttttaaacaatagtttaaatttttagactttaaagacattaaccatataacttttatgtttcttccagtttttctccccctgctcattttgctgcatatgcctttagaatcaatgcagtattgcccttaaaacaagggactctaactaaagccacttaggagcagactgcagcattgttaggtattgaagggttcttcctccctactgttaccattaaagctgctagtcattggcaatcattttaaaaaaaaaaaaaaaaaa

SEQ ID NO: 2795 - DNA, 963 bp, Homo sapiens
ggcacgaggctgaatggccttttattaaaaatgtaagacattttaaataaaagaagttaaaaagtctgtggaagtattgagggtgagaatctctgctagctagatctctatattaagtgatgagataagctttattaaaaatgagaatcagttcatacttaacctaagcctgacagtgctgggcagagagtcctgctgtaccactaccaatggagccaggcaaggatgcctctctgctagacacagcacatatggacaaagccacaagctatggctcatcccaatagaatcttactagttccctggtaaggttagctataatgtcttctaactcacatcatttgcattaaaaaaagaaagaaacagatgatgactgatacacatgttggttggtagagctttcaggttcctctttccatgtagttgaggaaattcctcagcccattgtcacctcggatctcatgctgcaactccatccttagctcaacacccactggsccctgstttcaaactgttgctggtcttcaggtagagcaggttctgcagatcaaaggacatttttcactaaaaatctctgacatcagagacagagactacatatctataatgaacctttccgaaacctgtccattagaaagccacttctcagtacagaggtggaccttggagactttccaggattttcacatccatctgcgaagaggaaaagaactcctgaaactgggctgacttcataaccagtttaatttcacacatctcacctttctggagctgccttgtttttcccttcttgcatcactgcagagaaaattcatggacttcctaaaggtgagactctgacccattagtaagaaagtcttgctttatgttaagttggctttctctggagatctcctaactgctttataaacattctttcacacctccaaaaaaaaaaaaaaaaaaaaaaaaaaaaaactcgag

SEQ ID NO: 2796 - DNA, 1876 bp, Homo sapiens
ggcacgaggtggttggggcagggaggggaggaggaggagcttggcaagttatcttctccttccgtgaaacagagcactttaaagtgcttactttctttatcacttactttctcatattggccttccaggtatatgctcgtatgtcagaagtcttaggaataacagatgacaaccacgttctagagacgttcatgacaaaaatagtgaacacttcccttttcttggcatcagtgacaatcatagtctcagcgacttcaggtgtcgaacaaccttctacacagcgctcactcgccttctgatggtagatctgggtgaagatgaggatgaatttgagaatttcatgctgcctcttacagttgcttttgaaacagtattacaaatattcaacaacaactttaaacaagaagatgtaaagcgtatgttgatcgggctggcaagagatcttcgagggattgcctttgcactgaacacaaagaccagctacaccatgctgtttgactggatgtacccaacgtaccttccccttcttcagaatgctgttgaacggtggtatggagagccaacatgtmcaactcccatcttgaaacttatggcagaacttatgcaaaacagatcccagcgtttgaattttgatgtatcatctcctaatggaattcttctcttcagagaagctagtaaaatggtttgcacttatggtaatcagatcctgtcccttgggagcctctcaaaagatcagatttatccaatgaaactcaagggcatctccatctgctattcagctctcaagtctgccttgtgtggaaattatgtcagctttggcgtcttcaagttgtatggggacaaccattttgacaatgtactccaggcttttgtcaaaatgctgctgtcagtgtcccacagtgacttgctacaataccggaaactgagccagtcttattatccactcctggaatgtctcactcaggaccatatgagcttcatcatcaacttagagcctcctgtactcatgtatgttctcacatctatctcagagggactcactactcttgatacagttgtctcctccagctgctgtaccagtttagactacatcgtcacctacctcttcaagcacatagcaaaagagggcaagaagccacttcgatgcagagaggctacccaggctggtcagagactattacattttatgcagcaaaacccagatgtcctgcagcagatgatgtctgtcctcatgaacaccattgtctttgaagactgtcggaaccagtggtcagtatccaggcctctcctggggctcatcctgctcaatgagaagtatttcagtgaactgagagcaagtttgataaacagccagcccctccccaagcaggaggtccttgcccagtgcttcagaaacctaatggaaggagtggagcagaacctgtccgtcaagaacagagacaggttcacccaaaatctgtctgtattcagaagagatgtggcagaggcgttgcgcagtgatggcaacactgaaccatgcagtctcgacatgatgagctgacccgacttttctgaccatgtgcggagcagcctttatcaagagactcctgaaggtctgggtctcaggacagtgatgttggctagcccaggggaatgtatttttcaaaacatacaagcaacagcaaaagccctaacttcttatacgtctagcctaattataagaatttctaacagtaccagtgtaaattcagtcttttctctgaaaagcaaaggatgtgttttcagtctttctatcaaatattatctttgttctcctaatgctctgaaaggatgtagaaacaatatttaaccaaagaacgtaataaaccaggtttgcacctaagtgtgtactagttta

SEQ ID NO: 2797 - DNA, 2202 bp, Homo sapiens
ggcacgagcttaaaagcaatggtgaaaggataacctcgatgatgtaaatccacccaaagatactgttctacaaaaagtagggtgtggacgcaaacctgtgacagcagagggggacgacttcacactcactgcctcatgtggcccctttcccagtggcagctggtgacactaacgattgctactcggttcacttgcccagatgtcttcatatgatgagcaaggccagaagcaaggctagattcgaagtttctgacaccatttccagtttgcacaaaagtcagtattttatcttaaagtggcttgatttccaatagctgaacttgggcagaaaacagcaggccaatgttcctatgtggtttctttgttgttgtttttgtttggggtgggggcaagtacagggtaattcatgagcaagacatttcactgctgtcgaagtctctgggatcccgctgtgggtctgagatggcctgggaaggaccttgtggacaatggttttatctgttctttttgtcactgttaatttctgggctgctgaggttctagaatagaagggctgccaaatgaggtttgctgcaggaggaaagtttaatcccccattccaaaagtccaggccaaatggtgggcttagcctctttgaaaagttctgccttgcccccacaggtgggcacatcctgtgtctcattcaccatgatgcttcctgagggtgttctagaagcccgttccccagtggctgtatccagcctttccttgcatcatcttcctcttgaaggtgaggaagtgaaaactacagacctcccccggacagcccactctctatcacgagcctaacccgcgggaggcggaagagacatccattcgagaactgaagcggcctccgggatgaggtcagaggccccacctgattttcctggtggtggtatccaaaatcttcagtaactaggaaggaaaccagggtctcatggtttaaaagactttgaagcaggaatgttgcatttgacgcctttaaaactacctttttgctgttgggaggagtcgggggcgagccttagcagctgcaccgccatccccatgctggttggtgctgccctgcctctcgtgccgggtgttgcttcagcccagagccagagggctgggtcccgggtcctccacaggtgaccccggtggacacacgcgttcccatcctggcctccgtctctgcttttccacttctacctgcgtgtgggtttgccgccttgtcatcggttgtgtgagtgtcgcagacctttccagagctccggttcactctttccaaacaggcctccctgtcggtggcactgcactcctagaaccttcagtttctacgatggtttgtttggtccttttgaaccaccccaaagaactcaacatggcaaagcaaatggtaaaagcttcccgactgttctactttgggtccgcgcgaagccccactcacgtgtgatctgtgttgcccctctcggtggtcccaggcgatccagccatgccccctgcccctctgcccagatgcttcaggggcccggcttttcaggcttgccctcaccagcggccgtcagccgacactcagggatgtagctaacaccactccgccagtgctttcagtaggaagagctgaggctgcctgggaggcccggggcgaccggaaaagggctctctcaagttctgaaaagagaatctgccaccagatcgaatttcgacccctgagcttgttcggacgtatggtccaaattcagattaaggtggtcacccaacccgagatgtcaggaaaggccttctgcagagaaaatgtccccccacccgccatctgcagccaggtgtgtgccacacggcagccttcccgaaacatagtatggattttaaaaatgtgtttatttttgtttctcaaccactttataacgtatttttttaatttattttgtaatgtcttgttttgaagtattgctgctatccttgttatccttcccactgtttttatcactgattttattttgtgaaagttgtacactaatgttctatgtcaaaatcaaaaagtatttaaatggaaatactagttctatttaatgtggttatggaaccagctggaaacacaaaacaaacagtgattgtacagcaggctgggcccaggaggtcaggttcattttgttacatatgcaataaactcacgactttaaaaaaaaaaaaaaaaaaagg

SEQ ID NO: 2798 - DNA, 1316 bp, Homo sapiens
ctatgtgcgtttgctgtccatgttgtacatggcagagatgttgtcctcagttatgctcctgtctgtgctgcaagttcatcttcacctcagagcggaactgcacctgcttcccctgcccttacaaagatgagcggaactgccagttctgccactgcacctgttctgagagccccaactgccattggtgttgctgctcttgggccaatgatcccaactgtaagtgctgctgcacagccagcagcaatctcaactgctactactatgagagccgctgctgccgcaataccatcatcactttccacaagggccgcctcaggagcatccatacctcctccaagactgccctgcgcactgggagcagcgatacccaggtggatgaagtaaagtcaataccagccaacagtcacctggtgaaccacctcaattgccccatgtgcagccggctgcgcctgcactcattcatgctgccctgcaaccacagcctgtgcgagaagtgcctgcggcagctgcagaagcacgccgaggtcaccgagaacttcttcatcctcatctgcccagtgtgcgaccgctcgcactgcatgccctacagcaacaagatgcagctgcccgagaactacctgcacgggcgtctcaccaagcgctacatgcaggagcacggctacctcaagtggcgctttgaccgctcctccgggcccatcctctgccaggtctgccgcaacaggcgcatcgcttacaagcgctgcatcacctgccgcctcaacctgtgcaacgactgcctcaaggccttccactcggatgtggccatgcaagaccacgtctttgtggacaccagcgccgaggaacaggacgagaagatctgcatccaccacccatccagccgcatcatcgagtactgccgcaatgacaacaaattgctctgcaccttctgcaagttctctttccacaatggccacgacaccattagcctcatcgacgcctgctccgagagggccgcctcactcttcagcgccatcgccaagttcaaagcaggtggtaacaccagatggacatgggaagaaccgagctaagtggggcctgctgaagaatatccagtctgccctccagaagcacttctgagccccttcagagcaggaaacaacctcagactcatcacaaagtagacatatacacacacatatatgtatgtatatttttctcaccacattcttcaaggaggttgtagacaaatgtttccatgacctctcagctttccaacaggaatcttgtaagagctaataaaaggaaatacctgaaaaaaaaaaaaaaaaaaaaaaaaa

SEQ ID NO: 2799 - DNA, 1167 bp, Homo sapiens
ggcacgagtgtgtttgtatttaattagtaaagatgttcatctcaccccattatatcatgatgtacttgatgccaacatggcttataactcataatgttaaccttgatcatttagttaaggtagtgtttgccaggtttcttcactataaagttaatatttttccatttccatactattttctttgaaagtgagtcattgtaattccataccacaaccaaaaggacaggattaatctctatctcctagagaggagtgtctacatatattctttagaattcttttttttttttttttgagatggagtcttgctctgtcacccaggctggagtgcaatggcgtgatctcggctcactgcaacctccacctcccgggttcaagcgatcctccatgcctcagcctcctgagcagctaggattacaggcacctgccacagtgcccagctaatttttgtatttttagtagagacagggtttcatcatgttggccaggctggtttcgaactcctgacctcaggtgatccgcctgccttggcatctcaggttgctgggattacagacgtgaatcactgcgccaagcctagaattcttctataagataaatttctccctttatcacttaagtatttattcaataatacttatatcattatggactcatggatatttattttactctctgaattataatccaatactatcactgttttgttggtttttttgggtttttttgtttttgtttttgtttttttgctgaaattgttccagctttggccactggggaactctttccaattgcctctggtgtccttttgacctctctcctacttttataattttcttttttttttttttttttttttttagcactataagatgttccagactcgtcttgcgttttccctcctttaattggaaatggtatttagaaactaagatttgtgaactggtcatgcttgttgttactgtggtgtcactatgtgttaggctgttcttgtattgctataaagaaacacctggccaggtgccgtggctcatgcctgtaatcccagcactttgggaggccgaggcaggtggatcatgaggtcaagagatcgagatcatgctggccaacatggtgaaaccctgactctactaaaaatacaaaaaaaaaaaaaaaaaaaaaaaaaaa

SEQ ID NO: 2800 - DNA, 1436 bp, Homo sapiens
gaaaacctgggcacaaaattgggttgactgtgaatcattgtgatgcctgatcactctcctgagacacccaccatcattggtactggttgcctgctcttgacaccggaggccactttgtgtacttagcagttagaaaggtgatgtgtgaggcccggcagctgttggtgttacagctattgtgtgggaaacaaaagccattctgttctgttccccagcctgcctttgtatcacggatagaggagctgtttcataaatgagatgagttatgctttaaaccatacaaacagaaaactaacattggaacctaaaattactgtcaatgccaagatcattgtggttggtgcatccagtgttggaatttccttcctagagacattggtattttgaatcttttgaagagcctgtaatggcactagaaaaatgcttactggagtcatggatgacagtgactgaaagcagcccagctggtgtccccgcgaccctccgtgtgactagagagaaacactgattcataggaagcaccggtgggcactggaaagcccgggttccccttgtcttccacttccaccactcagaagagttttctcgaaaactgaccaaatcatccagcaaaagatgcagcctcagactttcagcctagacactgatcccctcatctggttgaatgtgtcgaggtaactaagaatagcttggaccaagcagggcatgtttctaaagctgcaattgtggcaatgaccacaactcctgttatcgggccgtgcagttccgcacaatatccggcacagctgtgggctctggcagcagccagcctagcgctggcggcttaattaggctttttatctttacatttgtctgaggacatctgaaaccttcagtgtggcctgtcactaattaggtgactaattaaatagtcagtgcttccttgctgatctcagagctcaaccgcaatggacaggtttgtgattgtgactccccgtcctgtcggtctctgcacgtgtgcgcctcgcaattgccctgttcattgcgctgtgcaaaaacggcatgggagcgaggcccagggcatgtgcagggccgtcctccgatgtgcccaagcagcaggcagcacggacatccacaggggggcatatgggagatggacatccacagggcatacgggacatcagttctggtgcagaggctggtctggtggccagagcagaggggacggtggaaggagctttacctgccaggctcagagtctcagtctccccaggcagcaagagttgacattctgccaccagagaataaggatccagaactcaccctggtgtcactaatcacaatggggtttcctattcgactccaatatttaaatgtaattaatgttaaataaaagcaccttcatttactgaaaaaaaaaaaaaaaaaaaaaaaaaaaaaaaaaaaaaaaactcgag

SEQ ID NO: 2801 - DNA, 2593 bp, Homo sapiens
  misc_feature (2583)..(2583): n equals a,t,g, or c
  misc_feature (2589)..(2589): n equals a,t,g, or c
  misc_feature (2592)..(2592): n equals a,t,g, or c
gggaaaacgtctatttacgttgaagttttaaaaatgcctaccccaggagggaaggaacaccgttattacctctctttggaatgttggaaaggaatggtccgtgtggccaaactcaggctctgaattggttttgtctgaagatgaaaaaagtgacaatgaagataaggaagagacggaattgggcgtcatggaggatcagcgtagtataattcttcatctcatttcacaactcaaacttggaatggatttgaccaaggtggtgcttcccacctttatcctggagaagcgatctttgctggagatgtatgcagatttcatggcgcacccagacctactgctggccatcaccgctggggccacaccagaggagagagtcatttgcttcgttgagtattatctcacagcctttcacgagggccgcaagggcgctttagccaagaagccctacaaccccatcataggcgagacatttcactgctcctgggaagttcccaaggacagggtcaagcctaagaggactgcttcccgctctcctgccagctgtcacgaacacccaatggccgatgacccttccaaaagctacaaactaaggtttgtggctgagcaagtgtcccatcacccacccatctcctgcttctactgtgagtgcgaggagaagagactgtgcgtcaacactcatgtatggaccaaaagcaagttcatgggcatgtccgtgggggtctctatgataggggaaggtgtgttgaggctcctggaacacggggaggagtacgtattcaccctgcctagtgcctacgcccggtccattctcaccatcccrtgggtggagctcggaggaaaagtcagcatcaactgtgccaagactgggtactcagcgacagtgatattccacacgaagcctttctatggagggaaagtccacagggttaccgcagaagtgaagcacaacccaaccaacaccattgtttgtaaagcccatggggaatggaatggtactttagagttcacctacaacaatggagaaaccaaagtcatcgacacaaccacactgccagtgtatcccaagaagatcagacctcttgagaagcagggacccatggagtccaggaacctctggcgggaggtgacccgatacctgcggctgggggacattgacgcagccaccgagcagaagcggcacctggaggagaagcaacgggtggaggaacggaagcgcgagaacctccgcacaccatggaagcccaaatattttatccaggagggcgatggctgggtatacttcaatcccctctggaaagcacactgatggggtggaggtgcagagctttccagtatagccctgtttttgtaggaatattaaagtagtagagtatcagggttttgttggcattcactgagaccttgtattagcatccaagaaatgatgagagagagagaaattatatactatgaaaagtgcacccccacactctgctagaggaatgaatttattcaagagccattcggggcacgtgtgtgtacacaccgtatacgttcacacacatgcactatgtaaacatctgagtatgattacacatttaaatactgcactcaccaaggttaaagtgggtaatcataagctcctttttatcaatgaagtttgaagtttttctatttttcactttgccaaaaatgttttacactcacaaagatattctcacttagtcaactcctgtcaaaatgaaggtgaactggcatggcccgatcactgtccataagggagaaagtggctcattcctggtagaagtatgggtggttatcatttcaaaattattgtgattctcacctccctccccacctcagtgttttgtctgtccgcgcccaagaaagataagcaagtatttcctgctggatgggggttggcaggaagctgttaaagatttatgccagagccttgcaggatggagcacctctgggacaactaagagccaaggcccaccaaggagttttccacccgtctctcatggtcacagcgctagtcattcatttttgagaagttgcttcttttacatcagaaaaccagtcaatcatatggagacttcttttgtgatgaaaaagggctttagaagttaaatacatgcatgcacatgaaaacatgcacaaccacagcctcaatcttgtatttagtttgggggaaagagaagagaatttcctgkggattattttttcctcaagtgcacctctctggttaacccaaactctgcaagaaagcactgtgactaaaacatacataacgcctgcataaatattccatggtttcagttaaatttcagtttttagcctttacacatgaggtcaaaggagtgacgaaaatacaaagcaaggaaaaaatgaaatatctggtttttgctgaatgcttaatttattttttactgtgccactccaatatttatcaaatccaaatagcatgaatgcttctctgtagtaatactaattttgtgccttttgtctgctttcttaagaccagttgttcacactttgtagatattagacaaatatatttcgattgaatacaaaaaaaaaaaaaaaarggggggccgcccnaggggnccna

SEQ ID NO: 2802 - DNA, 673 bp, Homo sapiens
  misc_feature (245)..(245): n equals a,t,g, or c
gcggcacgaggttacttgggaggctgaggcaggagaatggcttgaactggggaagcagagcttgcagtgagccaagatggtgccattgcactccagcctgggcgtgacagagtgagactccatctgattgtaaagcatctagtacagtgtacagtgccttggaaatgataggtatggaataaatggtaattatttttatattatatatattatgtattcctgttattaagtgtagagttttatgnagtataatttgattttattaccttcttttttacaagctgttttctcagtatttttcttggatgggatgacgctaggctggaaagtttttttcatcactatgattttataaaacaakkttttctatgarcctttacttacttgactggattggactaaaagcactgatcagaggccacgacataaaaattcagtccctttgtccttccccgtgcctcccaaagttactttaaratccttasaatatttctttaaatattttatagacaaaaaatttaaagactatctgtattgcaaaattaaactatttctttaatgaatatattgcttattttaagttccaaaggtgaagtctttaagaataaaacattaccaactcctgcttttatatgtaarmaaaaaaaaaaaaaactcgagggggggcccgaaa

SEQ ID NO: 2803 - DNA, 1051 bp, Homo sapiens
ggcagaggtgagaggtgacaacgtgctggcagccctcgctcactctcagcgccttctctgcctcggcgtccggtctggccatgcttgaggagcccttcagccctccactgcgctgtgggggcccctctctgggctggccgaggccggagccggctccctctgcttgcagcccttcctctgacgtgcacaggatatgaaaatgtctgatagtgttgtggctgcagtgagacctgggagtggcagtttctttcactgcagttgtctgtccaaagcgaagtgaactagcaagtctcttacaaaagggcaagctctgaactgcgcacagtttttctcagtgggagaaatcttctgtgtccttggatgaagacttactcagtaaattactttatgatcactgatagctctgtggargtctccaatgtctcctctggamtgstataccagccacctgacagccatcctgcctccctcatccctctactacagtacgtactctaccagtactctgagccatctttcacagagttagtttgagcattccctagctcaaaactctcccattgcttcctgttgcactgagaattaaatctaaagacttcacagagtccctcaaggccctacagactcttggtccccatgctgcccctctgactcacctcctccctaccactcttgccttcctttctcatccccgtcactttggcccacttgatgttctttgaacacacacatctggctatctccccaagtctttgcaattgcttaaaccactcttcccagatacccagaagacttgctttctcattttcttaaattatctctgtattcaaatatcaccccctcaagaggtctatcctgactttctctctcaccttctccttttctttatgatatttagccataattcgccccccatacacatgcatttgtttattcatctgttggtttattgtctgtctcctcactaaaatgtaattactccaaaatgtaatttccacaatagcaataaatttatctttttattttaaaaaaaaaaaaaaaaaaactcgag

SEQ ID NO: 2804 - DNA, 743 bp, Homo sapiens
ggcacgagcctacgccctgcgtgcgctgtgctgactacctctccagcatgggaggcttccagatgagcagacacccgaatcccagcgggagcccgtcaaaaatggagatttctgccgtcactctgggactcttaattcggtccgtctggggtggggcccaggaatctgcatttctgataaggtcacccgctcccctcccccattattccagtgcaaagaggtcctaggcccagtgcccatcagctcctcaagacaggaattactatatctttttctgacaactgttaactttgtacaaggttagcaaataaatccaggaatgaatggaatcttaaaactcgtaaaacaacaatgaaaggtaattcacacaaaagatacaaaatccaaaattgtcaaaaaagatacagggaaaagtaaacatccatgttattcctatagtccagccttgcaattctctccacaagccattagtggtaatggtttcttggaaatattttcagatttwtttwgcccatatcagcatttttaacatcttttgtcataaatatgtcgtaaataacaatgttattgatacatatccttttaaaaacacaatggtagtatgctatactggcttgttttacttwtgaatatatgtagrgctgcctcgttccattgtaaaaaaaaaaaaaaaaaaaaaaaaaaaaaaaaaaaaaaaaaaaaaaaaaaaaaaaaaaaaaaaaaaaaaaaaaaaaaaaaaaaaa

SEQ ID NO: 2805 - DNA, 429 bp, Homo sapiens
ggcacgagcgccgcttggccctgctcggcctgcagcccgctccccgcttcgcccactcggggcccccgcgccagcggcccctgtctgccgcggaaatggctgttggacttgtggtgttttttacgaccttcttaacaccagctgcatatgtgctaggcaacctgaagcagttcagaaggaattagatggaagatgatgttgaacagctgttaacgtccaaaaaactttcagaaaaagctgtgtttttgttaacgagcaaaattgcctagttgagttgatgcaaccattgtggtattcactttcctcatgtttatgatgaatattttgcacttttttagtactgtgcattatatagatgtatagtcaaaaatgttctgcttaagtgttaaataaaacggaaacacttattcgtgaaaaaaaaaaaaaaaa

SEQ ID NO: 2806 - DNA, 1471 bp, Homo sapiens
ggcacgagttttttttcacattggaaattgggtgtaattgcatctcaagataggcataagcagagcttagactggggccccccagtggtatagtggtacaagtggttgactcacacacagcacctccactatgttttggccattagtcttcctcgttgactctggaacaacattgcctccacagcaaaggacttcatagtaaatttggtttataatgcagctgtattcaaaaatgggagagctagggaactaggatatgggaaaaaggcacagaggaaaacgtatggtttgaatgaataaggctcctacgactgtctcagcttctccacagcagccaggacgcccttttcactgctaaagcagtcctacctgaggcccaggggctgccagattgacccataaataatctccggcgcctcagatccagaagctgctgagcctgatcttagtgccttctcctttctctgtgtggccccccagcccctttccccactgccttgtgtccaaggccctttccttcatgtatccatggaggagagacaaaaatacacatcaataaaataagatagggaatccataaatagacattcagaagtatggccaacggatttatcttaaaaccaatggaggaagaagagtttcaataaatgttgtggacttccatttgtcaaagaccaaaacaaaggaaccccaaccttacatgtaatacaaacttaactcaaaatggatcatatatctaaatgtaaaatggaaagctataaaactgaaaacagactatctttacaacctaggcgtaggtatagtttttagacattacaccaaaagcacatgccgtaaaagaaaaaatagataaattggtggatttcattaaaattaaaaaactttttctctctgaaaaatcctgttaagctgggcgctgtggttcatgcctgtaatcccagcactttgggaggctgagttgggaagaaattaatagcttgaggccaggagttcaagatcatcctgggcagcaaagtcatacactcttgagggaagagagagaccttctcatattgttttatattgttttatactcagtacctgttttaagaaaaaaacaaggaagtgaaatcaaagacaggcagcccggcaccaggcctgaaaccagccctgggcctgcctggcctaaacctagtagttaaaaatcaacttacgacttagaacctgatgttatccgtagattccaagcattgtataaaaaaattgtgaaactccctgttgtgttctgtaccagtgcatgaaacccctgtcacatatcccctagattgctcaatcaatcacgaccctttcatgtgaaatctttagtgttgtgagcccttaaaagggacagaaattgtgcacttgaggagctcagattttaaggctgtagcttgccgatgctcccagctgaataaagcccttccttctacaaaaaaaaaaaaaaaaaaaaaaa

SEQ ID NO: 2807 - DNA, 1154 bp, Homo sapiens
ggcacgagaatttgcaggcccaaggaaaattccagaaagcttggaaccactttaccattgccatagatactgatccaaagaactacctagcctatgaaggaagagctgtggtctgtcttcagatgggtaataattttgctgcaatgcaggatattaatgctgccatgaagatcagtactacagcagaattcttaacaaatcgtggggtgattcatgagtttatgggccacaaacagaatgcaatgaaagactaccaagatgcaattactctaaaccccaagtactcgctggcttactttaatgcaggaaatatctactttcaccacaggcagttttcccaggccagtgactacttctcaaaagctttaaaatttgatccagaaaatgatatgttctcatgaatcgagctattacaaatacaatattaaagaaatatgaagaagcaaaagaagattttgcaaatgtaattgaaagctgtcccttttgggctgcagtatattttaatagagcacatttctactactgcttaaagcaatatgaactagctgaggaagaccttaataaagccctgtctttgaagcctaatgatgctctagtatataattttagagcaaaagttcgtggtaaaataggtctgattgaggaagctatggctgactataaccaagcacttgatcttgaagactatgcctcagttatatgattacatagactgtggttgctatagtagtttacacagctgttctctctgaaacggaaacatatttgttgtctaaaaggttctaccattttcattattgtattcgttatgcttagtcttccatataaccttctatgcattttaataaaatgtttgttatacattaattataaaacatatatcatttgctgcatatttggaataccttgagaactgaatttttccaaggttgcagaatctcaaggaaaatgtttcttaaggaattaaataggaatgtctcttaacatttaaaatattttctttaattctttttgaaataatactatacattgtagaaaaagtgtcattgaccttttcatcagtccttgctgacaatgtattaaacagtatacagattaaaaaataaacaaaccgatgactataaaaaactgaactcaaaaaaaaaaaaaaaaaa

SEQ ID NO: 2808 - DNA, 395 bp, Homo sapiens
ggaattcggcacgagcgagacctctaccaactgaaggtttcgtgagcgcactcctttgccaagatcttggtgaatagtctttcactgtgcaattttatcttagaaattgttttacgtttgatcatgattgtgcttggctggatgttttttgttggacttgtgtgttacatgggcacgtttccagagttgatggaaccatgtggaagggatataaatatcccccaggagggactccagtggaagtaagcaaggatgatcctggtgaagtaatgcagctgtgaagctcacctgaccagctgtacagttcctgttgttggtttcacataaagtaattgcacattaaaaaaaaaaaaaaaaaaaaaaaaaaaaaaaaaaaaaaaaaaaaaaaaaaaaaa

SEQ ID NO: 2809 - DNA, 975 bp, Homo sapiens
ggcagagtcaacggctcgcccagttatgcctccattttcctctgctgcatggccccaggagagattttaattagctttctaaccttggtccagattgcacatgcaaatggtagaggatgcaacacccccgcttgtggagctgccgcttgtgtctggcatgaaaattcacaagaagagaggaaatactgaggagaaaatggcagattgtgtttgctgaatttgattgacgargaagtcaccatgaaaatcacagtgaaccatttggaaagcaaactgccaaaaaaataatagttagtcatgctctcaggctggttgttttggctgttgtgggkttcttgcatttccagatgattgcaaagagctgtttctcaatttctgcaacaagtgccagctgaaattttggtaccagtttcattaaatatgtagaacaatttgagcctgagtgagttctgtggagcccatactacctgcgattcaagccagcaaccttggaatctccctgaacaatttctatggtgtccaatcacatttgcaatcactccccacactcagactgtgtatttttggctgctctccaagcccttgaggaaaacacttggagtcaatctcatccttttgatgcagtgctgagtaatgagagattttagaagatggaaaaaagaaaaatacattgcactctgaaacattctacataaaaatggaatgtgtggtcattagattaactcaggctttggacctcggggcataaaacccatttcctcttacaccagtctctgaagcttaaaggattcgttatttccagttgcaaatgccatcagaaaaggattgtttttctttctagtaccaccaagaatgtagtttaccattgtgaataaactgtcttaagctttccccgaataaaataaatacaaatgctcctcaacttaaaaaaaaaaaaaaaaaaaaaaaaaaaaaaaaaaaaaaaaaaaactcgag

SEQ ID NO: 2810 - DNA, 1158 bp, Homo sapiens
gatggaactaaaatttattatggtatgttccttaaagaaatggtcaaagggatgggaaggtcaggttgaaatcatatttcttcagactgataaagtgttttcattagagtccctcgttcatacgtgttgtctttgatgtttcttgctgttctactgctgattcttatgcttttcttaatattagtgtatcaccaagtatatatcagtcatggrgagaaaaaaataggtttgatgtaccaagggccttaaaatcacactgacctgatgaatcaaaattcacctcattgccaggacttggacctatatcgatggacacaattggtaacagcttccgaaagtcccacagctttgtaaccccacaggcatcacaggatgctatcatgtgacccctgggatcaaaaatggcatcatgatagaatgcmtgtgaccataaagtgactgctcamatwtaccctaggaagmcaaagcmgaaacagrgtcaaataaatttattacatttcatcattagacagtgctgagctaggrgaatcataggagatgttgtcagaagaaaagcggaggagcagatcatgtaggtcactggaaggacattagcttctatttgaataaaatgaaaatcctttcttgagactggccataggagtgactgatcagagtcacatgttgcaagaatcactctgttttaccatgtcgagattaaactataagagagcagagatgttcttgcatcccatatagacagggtcttgtctgcagagcttgtgagaagagtattggagaaaggaaaaaactcaatgctgttcacagaatctgtatgtccatacaaagtacatctgcatctttcactattaacatcccaaattttgctagttttatccagtgaggaggaagccacaaaattgccgcaggagtgccatgtgcaggaccacactgcgcggctgtgtccttcaaaggtcaaaatgcaatcgcctgtacatagatcccataatttaactgtagtgtcaccacttgaagtagccaatttgtcgccatagagcttccagcccagttgttccacttctgtgtaaattcagctgcaggatacagcctcctgatgtcccgggaaacactcaggtggcaggaggctgcacatgaccccacccacttttgcggcacgag

SEQ ID NO: 2811 - DNA, 754 bp, Homo sapiens
ggcacgagtcgggatcgggagagtccaccacgcctgcctgctcggctgagaatcgccatgccagctaaagggaaaaaaggaaaaggccagggcaagtctcatgggaagaaacagaagaaaccagaagtggacattctcagccccgcggccatgctgaacctctactacatcgcccacaacgtcgctgactgcctgcatctgcgaggcttccattggccgggtgctcccaaaggaaagaaagggagaagcaagtgacagcatttcacaacacatctctgttacagacaacaggacctggggaagagaagtcaggataacacaactgttgccagcaacatagactttactccagacgacttgagatgcaaattaagtgtgcttttctgtgatggtggaagatcaggaaatgcaccttacttcctctgttatgccagatatggttagccactttggttttttaggagctataggatgggaaaagcctgagtaattcctacacagtgtgctgaaattaatagaactttcagaaattattataattctgggtcaggattaaactttgctctcagaaggcagttctagttgcattaattgttttcttttgccaaagagcgtttgtcatttagagaagacacggcaagaaacactgggtttccttaggaacattcctctcttgggcaccatttccttttttttttttaatggaaaataataaatactttgtttctataaaaaaaaaaaaaaaaaaaaaaaa

SEQ ID NO: 2812 - DNA, 2908 bp, Homo sapiens
  misc_feature (1616)..(1616): n equals a,t,g, or c
ggcacgagggcttttaaataaagatgttattcctttaaaatggtgggcttaccatcattgaagatgtcactcaggtggccttgtttgatcaaaacgccttttttaaaaaccaagctttaaaaacatgtttataatttcatgaagtacatatatattgttcccatagtcttcagctttaaaactataaatatgcccaaattttgttatttgccctactttaagtaggtttattgtgtttgttttttcagtacttgtttttctctgataagactcaggaattctgaaatgtgaaattgtctcaattctttctcttgtagcatgaatcaaatgtatttattaatagcacttatgactatagaatataatttggcatatgattcatattacatatgtattcrttttatttttaaaatagtttataaacttaatgatttttttttacaaatgaggttatagatattaatgcaaattttctggtaggtatctctttttttgctatgatgattccaacttatcagagacctcccatttgccttttcattacggtgaaagctttgccctcatctactaaagtacaaaggaattctttggaagcagattattctagtcttatgctagagatgaatttgatcattttaatgtgtgatctttttgctctatcaggtataattgttttcctttcctttataatgcgtaagttttctcacctttgagtaacagtaaagttcatttatatgtccatacctagaagaccagtgcaaatactttgagagcacctgggtctacaggacataattggcatctaaatcctcatttcttgctattagtaggaaaacagatatagtattgtaatacccttattctttttgaatcctaattactcatttcggttttttttctctcttttgaatctagttgctggttttcgtttaatgattttagtttaacaatcccaaccaacaatacatttgatttatttttttctgtctaacctgacaacctttttcttgtgcttcttgtttgttggttagtttttgtgaaaggaatcattgtttaagatcactgttttcatacttgttttacacttcacgtattttgaagtacatttatttactaagcatttgtgacttgaataatttcaccaaatgaatacattttggtagtttgtaatgagttcttctaattgttacactttgcttggtacttaacaataaatatgtaaaggtaaaagaaataattttctgtattctgccaatcttaattttatataataaatcatccatttttttcttaaaawartatggattgactgtttctaaaataccaatctgtggctgtggttttycttttcttcagcatttccagcatccaagtaaacaatagtcccttatagtcctgctacttgatgggtaaatttggttgctgggtttttaagttgcactcacaataaatcgtgcaaagcattgtgcatgccttatttactccatttttaatcctgcatcccagatttatggcagcaacacatatctacaggatacttttatgttgtccaaatattgctgtcagtgcatatgtacttataaaatgtctccactcatgtatatttatagaaatgnatcaaatttctcagactgttaaagtgcagtataaagttgcttaatgcacacttaaaaatgatatataatttctgaatcctatgaaatatgtgttcttttttaattctttgggagttttcttaagttttacatgttttttggtttattgttaatgattttgtttactctttgccaaattttgtcatgtaggttattttacaatagcacctttaaaaaaaatgtatatgctaatttactaagcatattcatgtccatttttatttgatcatctgatttgtgaaataacttgaaatttgtactgtttggtttgtgaaaataatattaccaaatctctgtcattagaatgtgtactttatgttcagaagtgactgtgggtttattcagagccagccattctctcccttgatgcactttgtaaccagctacacatgcttttaggtggcttttccctgatagggtcaagtatatgactataaaacatttttcttgtgaagctattaagttcattagttactcttatttccccttgttgtaactaagtggtgcaggtataagcatatccccagcattcctgtgtgtgtgaatgtgcactgctgatttggactgttcttgagaaaggtgctgtgacatatgtcaatatttgttagctctggggatatctttagaatgcttgagaaagttgctaggtgtgtgccacattggtgcaggtaaatccatgctgttcacagccaagcagcatttgcagagaaaaggagagttttacatagaccccaggaaaaacagtactaacctggttgatggccttggtggtggaattttgtttcagccagaggctactcattatatcagaatgatgttcagtataacactatctgatttttagattggtcgatttctgttgtaatcaagtatttaggatgtaatctttttaaagtcattgctttaatctgaaaagccattagaagggagaggaatcactgttccacaggatatttaaaactcaggagttcaaataacctcacatattgaacataaactgttaacttattccacaactaaattctaacctgatacttatgaattgcaaagtgattgctgcaaactttttctaaggtggctgaagatttaaaatagatcattctaaagggaaatcagtaaaatgtcttgataattggtatccaaatcacttgtgtgcctgagaaaataaaaggtaatattttactttcaaaaaaaaaaaaaaaaaaaaaaaaaaaaaaaaaaaaaaaaaaaaaaaaaaaaaaaaaaaactcgag

SEQ ID NO: 2813 - DNA, 688 bp, Homo sapiens
ggcagaggtcttacttacctacctagcatggtgcctggcaatgttctgcgtggtggtcctctcactggaagctacaggttacggcaggttcaccttcactgggggtccgctgatgaccacggctccgagcacatagtagatggagtgagctatgctgcagagctccatgttgttcactggaattcagacaaataccccagctttgtttaggcagctcatgaaccagatggactggctgtcttgggagtgtttttacagattggtgaacctaattcccaactgcaaaagattactgacactttggattccattaaagaaaagggtaaacaaactcgattcacaaattttgacctattgtctctgcttccaccatcctgggactactggacatatcctggttctcttacagttccacctcttcttgagagtgtcacatggattgttttaaagcaacctataaacatcagctctcaacagctggccaaatttcgcagtctcctgtgcacagcggagggtgaagcagcagcttttctggtgagcaatcaccgcccaccacagcctctaaagggccgcaaagtgagagcctctttccattaaaaattgtcaccaatgaactcccccaaacatggctgtggagagacaacaaaacaaaaccaaagcaccaaaagtcttctggccaaaaaaaaaa

SEQ ID NO: 2814 - DNA, 930 bp, Homo sapiens
  misc_feature (12)..(12): n equals a,t,g, or c
  misc_feature (27)..(27): n equals a,t,g, or c
  misc_feature (57)..(57): n equals a,t,g, or c
  misc_feature (63)..(63): n equals a,t,g, or c
  misc_feature (97)..(97): n equals a,t,g, or c
  misc_feature (925)..(925): n equals a,t,g, or c
gcttttgccccntgatttccgccaagnctcgaaatttaacccttcacttaagggganccaaangctgggagcttccaaccgcggtggcggcccgctnttagaacttagtggatccccccggggctgcaggaatttcggcacggagggataactacccttttggaacatgtcaacagaggaaactttttcctcacttccatcccccgaatttgattgggaacaagtttgtccctcttaggggatcaccccacagagggcctgggtgttatttttcagatggatatggcttggcatacgacttatctaagatcccaaccagtataaaaggatatactttgggagccagaacagctgtgaggtttaagccaatacagaaggaaatgacacctcatgcaggcaggtaccagaaagtaagtcctcagcaggaaaaacacaaacaaaattttgctccatttaatgtcttggtgcctcgatttaagaactacccaaaggacacttactatcccagccctggtgcatacaacccagagaagaagccaccgccaaaaattgcctggccaatgaaatttggatctccagactgggctcaggttccatgtctacagaaaagaaccctaaaagctgagctgtccacagacaaagactttagaaagcatcggaaccgtgtggcctacctaagcctgtattataattgagcggctgtaactaccttcacgtgctcctcttatacacagactctccaggactgaggacagagctgctcttcttcttctacgttactgtggccctcttgtctggcagcctggagcccagggagggacaggggcttatagctgctgtatgagaacataaagactagtgcacagtgctatctccaaaaaaaaaaaaaaaaaaacggcacgagggggggcccggacccaatcgncctaa

SEQ ID NO: 2815 - DNA, 1663 bp, Homo sapiens
tggcacgagctgggccgctcccgggccagcgagggctgcgaaagaagttgtagcatgcataccacagaatcaaaaaatgaacatttggaggatgaaaacttccaaacatctacaactcctcagagtctcattgatcctaataatactgcacatgaagaaactaaaactgtcttatcagatacagaagaaataaaaccacagacaaaaaaggagacatacatttcttgtcctctaagaggagtattgaatgtaattattacaaatggagttatactgtttgtgatatggtgtatgacctggtcaatcttaggctctgaagctctccctggtggaaatttatttgggttgttcattattttttatagtgccattattgggggaaaaattttacaactcattagaatacctttagtgcctccacttccacctcttcttgggatgttactggctggttttacgattaggaatgttccattcatcaatgaacatgtccatgttcctaacacatggtcttcaattttaagaagcattgcccttaccattattctaataagagctgggcttggactcgatccacaggctttgaggcatttgaaggtcgtttgtttcagattggctgtaggtccatgccttatggaggcaagtgcagctgctgttttttcacacttcattatgaaatttccctggcaatgggcatttctattaggttttgttctaggtgctgtctctcctgctgttgttgtcccttacatgatggtgctgcaagaaaatggatatggtgttgaggaaggcattccaaccttattaatggctgctagcagtatggatgacattctggctatcactggattcaatacatgcttgagcatagtcttttcctcaggtggtatacttaataacgccatagcctctataaggaacgtatgtattagtctgctggcaggaattgttttgggattttttgttcgatattttccaagtgaagaccagaaaaaacttacattgaagagaggattccttgttttgactatgtgtgtttctgccgtcttaggcagccaacgtattggtttacatggatctggaggattatgcacactagtgttgagtttcattgcagggacaaaatggtcccaagaaaagatgaaagtccaaaagattattacgactgtatgggatatttttcaaccacttctttttggtttagttggagcagaagtatctgtttcatcgcttgaatcaaatattgttggcatatctgttgccactctaagtttggcattatgtgttcgaattttaaccacatatctattgatgtgctttgctggttttagttttaaggagaaaatatttattgctttagcatggatgcccaaagctacagtacaggctgtgttaggtcctctggctctagaaacagcaagagtctccgcaccccacttggaaccatatgcgaaggatgtgatgacagtagcatttttagccatcttgatcacagctccaaatggagctctacttatgggcattctggggcctaaaatgcttacacgccattatgatccaagcaaaataaaactgcagttgtcaacattagaacatcattaaaaagtttacctgtcaaaaaaaaaaaaaaaaaaaaaaaaaaaaaaaaaaaaaaaaaaaaaaa

SEQ ID NO: 2816 - DNA, 288 bp, Homo sapiens
ggaattcggcacgaggtctttacttttcaccagaggtttgtggcacacacatgtcctgtactactgtatcagattgtgaattccttacatgttaaagactgcttcaaatctgtccggaagtctcggctaataaacatttaaataaatgaacttcaaattcccatgtgccaccactgttttcattctgactactctcaagcctgtagtgtcatctttttgttactgtgaagtagacactcaataaatacttgtcaaatgaaaaaaaaaaaaaaaaaaaaaaaaaaaaaa

SEQ ID NO: 2817 - DNA, 1719 bp, Homo sapiens
ttaatttcttttgtaggaagagcagtttgaactatatggaatccttcaaaattctaagaaagtgtttgccctgttctgtatatattctgccaaaagttgttcctaatagtctagatattgattctttatgtaagtagggtctttttaatcaaaagtgaagtgggaccaaattgttcagtggcttgttctcttctaaattgtttttagctgataagatttgggaaactttctgggcttccacaaataatatacaatacatccttgaatacttgatgcttaaaaagtgttgttactgcatgcaatcagggagctccagagctttttgcaggctccttgttcctgagaagcaatattgttttcatattatctcggttatacattttatggttgtgacattgctttctttttgtttttgctgttgttttctgctgctgctgatttagaaatgaaataagctaactcttaattttaacctgtttgctacctaaaatggtaatcatcttgatgttctttcaagcaggtcccagagatcttaaaatgatccggaatcactgagtccacagttctcttttctcttggttatgtatagatggagagtggtcttggcgttatattagtgtatgattcgtatttgtttcataattaacttcgaagtgaaaaattgatgcgagagcaaaggtttatttggcttccataactatttactaattttatgcttgccagattttaagattaaactgtttgccatctcttgtaatttttcttcccataaaacctttggccatctacagtcacttttcctcaaatcttatgctgtaattcaaactgtatattctttttgctgattgcttctgtacctcttctgcttccagtgttcttttgcaagagtgtccacacagtgggaagaaaacctgaacttgactcatgaagtgctgggcattcaaaacagtgaatccttgcaaaggatcttgggagtagacccctgtgaattggctctttcaatttgtccacttaaagggcgtaatagattatgcagctgtttgggcttcagcagggtattgctccatattcatgcctagttgcaattatgtgaattttcagtttgttacaaagacttccctttgtattcaaaacaattttgttggctttgtgttctaatatttgagttttctctgaggaaaaatagttgcaagattttgaactttgaaaacttcaaattaaaatgtttaaaggttttgtcactttttattttctgatgcaaaccatacattgaaagcatattttaagaagaagtcactctaataagctttaatttcgagtttatgaatcacaggatttttggtagaggtaaaaactatacttacaccgtaaattagacattaaatgccatttaatcagtcagataatgattaatgttagagtaatgtttgatgggccaagctgctaaaacataagcagttctaatttaaatatataaacttatcacgtaaaaatagcaaacttagtaatgtataaagtgacagtaggtcttttttgcttaaaaatcagagttcctgtgtagtgtctctttatgatctctgtagtaaaaatattatttaacgtagcttagtgagaagtttaagaggagtataccttttactttagggtgcccatgccactttgaagttatggagtgcaaagtagtttccacacattaaaaaaaaaaaaaaaacggcacga

SEQ ID NO: 2818 - DNA, 3299 bp, Homo sapiens
gcgttggagctcccggaaagttgccggacccggaacgcaggcggagcgcaagtctgtcagccagtcagtccgccagtccgccagcccagtacctctctctcctcggccctcgtaagctgtccgcggtctgtttggcccgaacggcggcggaggcgctgatcatggcgacattcatctcggtgcagctgaaaaagacctcagaggtggacctggccaagccgctggtgaagttcatccagcagacttacccaagcggcggggaagagcaggcccagtactgccgcgcggcggaggagctcagcaagctgcgccgcgccgcagtcggtcgtccgctggacaagcacgagggcgcgctcgagacgctcctgagatattatgatcagatttgttctattgaacccaaattcccattttctgaaaatcagatctgcttgacatttacctggaaggatgctttcgataaaggttcactttttggaggctctgtaaaactggctcttgcaagcttaggatatgaaaagagctgtgtgttgttcaattgtgcagccttagctagccaaattgcagcagaacagaacctggataatgatgaaggattgaaaatcgctgctaaacattaccagtttgctagtggtgcctttttacatattaaagagacggttttatctgccttaagtcgagagccgaccgtggacatatctccagatactgttgggaccctcagtcttattatgctggcacrggctcaagaagtattttttttaaaagccacaagagataaaatgaaagatgccatcatagctaaattggctaatcaggctgcagattattttggtgatgctttcaaacagtgtcaatacaaagatactctccccaaggaggtgttccctgtcttggctgcaaagcactgtatcatgcaggccaatgctgagtaccatcagtctatcctggcaaaacagcagaagaaatttggagaagaaattgcaaggttacagcatgcagcagaactgattaaaacagtggcatctcgctatgatgaatatgttaatgtgaaggatttttctgacaaaatcaatcgtgcccttrctgcagcaaagaaggataatgacttcatttatcatgatcgagttccagaccttaaagatctagatcctattggcaaagccacacttgtgaaatctaccccggtcaatgtacccatcagtcagaaatttactgatctgtttgagaagatggttcccgtgtcagtacagcagtctttggctgcctataatcagaggaaagccgatttggttaacagatcaattgctcagatgagagaagccaccactttggcaaatggggtgctagcttcccttaatcttccagcagcaattgaagatgtgtctggagacactgtacctcagtctatattgactaaatccagatctgtgattgaacagggaggcatccagactgttgatcagttgattaaagaactgcctgaattactgcaacgaaatagagaaatcctagatgagtcattaaggttgttggatgaagaagaagcaaccgataatgatttaagagcaaaatttaaggaacgttggcaaaggacaccatccaatgaactgtataagcctttaagagcagagggaaccaacttcagaacagttttagataaagctgtgcaggcagatggacaagtgaaagaatgttaccagtctcatcgtgacaccatcgtgcttttgtgtaagccagagcctgagctgaatgctgccatcccttctgctaatccagcaaagaccatgcagggcagtgaggttgtaaatgtcttaaaatccttattgtcaaatcttgatgaagtaaagaaggaaagagagggtctggagaatgacttgaaatctgtgaattttgacatgacaagcaagtttttgacagccctggctcaagatggtgtgataaatgaagaagctctttctgttactgaactagatcgagtctatggaggtcttacaactaaagtccaagaatctctaaagaaacaggagggacttcttaaaaatattcaggtctcacatcaggaattttcaaaaatgaaacaatctaataatgaagctaacttaagagaagaagttttgaagaatttagctactgcatatgacaactttgttgaacttgtagctaatttgaaggaaggcacaaagttttacaatgagttgactgaaatcctggtcaggttccagaacaaatgcagtgatatagtttttgcacggaagacagaaagagatgaactcttaaaggacttgcaacaaagcattgccagagaacctagtgctccttcaattcctacacctgcgtatcagtcctcaccagcaggaggacatgcaccaactcctccaactccagcgccaagaaccatgccgcctactaagccccagcccccagccaggcctccaccacctgtgcttccagcaaatcgagctccttctgctactgctccatctccagtgggggctgggactgctgcgccagctccatcacaaacgcctggctcagctcctcctccacaggcgcagggaccaccctatcccacctatccaggatatcctgggtattgccaaatgcccatgcccatgggctataatccttatgcgtatggccagtataatatgccatatccaccagtgtatcaccagagtcctggacaggctccrtacccgggaccccagcagccttcataccccttccctcagcccccacagcagtcttactatccacagcagtaatatgtctgctcagcagctcagctgattcagatcagagggaaagaaataccaaccctgcaataagtgtactaaactctacgctctggttaatgtaatgtactctcctggactgaatgcagtgtataatttctgtctacagctagaagctgtgccccagttccacatttgattacacatgtgagatttgctgctgttgcagtataaacactaggtataataggatttgaaattgcattacagttcataaaaattgaaaatgagaaattaaacctgcaagtgaaacatttgaaacgattatactttctacataagacatggttgggacatcagatacttacaaagatggtttaagtatggatactagagaaaattaagttttctttctctttggtttattgatttggtttaatttccattatgctattttgcataatcaaggcactgtaaatcttataattttaaaataaattacttaagaacaaaaaaaaaaaaaaaaaaaaaaaaaaaaaaaaaaaaaaaaaaaaaaaaagg

SEQ ID NO: 2819 - DNA, 1633 bp, Homo sapiens
  misc_feature (22)..(22): n equals a,t,g, or c
  misc_feature (38)..(38): n equals a,t,g, or c
tgggctttatcgaattatggcnctttgacccctctaantcagactcacgcyaatgtcttaatggagagtgaaataactaagaggagttacagcaagcttgtccggcctacagcccacatgcaacccaggaaggctttgaatgtaacccaacacaaatttgtaaacattcttaaaacattatgagatttttttgtgtgatttttgttttttagctcatcagctattgttagtgttagtatattttatgtgtggcccaagmcaattcttctaccagtgtggcccagggaagccaaaagattggmcacctctgagttatagtgttgagccttaagatcaatcttatgatttcacctttccaatttttttattccaatggcttgtggataatataagcattcatttgcaaaaacaatactgagtactagtatatgattagtatcagccctcttccaaaagacaaagagagataagtagctagccatgcaggtctgtaaaaagttgacagtgatggtatcaaatatggagtcaaatctgggttttcattttaggtgttacttttgagaaatgcagattactgtaggcattgaacattatagcctagtcttgctgcttgaatttcctaacttactatctggcccaactgcttcctctcctaacacccctctccacaaccttctaggttttcaaggacattagtaacaatgacttttgtcattaataaaagctgtaaaaagggacatctatacaattgagaaacaacagagaggaaaggaagctacttttaggaacctatatgtggcctactcattactggcccagtttcttcaaggaaagcttactccattctaagggtgaagattttagtcaagagcttgattagtgtttgacactttgatagaaaaagcagagtggtgactgcttatttattcaaagttttcktttcccaacaacgttcacatctgtgggtcataagcatgaagatgcccagcataggttattatcgaaagaagaggcccccttcmcaaacctgcccagttattacatatgctacctgttcatttaccatagaaagatgtaccmayttttccagaattatttkgaaaaaataaytgctaattttggacacttaataaaatggaaagtaccactgagataagtttaataccagaataaatgcatattatactygaatgcttacaatatgagaatatagcaacagcctgttttgccttaccaggacatcaagaatctgatcagtttcacaccttttactggcakatagtaatagaggatggaaagataaggtctcaaatactgtgatctggccaggcacagtggctcatatctgaatcccagcactttgggaggctggggcggacagatcacctgaagctggcagatcgcctgaggccaagagttcaagaccagcctagccaacatgatgaaaccctgtctctactaataatacaaaaaattagccgagcatggtggcacacgcctgtaatcccagctactcaagaggctaaggcaggagaatcgcttgaacccgggaggcagaggttgcagtgagccgagatcgcgtcattgcactgcagcctgggcgacaagagcaaaactccatctcaaaaaaaaa

SEQ ID NO: 2820 - DNA, 890 bp, Homo sapiens
ggcacaggaaatgaggcatctgttgttggcttccctgtggagtttgtgtccctccctgagctcccgcctctgtggggccagccccagtgtggacttgtggccccctgtgctgctgggcctcaggtttgggtctgcggagtacatgggtgtgagtgctctgaccactggactcttaaaacatgcagccctctttgactgtgacactggacatgtgcaaagcttggggactgatcaaaaagtataaagaggccattgaaaaagaccttgactcctgcacccagaggtagcaccaagaacatggcatgcatttcatctccacgtctcccttctctcctttcctcccctgttcattcattcagccaatctatcagccaaccagtaagcactcacggacacccacgtgcgcaggtgccatggaggcagccgagtgtggggactgctgtggcaaagctggcagccttgtgtgcttcctgcacttgtgacattttattgcagccagtgcctgtgccattaagcattccttgaaaataaaatcttttttggctgtacgatgtttcttcgtgtagacataccaaaagtaaactcttggccggctgcggtggctcatgcctgtaaccctagcactttgggaggctgagacgggtggattgcctgagctcaggagttcggaccagcctgggcaacacggtgaaaccccgtctctactaaaatacaaaaaattagttgggcgtggtggtgtgtgcctgtagtcccacctactcaggaggctgaggcaggagaatcgcttgaacccgggagacaaaggttgctgtgagcctagatcacaccattgcactccagcctgggcgacagcgaactccgtctccaaaaaaaaaaaaaaaaaactcgag

SEQ ID NO: 2821 - DNA, 1074 bp, Homo sapiens
gatttaagaatcatcattctaggttatrtacctgggagtggaattactgtgatatatagggtatgtatatctcaatttctaatgtaacagggtttcagagatcctcttcacattcttgccaaaactttggagtattattttgccagcctaatcagcttgaaaagttatctcattgttttaatttgcatgtttctgatttccagtgaggttatgcatgtattcttaacatttattggcctttcaggaactttctgtgagttacctgttacattcctttgctgaatatttaatcgtttgttttttcatatttatttatagggattattttaaaattctgcatatgaatcctttctgttgtttagcaaatatctttgcccagtggatgacttaccttttaactttgttcctgatgtcttttgttgagcaaaagtctttcattttaatgttatcagattatcggtattttattcaatggtttgtgctttttgaatcattttaaggagatccttccctacaaatcaataagaaaaatacaaacaacacaataaaaataaaagtgtttataaaaacagacataacrggcagttcacrgaggcaaaaacaccagtggcctatagacttaagaaatctcattagtawtcaataaatgcmaaataaatctatactatgatatatacatttagtacttagaatgctggcatatatttaaaggcctgacaatgccaastattggtgaacatacgaaacaataagaactctatgtaacctcagcactttgggaggccgaggccagcagatcacctgaggtcaggagttcgagaccagcctggccaatgtggcaaaaccccgtctctactaaaaatactaaaaattagccgagtttgatggcacacacttgtaatcgcagctgctcaggaggctgaggcatgagaatctcttgaacccaggaggtggaggttgcagtgacccaagatcatgccactgcactccaacactccagcctgggtgacagagcgagactctgtctcaaaaaaaaaaaaaaaaaaaaaaaaagaaaaaaaaaaaaaaaaaaaa

SEQ ID NO: 2822 - DNA, 631 bp, Homo sapiens
ggcacgagagaatgagcagagcagcatctaacaaaggacggggtcccctctcagcttctctgtcttcacaagtgaatgtcacacattttaaactagaactctttctacttatttagcacctaacagatgctacgagagttctggttactttttcttttctgtttgggtcgggagcacatgtctaagtgtgacaaatgtgagcagattatttggagaggtgaggaaatacaggaaagaggggggccagtcttttctctcttttggaaaaataatcatttttcgtagaaaccagatactttcataatactctttttttttaaagaaatgttttaacatgaaaaaaatttcaaagatacatacaagtagagataatagtgtaataagtccccatgtactttttgtccagctttaacaattagcagcatgtggcctgattttgttttacacatatcctctctcctgtattattttggagcaaatttgatacgttatttctttctttctttctttttttttttccttagacagggtcttgctctgtcacccaggctggagtgcagtgagccaagatcgcaccacttcagcttgggcaacaaagcaagattctatctcaaaaaaaaaaaaaaaaaaa

SEQ ID NO: 2823 - DNA, 1104 bp, Homo sapiens
tgcaggaattcggcacgagcttcacatttttctattccactcccagcccaaaaatactaaaaacagaaagaacaaagtccatacaaagagtatttcatgaaaaatttaacccacttttttctttcgctttcttccctctcctcttttctttttcttgtctcctcttctttctcacgcagggcagggccgggccagggttagcgggccagggtaaggtcggagctgctccaacttctggtgtgtacttgttagtctttatgatattcttgtagattcaatcatgaaacatgagtttgatgctggtgtgattgtaggtggtcttgcagtcaggtgaacagttgctcccaaagagaactgacggctcagcctcagcctggaggggatgtagacctctcgtgacataactcagtgctgggagggaagtcaacagagtgaatcaaggacagaaccaacactcaaaatgatggcaagagttgcagccaaagccagccagatgacacaccaacaaaatacagtaaagcccataaaggtcagtccttggcttcagagaaaaccatagtgggcagtgatgcatttggaaaatatctggaaaccttgcctgctggcagacactgtgggttatctatgggatccagctgctaactccatcaatgtgaccttacacttcattaatggaagtgtctacctaactggatgtaacagcctcctcactaacttatatttacagtgctgcccctgagtcagcagtaaaagttcaaattatattcagaatcttctgcttaataaattagaaaagtgctggccaggcgcggtggctcatgcctgtaatcccagcactttgggaggccgaggctggtggatcacttgaggtcgggggttcgagaccagcctggccgacatggtgaaaccccgtctctgctagggatacaagggttggctgggcgtggtggcgggcacctgtggtcccagctactcgggaggctgaggcaggagaattgctcaaacccaggaggtggaggttgcagtgagtcgagatcgcgccactgcactccagcctgttgatacagcgagactccatctcaaaaaaaaaaaaaaaaaactcga

SEQ ID NO: 2824 - DNA, 1803 bp, Homo sapiens
gccgattcattaatgcagcttggcacgacaggtttgccgactggaaagcggacagtgagcgcaacgcaattaatgtgagttagctcactcattaggcaccgcaggctttacactttatgcttccggctcgtatgttgtgtggaattgtgagcggatacaatttcacacaggaaacagctatgaccatgattacgccaagctcgaaattaaccctcactaaagggaacaaaagctggagctccaccgcggtggcggccgctctagaactagtggatcccccgggctgcaggtgcgccgcaactacagccgcgaacagcacggcgtggccgcctcctgcctcgaagacctgaggagcaaggcctgtgacattctggccattgataagtccctgacaccagtcaccctggtcctggcagaggatggcaccatagtggatgatgacgattactttctgtgtctaccttccaatactaagtttgtggcattggctagtaatgagaaatgggcatacaacaattcagatggaggtacagcttggatttcccaagagtcctttgatgtagatgaaacagacagcggggcagggttgaagtggaagaatgtggccaggcagctgaaagaagatctgtccagcatcatcctcctatcagaggaggacctccagatgcttgttgacgctccctgctcagacctggctcaggaactacgtcagagttgtgccaccgtccagcggctgcagcacacactccaacaggtgcttgaccaaagagaggaagtgcgtcagtccaagcagctcctgcagctgtacctccaggctttggagaaagagggcagcctcttgtcaaagcaggaagagtccaaagctgcctttggtgaggaggtggatgcagtagacacgggtatcagcagagagacctcctcggacgttgcgctggcgagccacatccttactgcactgagggagaagcaggctccagagctgagcttatctagtcaggatttggagttggttaccaaggaagaccccaaagcactggctgttgccttgaactgggacataaagaagacggagactgttcaggaggcctgtgagcgggagctcgccctgcgcctgcagcagacgcagagcttgcattctctccggagcatctcagcaagcaaggcctcaccacctggtgacctgcagaatcctaagcgagccagacaggatcccacatagcagcagcgggaagtgtgccaaggaagctctgtggcgttgtgttattggtagacaccctcagcctcatcatttgactacctatgtactactctaccccctgccttagagcaccttccagagaagctattccaggtctcaacatacgccgttccaccaattttttttttagccccaccagcttcaggacttctgccaattttgaatgatatagctgcaccaacaatatcccgcctcctctaattacatatgatgttctctgttcaaaagtaattggcagtgattggccgggcgcggtggctcacgcctgtaatcccagcactgggaggccgaggggggcggatcgtgaagtcaggagatcgagaccatcctggctaacatggtgaaaccctgtctctactaaaaatacaaaaaaaattagccagccatggtggcgggcgcctgtaatcccagctacttgggaggctgaggcaggagaatggcatgaacctgggaggcagagcttgcagtgagctgagattgcgccactgcactccagcctgggcaacagagcgagactccgtctcaaaaaaaaaaaaaaaaaaaaa

SEQ ID NO: 2825 - DNA, 1610 bp, Homo sapiens
gatttatcaaggtaatgccactttgatgtgtcttggttaggaatctttgttcacttgagggaatacatggtatatgataggaacagtaagcacagaatagagatgggaaagggagaaccctgtcataacagttaacatttcatatttgccaaacatgaatggcttatgcatattaacacatttaattctctcaaccattttatgacgtctgaggccactgaagcagctagaggttaaaccacttccctaaagtcattagtaagtggcagagccaggattaaaaatttaagtccttaactactttgccatcctgccacactctgcacatgcagacaagagtaagagccttaatcttgggaaaagatatttcacaagatctttgacaatttccatatccacagacaccatccagcttattagtgaccaccactcctatttgttactttctcctttaaggctgcccctacctgaactctggatcccagtaccatcactttctcaaggacctcccttctccagtgttgccctctcttgactcccctaccagcatctaaacatgctcagatctattgcatcttaagtcctctcctaactccacattcctttctacctactgccctagcttttccacttcacaactagaataccctcattgtatccaccttgggcctcctatttactcagtacatctggttcttaccaagatcactgataaccttcttgatactgtttaatagatccttttcaaccctcatcttatttgctcaatctttggcatttggcactgttgaccatcttgtctccttgaagcttccataatagcatatttaaaatttttctgtcttttcttctatcctcagcttcctttgggagctctccctccttcttctgtatgtccgttaaatgttgctgctcttcagtcttatgtcgcaggcccttaaatcttctcactgaaccaccttcctgtggcctcagttaccatccattgagctctgtgccgttggccgctagttcaacagtcaaaatgaaccaattatcttaaccccatacttcctcttcctataaaatctgtcctaggaaatttcacctctttgccaggccagaaatcagggcataatattaataaaatagttagcacatattgkgtactttcttcaatgccaggcactcttctaaccactttatatgtattagctcatcagactcagcctgataatatgagatgagtcctgtcattatccacatattagataacaaatctgagacatagaaaagtaatctgccttaggkcattcaactgataaaggatagagttgggatttgaatgagggcactctggtttgagcttgtaatcattatatcataaaggacatgatgcttgacttctctttctctcaccctaattcaacctattgccaagtattgtacattctccatgcttaaaatctctaggcggtgtccctgaagtataaatccaaagccttcatgcctgtggtccgagtgctttgggaggccaaggcaggaggactgcttgagcccaggagtttgagaccagcctggacaacaaagtgagattcatctctacaaaaaaaaaaaaaaaacggcacgag

SEQ ID NO: 2826 - DNA, 1228 bp, Homo sapiens
  misc_feature (636)..(636): n equals a,t,g, or c
ggcacaggagatttttactttaaaaagcttctctcttaatctgggttttatattaaggggctcctcttattttacttctttgttcattgcactataaatatgaatataatgagagatctagtcttaaaaattgtatttttttacaacttcttaggcataacttgtttcacagttgctggaacaaacctcatcaacccagtttttgaacagtagaatattctctttgagaaaaagataggtaattagcattttgttctttctcatgtcattttccttggaaactatactgccttccttctccagttttcccaaatcagagaacaaaagaaggagggttgctgaaatgaaccttgttctttctggctgtcttcttacccattcctcagtgctgaactttttggggtgagagtgggggaatagggttggcagttgtctgccacggccccttacttgtttctggggaagacattcgaggtactcaccaagagatagagtgaagatggaattctttttagaagggaatacagttgacccaggaacagtgcgggggtgtggttagaagcactgaccttcttccctctgcagtcgaaaatcctcacgtgactttttttttttaaggctctgtcgcccaggccngagtgcagtggtgaaatcatagcttgctgcagcctctattgcccgggccaaagcaatcttcccacctcagcctcctctagctgggacaacaggtgttcacccttcctggctaagttttttgatttttagtagagatggagaatttcccaggatggtctcaaacttctaagcttaagcaatcctcctgcctcagcctcccaaggtgctgggattacaggcatgagccactatgcccggccactgtataactttgattctccaaaaatttaactactaatagtctactgttgaccagaagccttaccaataaaataagttgattaacacatttttaaaatatgtattattactgtgttcttacaatcaagtaagctagagaaaggaaaatgttatgatgaaaatcataaaaaaaaaaaaaagcccggcatggtggtgtgtgcctgtagtcttctgttactcaggaggctgaggtgagaggattgcttgagtccagaaattcaggctgtagtgagctatgatcgtgccgctgtactgcacccctggtgacagagcaagaccttgtctcttgaaaaaaaaaaaaaaaaaactcgag

SEQ ID NO: 2827 - DNA, 787 bp, Homo sapiens
  misc_feature (293)..(293): n equals a,t,g, or c
gaattcggcacgagctgaaacacattttttccctaaagcctcaagctccttcatacctctgtccccattcactcctctccccagaaccttacccacgttgaagggaaatggggaaggagagaggaragtttaccatattctgtgactattttataccaaaattatgccatgctttctaagcaaaattatgatatcctttataagatatcagttgtttcttcactwaataaaaataattttacactggctcattctaatattttgctggtccagccacttccctggtagtcatngaccccactctgscccagccaaggtyaaagtaggcaacctctggcyttggaaacagagccaggtcacttggcccacattkgagatggaacccatggccttgcctatgcatctctgatctcccagaaaacttttcttctagagatccaggactgagtgattcaggcaaccattacatgatgagaaatgtctctaaatccatctcatccccaagtatgttttcctaggctccaacatggcaataccctgcagtcctacagcaatcaagttagctttcatttcacgtgaaatagatgtgcgagtatctttttacataacggggaatacctccttatcattaaaaatattccactaccggctgggcccggtggctcacgccagtaatcccagcactttgggaggccgaggcgggcggatcacgatgtcaggagatcgataccacggtgaaaccctgtctctactaaaactaccaaaaaaaaaaaaaaaaaactcgtag

SEQ ID NO: 2828 - DNA, 1131 bp, Homo sapiens
gcaggatcacagctcacggcagcctcaacctccctggctcaagcgatccctcccctcagcctcctgagtagctgagactacaggtgagtgccaccacactcagctaatttttaaattttttgtagacagggtctccctatgttgcccaggctggtcttgaactcctagactcaagtgatcctcctgtcttggcctcccaaagtgctgagattacaggtgtgagccactgtgcccagcagtttcccagaatatatttaaatgcaaagttacatgaggggaaaacatgtatgtttgctcctgttgttactgggtaggttctgaacagcagaaacccatgtgcagggtgggctggtgaaggcccctctccgcaaggtggtagcaggaaaaggtccttgacttgatgaatttggtctgcctctgagccactggaggaagctgttttgagccagggttttttggcctaaagccagcatttcctcagtctccctttgtggttcgaaggatatggactattgcaatacatttcttccttcaaatcctgccactgttttgttggcccacaactaataggacctcaaaataagccatgctgctttgcacacacactagccttcttttgtacttttcattctggatgggcttggccaaaacaggctcaggccaaagacctcccaagctgtatgtacttccagtatcctgaaacagtgtttggtgacataatgccaagggtaaacaagcctgatttaggcactgctttatccaggggcttcacccatgaaattaataaaacttatctgagtcacttgaaacttggttcccagaaaacacatttctggtttataatctccttttatgctcacctgacattaattatctatccttgatgatgtgtttaaactgagtagcagaaaacagaggccacactttctgggaaattttaaaggaagaaaccatttttaatgagatgaaaatatttaacgaatttaaaaagctaatgacaattttgagaaaaggtttgggatgtatattgctatgtaatttaataaactgattttatggatataaaaaaaaaaaaaaaaaaaaaaaaaaaaaaaaaaaaaaaaaaaaaaaaaaaaaaaaaaaaaaaggtgc

SEQ ID NO: 2829 - DNA, 1133 bp, Homo sapiens
ggcacgagtgagtttcgaggctttgtatttgttctgtaaacaggcatataagacatgatggagttagtcctaatggcctctgaggtaagtggacaatctgctcaaatcctagcctccttcctggcactggtctctttataaatagggaatttgtagtggtgtagcagtagaatttgagaggcatatgagttggggctgtgctgctagaaacacagagttctgtctgccctttagtcagttttaaagagataatgttttgagacaaagggaggggcagttgtaataagctttatcatgaatctctttgggacctttcaagtcctatctcaccttggctggtgagagccccttggagccggctctactctttggtgtattctgacatatcccattattcttcaagcatttccttaaatttggtacggtaaacattccaggtttatcttgtgttttctccaccccagccatggcattagcatgtttcttaagagccgtgtcttctttaagtggaaaatggtatttaaaaatcaagctctgggtgctaagtgtagtacttcttgcttccggagagtcagtagttctactgggttctttcagctgatagaaatcgatctgtatgtgttatacacacatgcatccatagacttatctatatttagagctgtatatatgttgaagaccgtgaaatcaaactgatacttctaattctatccaaacaccaaagaatttactctagccttcttcctttccatattatgtatataactttcatcatcaatgagaaaccttactgccataatctttaagatatttacttaaatctcccctgtagggctgggtgtggtggctcatgcctgtaatcccagcactttgggaggccgaggtggttggatcacctgaggtcaggagttcaaaaccagcctggccaacatggtgaaaccctgtctctactaaaaatacaaaaattagctgggcatggtggaatgcatctgtaatcctagctacttaggaggctgaggcaggagaatcgcttgaacctggatggcggaggttgcagtgagccgagatcatgccactgcactccagcctggggacagagcaagactgtgtctcaaaaaaaaaaaaaaaaaaaa

SEQ ID NO: 2830 - DNA, 962 bp, Homo sapiens
  misc_feature (9)..(9): n equals a,t,g, or c
  misc_feature (13)..(13): n equals a,t,g, or c
  misc_feature (28)..(28): n equals a,t,g, or c
  misc_feature (41)..(41): n equals a,t,g, or c
cgggccatnaatnttaaaccccccctanagggcaattgggnccgggccccccccgarttttttttttttttttttgattgaacagaatttattggctgtctttgagtgtctttggtatggctttggcagggctgtctgggttcctccgctttgcttgtttttgggctgctgctgcagcctttaaggctcttcttcgcttcttcagcttttgagtctcctggaaaacccgaatgcacagagccttcttggtcacgaatcggcggtgggctcttcggtaatacagaggggggaaggtgtactcaattcccagcccccagcatatcttctcaaagacatcatagttggtgttacggaggtttttgagcatctttttcctctggtcaatgctcattagcagatagcgtttgtgggctttgtcctttcgatgtttctccaagtgttcttcataactgcggatcttgacagacaaggcaataattcgagcctccagggatctggtgtcctctgggtttgcaacaatcttcttcataaactgttcttgcttgatttttagcatctccttcttgttggccatttccaaagacaagagtcttttcacgacatcatcaaccttctcaattccagggacattctggtagtctttgagcagcgtagaaggaggtgggtcatcatccagcctagactgggctggtttccggacgacatatccgcgcgcggcctggaggaggagacttcgaggctgcaggccccactggttgaaaggaaacttggcgctcccaccgcccggcagcccgggtactaggacctgggtaactgcccgggtccgaatcaaactcagcgtcctccacgcgaccctcagcatggtgacctctaacccccgcggggccgcgccgcggccgccgttcgctttgcggcacggaccgggttacatgggcgccgccatgctggcccaggmtcgtgcc

SEQ ID NO: 2831 - DNA, 950 bp, Homo sapiens
gggctgcctgagcaggaaagcaggtaaaggaccaggggagaaacacctggggatgatgagaaaatcattttatgatacataagtgtgccagaaccaataaaatcggccctagtcacatttaagttactacgagtctgcttgaatataaacacagattttagcatagagttggaaggaatttttactttctagttaagagcatcctgctccagcagagtgaaatccatacggttatgcctttgataatattgtgtaaagcgattcattctgatgtcactcattttgtttcttttaataaacataaggtgggacttatctttggtactttctcagaggtagaaaggatgttttctttttttttttaattccacttcagaatgacaggccttgtattagttaatgtatatattttcactcttaaaatacatagtaagtacaaataaatacaattttctttgacctgaagagggagattgagttatatttcaagtcccctgtaaataaagatgccttggaaattatcatagtattttaaatagttaggacctaatgcttaatgaatgacaacatttacaagttgcaatatttcttcaggatgctaaaatcagtgctaaagtgaatcatttatttaagtaaaatgcattgagtatctccaggtttcctgttacgtgggaagatgttgtatttaaatgcattcctatcattttagcctctgaaagcacccatgaggacagaaacgtggaacacatggctgaagtgcacatagatattaggaagctcctacagtttcttgctggacaacaagtaaatcccacaaaggccttatgcagtgagtgtgcttctctgttttgtttttcatattctttcatattctaaatactgcagtcaactctagtctaacagattgcatatagtctcataaatccaaaaaaaaaaaaaaaaaactcgag

SEQ ID NO: 2832 - DNA, 1325 bp, Homo sapiens
gagacaaaatgaaatgcaaacatgctttgaaagagcacagtcttgtcctgtccctctgcatcccctctcctcatttctaatgaaaaaaatagtcttccctttccctggttccttcaacagtctcttccttaggttatttttttcctctctcctttcctactccatccagacttccccctgcctaatcttaaagagatgaattggaagaatatgcagtcgtgtcagaaggatgccattgtcagttcacacaggcagacactaataggataaagtattatctgacttcctttaagtccagaaattaagtcttcttgcaatggcaatagattataacttataaccactgtggctggcaggctgcagaaacaggctgttagtatctgaggcctcagctccatttctgggcctattgtgagggatgcactcagcattcctccaaacacagctgcatgatccagggaactggcacttggctcctggatggaactgcctctgtggagagctgcctataactcattcagttcacctgccgtgggagaagctgtctgaatggtcttaatgaacctggatgagtgggcaggtaaagggaggaagccagggtcttgaagactgggaagaagtagcccgaggcaaggaaaccaaactttgcacagggaacacttagtgtgtgaaagctcttctcagtcatccttgctgactcattgagcaggtagtaacttatctagtgactaaatcagcaccagcttagagacacagggaaatgagggttgagaccttaaaggaactgtaaaagagactacaaattaaggagttgccctggagaggaaatatcatgagaaatgttaggaagaaagagccatcattcttcaaaatggagggcctcatgcaggatttcctaggtcctgttatggcagatgagtgtactcaaatggggaatatgggacaggaaacctgatacaataattaattgaagggtatttttttattagtggggctataagaaggtaggtgggggctgggtacagtggctgacgcctgtaatcccagcactttgtgagcccaaggtgggcggcggattgcctgaggtcgggagtttcagaccagcctggccagcatggtgaaaccccgtgtctactaaaaatacaaaaattagccaggcgtggtggtgcgcacctgtaatcccagcaactcgggaagtgacgccaggagaatcgcttgaacccgggaggcggaggttgcagtgagccgagatcacaccactgcactccagcctgggcaacagagcaagactctctctcaaaaaaaaaaaaaaaaaaaaaaaaaaa

SEQ ID NO: 2833 - DNA, 2301 bp, Homo sapiens
gatttatgtaaaatgcgaaggcagccgctagccctacgctctctcctgtgtaccctgcccctggtcccaggtgtggccatctatctggtagggcccaggcctctgtcctcccggaaggcttcagtcctgagttctgccctttgctgacttctcaccttatcctctttccaagtctctcttctcttctctcctaaatttccttctcttttctcctccaaactcctcgccctgtgtttgctccaaaatacataaaacaaaaggtatgtggaaaaaagaatcagtagacttaaaggtagaaaattagagatttctctattgccgcaagtcacaagagttgtgagtcctgttaggatggagtgtgtcattttcatcacatcacattgataaatatgtctaggggctgataagccagtagggcatctaatttatgtaattttgatactatcttatatcttgtctggttgttacattcagtttcagtgaaaaaaaattgactttttttctttttctgtctttgaggggaggttgacaggaagggtccttgctaaaaggggagtcctggtactgaggtcagttgtgggtgtttatttgggggcagatgctgtcgctggggggttgtgatgcttccacctatgaaccgaccctggtctcctggtgactggagtgtgagtgattatgtcttcgtttctaggatcactataagaatagtagaattgtcctatccagagaattctgcagatgttcatgttccagttaatagaggtttgctttgaactggtgccttcgggagaagctttccagaaggagggagttttgtgcagtcttttgcctcgcaggcattactagataattgtggtgaagggagactgtatctgagccaatgttgctgcctgtcatggctaataaatgacaataaggaaaccatctttcactgaaccgttggtagaaggactacatttaaaaggcagaatttgtgagtgaaatgataggaactccatttccctgacacattttctgctttcttcccttttactcttttagcagtctgtccttaaagacttctgaagcctgacaagacccagcagtgaaagtgatctaatatattagccatcttttcctaaattaaaaatgaagcaaaataagagaacaagcatacaagctgagctcatgaatacaaatgtaggcttgcaagcccggtgagctgaagttcctgtggccctggtgtaatttttgatcttccaatgtctgtatctacctgaggattaaaaatatttaggttgttgcaaaagggcctgaggaatgcagggagggagttttctcattggcgaggctgataagaagttttaatatttatagttcacttttgttgttgttgttaaagtaaagccactctaaaaatggtagtttctacaaatcattagccaggaagcctgtctaaagctccagggaaggaccagaactcaaggtgggggtgctttgcaagctctcttgtcagggaaccgtgatgactagagttatggattactggctgtagaggtgccggcaaaataaccctgggcccaggagtcacatttagagcagggtgccccagaattgttctggagatacctttagctagctcgacttttatttcggaactgttggaagaatctaaagccatttcatcgtgagggtatatgaatctcaaatagttactgagtacctaccaggtattgggttctctgatggctcttgggtgagagttagaacagagtggatagctagatattagacaagttccttagatgaagcccaaacttgccacccgcatcctgagccgtgcaggtgccacctgtactttattttctgtgtgattgggttgtctattattttgtgtctgtatccattggagtaagaccctggggagagggcagggaccagacacgaagtccgcaggagctgggttcttaccctgattccaaggccgaagactttaaaaaattctacaagtcctggccgggtgtggtggctcacacttgtaatcccagcactttgggaggccgaggcaggtggatcacctgaggttgggagttcgtgacccgcctgaccaacatggagaaaccctgcctctactaaaaacacaaaattagccaggtgtggtgtcgtgtgcctgtaatcccagctactcaggagactgaggcaggagaattgcttgaacccgggaggtggaggttgcggtgagccaagatcgcgccattgcactctagcctgagcaacaagagcaaaactctgtctcaaaaaaaaaaaaaaaaaaaaaaaaaa

SEQ ID NO: 2834 - DNA, 2057 bp, Homo sapiens
ggcacgagcagggaagtacagtcctttctatgtgtctgcaaggaggactcacatctttggtgagcagcactgatgcctgctgcaacctggcatcccctttcctgtctcctttctttcctggtctgtgcagtagtagggtgtattagtccatttttgcactgcaataaaggcatacctgagattgggtaatttataaagaaaagaggtttaattggcttatggttctgcaggctgtacaggtttctgcttctggagaggcctcaggaaacttacaatcatggcagaaggtgaaggggaaacaggcacatctccacatggctggcaagaaaagggaagagcaaagggagaggtgctacacacttttaaacaaccagatctcatgagaactctatcatgagaacagtaagggggaagtctgcccccatgattcagtcgccttccaccaggcccctcctccaacactggggatttgggtggggacacagagccaaaccatatcataggggataggatccttcttatctggtttctttgctaccgtaattaatccatccttataggttcaattctaaaccctgaagacattagtatttcccattgcccttgggatacaaactatttcccttggaccataaggctctctccttatcagacaccaccctcccatgtatgccagcctctctcatactccaggaggtaaaaagctctcacttctgcctggaataatcatgacccctggccacccctctcagttgccaggccactctctctggcctttgaaactgtactcgcatgtcctggcctatccacccaaactaaagcatgcactgcctgttcctttcctttgaccacttatcacaatttatttatttatttatttttgtacatttgcttaatgtctttttccctccctggactgttggttcaccgtggttttcgcagggcctggtgcatagcaggggctcagtcatattttttggatgaatgaacaaaccctgaagatgctacatctgactctatatcttcattttatccttttcgtatttcctattacctctaatttctcttccctgcacccatttctatttatttcatcccagtttacctcctgctgccagattaattttcctaatgcacaggctctatcatatcatgagtttctcattgctacatatgactaatttgccaatatttttgcacatcagaatgtgtatcactttgaggctggttctgtgtttgttttagtttaggaaaagctgttcagattgtctgtaaatccgtatggggatctttgcataggattttaaagcagccacacatcttgtacaaaatgtataagattaattttctatgttaggaccatttgttttcaccaattccatagagctccaatgtgtaaaagaagacactgatctaactcttgtgttaaatatttagtaactcatttatctggaagaaagcaaaacaaaacaaaaatacaaggaataaaaatcactgggagtgcttttcattcactgaataatgagttttgcaaggagcacgtggatggtgacattatatcttttacatctttattttctgtttcttttttgactccttatcagtgaatttatcttattttatacttttactttctatttctttcttgactctttgttggtgaattggtagcaagagacttactgtctgatcagaactttgaatcttcctgcctctctttctttgaggttgacagggataaagataattaagatagcgcttgggtgtgatgacactggaagacaggctgggtcagggcctgtagtagagacttcccccctctattgaatgttaatctgaaagtgaatctgaaagcagatggtcatgaactacccagggtctccattaagcccatgaagtttattttaaaactcttaaaatagattgagattcaaattgagattcatgtctattttttaaacattgtgtcttaacaaagtagatgttcagtcatacagttaggcaaatgttctaaggaaagatgtttaccatgctaagttaaaaaaaaaaaaaaaaaa

SEQ ID NO: 2835 - DNA, 1927 bp, Homo sapiens
ggcacgagtctttacctgggtgatctatcattgcgcactctatgtccatgtgcagacattatttagctcccactttaagtgagcacatgctgtatttatctttccgtgtctgactactgatcacaagcctttagaagcccctattgcctatagaaaacaatccaaactccaccttagtctgatagtaaaggttccttatgctaaaacctcagtttaactttctagcatactctcctatttctctccttctacactgtcccaaaatagattattcattattttgctttcaatgtttcccatgcttttctgtgttcttggtcatttaatgcacttttcccgtgcttcatgctttccatctgtcagaattccatagctttcaaggccccttcaaatgtccctggtctcttcctctgcccctccctacccccaacaagcggtgtgtatacacatagtcccctggtggtgtgtgatcctctgtccagtacgtcggttctggtctggcttctgtcttttgcagacacacctcactatgcagtcacgaggcccttgaggacaggaaccatctctttcttcgaatgcacctttcccagtaggcacacggctgttattgaataaacacagatcctggacacttgctcaaattgacaaaatttgcaggagattcaaagtggaaacattttactgaagggaattcggcaaatacatcttgattcttgtataggtggtcagtttgtaaaggatcatcaagtattttgaagactcattggctctgccagtggcttagataaataaatttgggcaagttattgatctctctcctcagagaaaaaaattgatgtgttttcttttatataaagagaaaaagaaaaagaaaaaatgtgatctgtaactcattatgtttccttgctagaaagctcaaagatatgttatttgcctgtttttagttgctatccagttttcttacaataatctctctgcctcagtctcctcatcggattacttgtcacatgtgttaaatccttcttttaattgatggttctgttgtatatatcttttatatttatataggtagcctcaactctcctttttttggagagtggtaatagaaatataaataataaatagttgccctttggtttccccaacctgtggtgacaacaagataataaaacagatacttatcctatataaaacaggcaaaaaggctttgggacaatatgggaatcatgatgtgggtttggtggaaagcgagcaaagcaccttgtaaggatcttgtagtctgaagattaaggtgtgcttggggtaggtcatgtcctcccagctctgtgggatttgtagcacatcatcccacgtggggaggagagtgggcatgggcatgagactatttattagcttttactgtgtcagttgttgggttatgtattttgcatttgatatttaatttaatctttgtaatagccagagacttggatcttattggcatcattttccagatgagcagagctaataaatggcagaactagaattcaaatctgaggctctctggcattgaaaacaacaacaaaacatgtttctactcttcaaagagactttttctcctggattgtcacttgtccttttctttctctttctctcctgacattggtatttaaaatgagaacctaggaaacttgtttcttctaacctaatgtttttgaagcagttttaggtccttggagatgtgccttgatgtgtctatacaatatagtatttggtattgttagatataaagaagacctgaggccgagtgcggtcgctcatgcctataatcccagcacattgggaggccaaggcaggcagatcacttgaggtcaggagttcaagaccagcctggccaacacggtgaaaccccatctcttctaaaaatacgaaaaaaaaaaaaaaaaaa

SEQ ID NO: 2836 - DNA, 793 bp, Homo sapiens
gtgtggaagacaaatggtcacaacttgggagctcagtgcacgtatctaggtgactgggaagagggtggcaccaataccagcaacagagcaatgaggaagaggaaccggtttgcagcagaagaraaattttaaacgggttgcatttgagcagctttggaacatccacatggagataacaacagagagttggaaatgctagtctgaaccttaaggaggaaagctctacttttggcagaagaactggaacgtatcccctcttcctggagtgcctttccctcagctgtctcctttccggtcctcagtaaggtctctgctcaagtaccccttcatgccctttcctgccaccctacaatggtgcccctgtcacacacaccaccgccctcgctctgctcagttcttctctgcacctacctgagattttgcttattacctgctyccctyctcgagcatcacctttagagttgggacactagtctcaacttcctgtttgaaaaactgaacattaaaaggcaaccatgtcaagaatattcagaatttgagaccagcctggccaatatggcagggccccatctctactaaaaatacaaaaattagtcaggcatggtggtacatgcctgtaatcccacctacttaggaggctgaggcaggagaatcggttgaagccaggaggcagagggtgcagtgagccaggaaatgtcgccactgcactccagcctgggcaactgagtaagactttgtctcaaaaaaaaaaaaaaaaaaaaaaaactcgagggggggcccggtacccaattcg

SEQ ID NO: 2837 - DNA, 1943 bp, Homo sapiens
ggcacgagctagtctcaagtttttttttttttttttttttcaaaacagatttgtaaaaattgtatttgttaacactgtgcacaaacgttttatactaaataaatatcaaactacattcttctgaaagatgtttctattatttcttaggtcacttccatatatattatgtatagtgaaaccatttttaaaaagcaatgacttaggcaaaccaaccctagtttgttaaaccatttccctgtttttatttaaaaatgataaggttgtgcttctgtataaagtttgtacatctagcaatgtaaaatactgacacattaaaaaaaacaaaaagtagaaactcaattcttttgattcagtgctcttgtgtttttaaaaaaggaacaaaaagtaatgcaagactcaaaattttggagtggttggcatgcctctcttcattttactttttgactggctgcctgtatgccgatgatgatgtactgagctgtttgtgctgctgctgctgccatagccattcaaaaagtttgaaagctaccagggttagaaaaggacaacatagaaaatgaaataatagaaaagttagcagtatgattaatcttaagtatcaaatcatagacatttcagaataaatttagtatatggtctcctgttagttgggggtaccactgataatggaactttctggacacaaaaagagaaggagtgcattatgtatcaaagcactgaacctctcttctcttgcatctgtataaaatttgatattgatgctattttgtttagaagagtatattatttttgaaataaaaccaacaaagtaggagaagggagatggaagaaatccaaactattgtacaacaaagctggtagacagacaattgctttaaacaaaagatgctgcaatgaatatcagactactctactaacaataaaggtggtgaactgagactaagcattgtttgttatttttttagctgaatgggaccacagtaatcagttcaacactcattttacatatggggaagtttgaaggccaacatgatttaagtgactcagactcaaagttaatatggcagtctgtggctaagaacattctcatgatttttttcagactagagttgtttccactaaattatactacagctattttcggaaattcacaattggtctgataaaggtatatgattatataaacttctatttggaaattcactacctctaaattggaactttatatgtaaggataactgacttccaaaataaagattatcattctaaaagacttctaaaggcatcatagtaagcccacagtgataagatgctgacaacacagtcactcattcaatcctcaaactcttatcatagttttcttatacatatggcttactcttttaattaagtgtgaagttagaattatcgtcttcaactgacaggaagttagaattatcgtcttcaactgacaggaagttagaattatcgtcttcaactgacaggataatcattaagagtaatctttagttcaccatttactgctggaagtgttgagaagtaatttaatctttttttttaaatgataaaagtgacttacagaagttatgctattgaccattaagacttaagtcatttatgcaactacaagttaccagaacgagacaaaagattatgcaatctagaaaaattcagtcttaacccaggaaaacaaaaaagttattaattaagataactattggcaaacactgaaaacagctctggtaacctagtaaagtggataattattttgccagtaaactgtaacaaggaaacacaactgtggtaattatgttaagtcaaagctcttaatccactatcaatgaaaaaaaatctcagccatcaatcaatttaatagtttacacattatagctttactttttcctgtttactggttgcaagggaaggaaaagaaaataatttaa

SEQ ID NO: 2838 - DNA, 1479 bp, Homo sapiens
gctcgtgccggtttgggtctagttcacatgctcatccctggacctaccactgcgaccgtggtatcaggcactctggctcagccaaggttatatgcccatgtctctgtgtggagtgggtgaaggaggaggaagtaaatgatatgcagtttgatataatagcaaataaccaaggggaatagcaataaccaagggaaagggaagctgaacatttatgatatcctgtagtcaatacccccttaatttattttttgcatggcttaaagccagggctcttatttcccatttggggctttctgtttttttcttgagcttttaatgaacgtttacatttcatcagtttggatttctttgctgccagtgttggatatttgcttttttaaaaacaaaccaaaaaactatcatttaatatatccacctttctacttagactccatcttgaaaagaattatattggcccattggacacattttctcccaagatttaaactgtgaagtaagggatgaaaggatatgtgtcaatgtttgaaggaccaggcagggctgtggcatgtctttgcctgtgattcctatcaattattgtatcctggtttcagttttctagttctcttttgagtgggttctwatattctttcaggaaagtttatttttgctaataatggccagtgtcaatttccagtgctcacaagcaagaaccatgctttcagaaggttggtataagaaggctactgccattctcatgagacttgtaggactctttgacagtagagaaatcacagtagaaaaatacaacttctattgtttgccctgtatgttgcttccctttgatagcagggactcacattaaatgaagccaagaagttacattagagcctttgctgcccaatatgatattactagtcacagatgactgttgaaacctaaatttaaattagaattttaaaaaattaaaattcagtttcttcagtcacatgaagtacatttcaagtgtgcactagcaacatgttgctagtgactatcatattggaaggcacagattgtagaatatttccaccatcaaagaaagttctatcagacaacactgttggagtataaactcaagggtaggcattctgtccttgttattttctgatgtatccacaacacttagaatgggcttagcatgtataggtactcaataaatatttgttgaatgtcgaaatagcatatattgggaggccaaggcgggcagattacctgaggtcgggagttcaagaccagcctgcccaacatggagaaactccgtctctactaaaaatacaaaaaattagccgggcgtggtggtggatgcctgtaatcccagctacttgagaggctgaggcaggagaatcacttgaacccaggaggtggaggttgcggtgagctgagatcacaccattgcactccagcctgggcaacaagagtgaaactccatctctaaaaaaaaaaaaaaaaaaactcgta

SEQ ID NO: 2839 - DNA, 538 bp, Homo sapiens
ggcacgaggagttatcagtctggttagagctgggctaaacatttagtcttaccatcagtttaaaagcacctggaccagttagttgctgtacaggcaaagtcaaagggagaagcctggcctctctctactcagtcaaggttcatgactttaggagactgcaatgaaccaggcataccaggaaaggaaaaggttaactgaggttgaaaaaaaaactttatgtggcacttttaaacaagcaggttggtttggcttgtgtgactatgatggtgcctgattttgagcagagcaatttgtgttgtgacattttaaaatccattctggcacttggtgatgaatgtgttggctggcagctaagaacttgctagaatgcaagtatgcaagtcttcaccatttataatcgacacttcctttccaggaaagagcctttctaatctttgaatcagtggatttatcaatttgcataaaatatgccatcctcaatgaacacatttatcatctaccacttaactttccttctgttaaaaaaaaaaaaaaaaaa

SEQ ID NO: 2840 - DNA, 1090 bp, Homo sapiens
gcacaactctgggaggaagagtatcccaacctttgggtgaacaaactgaatctcaaatattttataatttatccaagctggtaagtggcagagctgggatttgaacccaggtctgtcttgttctaaatgccctgctttttttcactgcatcttcctcttgtgccatgtggttaaagataggcttcctttcaatattcagtttagttctattttacaaaacttcactaagcacctaccatgtgccatactctctggtgggcccagaggacaaagagatgtattagacctgacccctgacttgaggaactccatgtttaatggaaaagtagatgactgaccactaagatccaggatttaggtttctttcttgctacccatagaaatagcaatattgccttgtggatccctggaccattttcctcatgggaaggatatctttggcttggattaaaactgcaaagcataggataagaagtcagttctcaggtcactggttcacttagcttttttgtggctagaattacagccaagaccaggtccagccaggctgggcacaggtgtaggggatgtcaagctgtggcaccttagtgacagcaggaagcatggggccttcagtgcttggggtgaagtgagggtggttctaggcccatcactagctcacatggtataatgagaataatctagcagatttgagttcattctctggctttgccacttacttgtgtgtgactttgggcaagttactcaactctaagtctccattttcttatctagaaagtcgcactaggccgggtgcagtggctcacacctgtaatcccagcactttgggaggccaaggtgggtggatcacgaggtcaggtgatcgagactatcctggctaacatggtgaaaccccgtctctactaaaaatacaaaaaattagccaggcgtggtggcaggtgcctgtagtcccagctactcgggaggctgaggcaggagaatggcgtgaacccgggaggtggagcttgcagtgagctgagatcgcgccactgcactccagcctaagcgacagagcgagatccgtctcaaaaaaaaaaaaaaaaaactcgta

SEQ ID NO: 2841 - DNA, 2025 bp, Homo sapiens
ggcacgaggttaattgtagataaagaatagttttcttcctcttctccttgggccagttaataattggtccatggctacactgcaacttccgtccagtgctgtgatgcccatgacacctgcaaaataagttctgcctgggcattttgtagatattaacaggtgaattcccgactcttttggtttgaatgacagttctcattccttctatggctgcaagtatgcatcagtgcttcccacttacctgatttgtctgtcggtggccccatatggaaaccctgcgtgtctgttggcataatagtttacaaatggttttttcagtcctatccaaatttattgaaccaacaaaaataattacttctgccctgagataagcagattaagtttgttcattctctgctttattctctccatgtggcaacattctgtcagcctctttcatagtgtgcaaacattttatcattctaaatggtgactctctgcccttggacccatttattattcacagatggggagaacctatctgcatggacctctgtggaccacagcgtacctgcccctttctgccctcctgctccagccccacttctgaaagtatcagctactgatccagccactggatattttatatcctcccttttccttaagcacaatgtcagaccaaattgcttgtttctttttcttggactactttaatttggatcctttgggtttggagaaagggaatgtgaaagctgtcattacagacaacaggtttcagtgatgaggaggacaacactgcctttcaaactttttactgatctcttagattttaagaactcttgaattgtgtggtatctaataaaagggaaggtaagatggataatcactttctcatttgggttctgaattggagactcagtttttatgagacacatcttttatgccatgtatagatcctcccctgctatttttggtttatttttattgttataaatgctttctttctttgactcctcttctgcctgcctttggggataggtttttttgtttgtttatttgcttcctctgttttgttttaagcatcattttcttatgtgaggtggggaagggaaaggtatgagggaaagagagtctgagaattaaaatattttagtataagcaattggctgtgatgctcaaatccattgcatcctcttattgaatttgccaatttgtaatttttgcataataaagaaccaaaggtgtaatgttttgttgagaggtggtttagggattttggccctaaccaatacattgaatgtatgatgactatttgggaggacacatttatgtacccagaggcccccactaataagtggtactatggttacttccttgtgtacatttctcttaaaagtgatattatatctgtttgtatgagaaacccagtaaccaataaaatgaccgcatattcctgactaaacgtagtaaggaaaatgcacactttgtttttacttttccgtttcattctaaaggtagttaagatgaaatttatatgaaagcatttttatcacaaaataaaaaaggtttgccaagctcagtggtgttgtattttttattttccaatactgcatccatggcctggcagtgttacctcatgatgtcataatttgctgagagagcaaattttcttttctttctgaatcccacaaagcctagcaccaaacttctttttttcttcctttaattagatcataaataaatgatcctggggaaaaagcatctgtcaaataggaaacatcacaaaactgagcactcttctgtgcactagccatagctggtgacaaacagatggttgctcagggacaaggtgccttccaatggaaatgcgaagtagttgctatagcaagaattgggaactgggatataagtcataatattaattatgctgttatgtaaatgattggtttgtaacattccttaagtgaaatttgtgtagaacttaatatacaggattataaaataatattttgtgtataaatttgttataaaaaaaaaaaaaaaaaa

SEQ ID NO: 2842 - DNA, 986 bp, Homo sapiens
ggcacgagcagcaaacagggaccacggctaatgatgtgctttttaggggcaggatgcatagagtttaagacttggactatggcctggattgcctgggttcaaatcctgcctctactctatcacttcaggcaggcaggtccttaggctctttgggccttctcatttcctcttctgaaaaggaaattcacctcgtgctgtagtaagtccgtgaattgatatctgtaaggcacttagtaagcactgtatactgtttgactatttgtcttagtctgctcaggctgccataacaagataccatagactggccaggggaggtggctcacgcctgtaatcctggtactttgggaggccaaggcaggtggaccactggaggtcatgagttcaagagcagcctggccaacataccaaaattccgtctctagtaaaatacaaaaattagctgggcgtggtggtgtgcgcctgttaattccagctactcggcagtctgaggcaggagaattgcttgaaccagggaagcggaggttgcagtaagcagagatggcaccactgtactccagcctgggtgacagagcaagactctgtctcaaaaaaaaaagataccatagactgggtggcttgaacaacagaaatgtattttctcacagttctggagactagaagtcccagataaaagtccagcatggtgctgggtgcagtggctcacacctggaatcccagcactttgggaggccaaggcgggcagattatgaggtcaggagttcaagaccagcctggccaacatgatgacaccccgtctgtactaaaaatacaaaaattgcctgggcatggtggcacatgcctgtagtcccagctactcaggaggctgaggcaggagaatcacttgaacccaggaggcagaggatgcagtgagccaagatcgcgccattgccctctagcctgggcgacagagcgagactccgtctcaaaaaaaaaaaaaaaaaaaaaaa

SEQ ID NO: 2843 - DNA, 627 bp, Homo sapiens
gaattcggcacgaggaagttcaacctggagagatggaaaatcagctctcataactaagttaatttagtataaaaatagaattgatagtgagggtataaagtgtaaccatcagttaaacctctcctgtcattcctggcttccttgcttcagaattgaaatggaagtgggggtgtccctactctgtagaatctgggactgggcaaatgtttgtgtggcctccttaaactagctgttatgttatgattttattctttgtgagttaattagaataaagtcattttcttccaaggtatggttcatttagtctatagtctcctggttatgaaattagcatcctcccagatctgacagctccctgaggggttatataaggagtagctcacttgcaaacataacatgatgctcaattcaaaggttctagctgctgtgggtctggagttatgtaagctgagcagtagcaggaaactctgcttaaaatattgtttaaagctgtgcgtgctggcatgtgcctgtaatcccagctacttgggagactgaggcgggagaatcacttgaacccaggaggtggaggttgcagtgaactgagaccatgccactgcactcactgacagagcaagactctgtctc

SEQ ID NO: 2844 - DNA, 1220 bp, Homo sapiens
ggcacgaggaaagtctgaaattagcaagttatgaaattaaaaaatcatcgagatttaaaaaatatttttgggcttcatcttcatatgtgaagaaagtacgtgtgccactcacctgaaggaatgtctgcataagtattgcagtttctttaacccaacaaggtgtgattgcatttattcacatggacagaataacaaacccaaaactttatcgttcgttgatgagaagtgttagtcatttatttgaatgtcagttttaagctactgataacatgattgattagcaacggaaacattttagaagataccacgcatttgtttaattcaaatggtcaactgtcaggatacatcgctctcttattccactctcaccacaatctaactttaaaacattctcatcaccctaaaaagcaaccttggcactccccatcctccccttccatcgcccgtgccccaggcagcccctggttactttctgtctctgaggacttgcctgtcctgggcgttccacgtaaatgagtcagacctatgcagtccctgctggcctccttcactggcatatactcttttactggttcatttgtattgtagtgtatatcagtacctcatttctgtttattgccaaataatattccatcgtgtggatacaccacactttatttatccattcataagtgatggacatgggttgtttctactttttgcctactacgactaatgctgctgtgagtattcagggttctagccaatgcagttaggcaagagcaagaaggtggcgtccacattgtaaaggagagcaaaactctctctgtatgtgtgacatggtcatgtccgtaggaaatcctcaggagtcacccagccctctattaattaaaggggtttggtaagattgtaggacgcaagatcaacacacaagaatgaaattgtatttctgtatgctaacaacgaaccatccagagatagaattaagaaaacaattgtatttacagtgcatcaaaaaatatttcattgtgttaagacggcaacaattctagcttcttttatctataggttctgtgtaatacctactaaaatcccagctacctttgcataaattggcaagctgattctgaaattcacatggagatactagggattcagcatggctacaacgatcttgaaaaacaaacaaagttagaggacttgcaactcgtgatttcttctttaaaaaaaaaaaaaaaaaa

SEQ ID NO: 2845 - DNA, 657 bp, Homo sapiens
gaattcggcacgagagcctccacagcctgcaggtatccagacgacgttctgcacacagagactcagactcccaccagggcctcacgccccactgcctctccgggatgcctgcgtgtggctcactcccgccacgggcacatcagccctggtgcccagctggccttctgcagagcctggtgctggagcagcttctcgaattctctgctgcctcctccccacagccttccaggscctcagagctgctgccaggccagcacctccttgggcccgtgttgaggccccacggggctgggctcatgtgggagctgatcttggccgggtgatccctcactgctctggacaaaagggagccatgggccgggcatggtggctcacgcctgtaatcccagcactttgggaggccaaggtgggcggatcacctgaggtcggagtttgagaccagcctggctaatgtggtgaaaccccgtctctattaaaaatacaaaaattagccgggtgttgtggtgggtgcctgtagtcccagctactcgggaggctgagacaggagaatggcgtgaacccgggagrtggaggttgcagtgagccaagattgtcccatmmagcctggsygacggaggaagactctgtctccaaaaaaaaaaaaaaaaaaaaaaaaat

SEQ ID NO: 2846 - DNA, 1026 bp, Homo sapiens
ggcacgagcacaactatagattacagttctagatcttagtggtctgaattatgtggaaaaggtatacaccacacttcgaggattggctactttcactacaaaaaaatggagtcaccctaagctttttgtaagaagcatgtattgaatttgtaatcattgtaaagggtttaaaaaatggcatttctcaaaggatggctaccattttgctggagccaaagaagtatccattcttatttatgatttctggggcctccctgacccaactacttgttcaagacttttattttgacttagaatgatgtaaaaatgacttctgttttggtgaaggaggctgaaagtgaacggaaatgtttgtagagggaaataaagtataatgtgccattcacagatcattgaatagaacagaagactcccctttttaaaatgtttgctgctgcaactgtgtggtacaatgaaggaaaattcacgcttgcagatgctttgttcaagggcatttgtagtttccatgtgtgttcaactgacttctaaaggcctttcaaacatatgatcttgcctccacttcctgtgaaattaacctcctttctttaaaaatacaatgatttaaagaaaattgccaccataaacaaagctaaaagactaggggaaaatatttgctgcatatgtagtcaacaggattaccatctataatatataaagaggtcctataaattgaaaatttggccaggtgtggttgttcatacctgtaatcccagcactttgggaggccaaggcaggagaatcactcgagctgaggagtttgagaccagccctggcaacacagggagaccccatctctacaaaaattaaaaattagctggacatgatggtgtgcctgtagtcccagctgcttgggaggctgaggtggaaggaccacttgagtctgggaggtcaaggctgcagggaactatggtcacaccactgcactccagcctaggtgacagagcaaaaccctatctcaaaaaaaaaaaaaaaaaaaaaaaactcgag

SEQ ID NO: 2847 - DNA, 1535 bp, Homo sapiens
ggcacgagatcttagtgtttttgtatcggtcaaaaatttatctgactgaataattagaaataatttagggaagaatcacttaaaataacagtggcaaaaatactgtagaatgtcttgattggccatataatgttactcgtttttcctaaatgtttagtcattttttactgttcctttaactacagattacatttttttgtttgtttgtttttactgtcttcacaaatgcttccaaatatggctgcttccaaccctgagtttaacccaggaacaatactgcaaactgctcaattcagtagtgagtgggctatatgcatacctactcatcaaagctattatttaaagaattatattttttagcactcttagcatttcaagataatgcatgcactcagttcccaaagtgtattattgcttcttgaaactcctctttgatctgctgaaagtaatgatggctaccatcttaaacagaccctaaggttgagagtaaacatataaatttgaaagctgtttattgatatattgattatcagtggtcacttacctatcagtgaactttggtagtgacacatacagactggtatttataacgtgcaggcaaaataagtactgtgaccttgaaagattttttttttttttttgagacttgcactcaaaagattttttttttgagtcttgcactgtcacccaggctagagtgcagtggcaagatctcggctcagcctcccaagtagctgggattacaggcaccccactaccacacccagctaatttttatgtttttagtggggacagggtttcgatatgtttgccgggctggtctcaaattcctggcctcaagtgatctgcccacctaggcctcccaaagtgctgggattacagacgtgagctaccacacctggccttgaaagattattttctatttctgacccattatataccacccatactgtagtgcttgtattttctctcacacatactgtattttttaacttgagagagtgtatttggtagactagatgacagtctttttgagacagagttttgctcttgttgcccaggctgaagtgcagtggcgcaatcttggctcactgcaacctccgcctcctgggttcaaggaattctcctgcctcatcctccctagtagttgggaatacaggcatgcgccaccatgcctggctaattttttgtatttttagtagagacagggtttcactgtgttagccaggatggtctggatctcctgacctgtaatcccagcactttgggaggctgaggcaggaagttcacttgagcccaggagttcataaccagtctgggtgacatagtgacacccaatctctacaagagataaaaaactagccgggcatggtggtgcacacttgtggtcccagctactctggaggctgaggtaggaagatcacttgagcctaggagctcaaggctgcagtgagccataattgcgtcccggcactctgcctgggcaacagagggagaccctgtctcaaaaaaaaaaaaaaaaaaaaaaaaaaaaa

SEQ ID NO: 2848 - DNA, 1242 bp, Homo sapiens
  misc_feature (14)..(15): n equals a,t,g, or c
  misc_feature (1016)..(1016): n equals a,t,g, or c
gctcagattcggcnnagattttgttataaagataatacacacagagagaagcgcctgcagtgaatctttgtgtaaccatcatgcagatcaggagacaaaccatggcggcccctcagaactctgccacgtgtttcttcccatcttttcctgctgctgctcccagaagtaaccctattccgacttttctgggttttcttggtaatcaatttctggtttttctttatagagttgttgcctaagtatgcacccttcaacacgatactgttgttttgcttgtactttttgttaactgtacatataataaattatgttatatatttctttattgcaggctcctttaatccagtgttatgtttgggagacgcacccatacaactgcatgtcaccgtagcttgttcatttccagtgtcgtgtagtgtcccttcatgtgaatttatcacagtttattagtatcttccactctgatggacatttggtagttggaattttcattactaatgatgcccctgcctgtggtcattcctgcctgcctcttgatgcacacaggcacgcatttctgctgggtatgtcctagttccagactcactggttatacggtatggatgtaattattgttagttttccagtgtgattaaacatcagattagcgcccattagcaatgtctgaggctgcctgttgctccactcgggtgcccgtttggtattaggagcttcttcagccattcttgtgtttgtgttcatgtatctcattgtggttttaattttcatttctataatgactaatgtggttgaatatgtttttgtatgattatttgccatttgtatttgctctttttaaagtatttgtacaggactttcacccattctcttattgtgttgccttatataggaattatttctatgttctagatatggatcctttgctggccatatatgttgaaagtatctccactctttggcttgcctttcattattttaattgkgtcttgctgaacagaaggttttaatgtcaaggnagtttttagtcaatcccctcatttatgattggtgcattttgkcaggtttaagaagtcttttctttcccataagaacgtgaagaaaacatattctcctatgttttatagaccataggttggcaaacttttttctgtaaaggactaaatagtaaacattttaagctttgtggaccacagatagtctctgctacatattcatcttaaaaaaaaaaaaaaaaaactcgag

SEQ ID NO: 2849 - DNA, 633 bp, Homo sapiens
gctggtcaacatggtgaaccctgtctctactaaaaacacaaaaaattagctggacgtggtggcaggtgcctgggtgcctgtaatcgcagctactcgggaggctgaggtaggagaaatgcttgaacccaggaggtggaggttgcagtgagctgagatcgcaccactgcattccagcctgggcgacaagaacgaaactccatctcaaaatatgtatgtatgtgtgtgtgtgtatatatatatatatatgtatatatatatgtatatatatgtatttatgtatatataaatcaaaatgaaaaacctttttggatactaagagcaacaaaatttagggaagtaatttcttaagtatagattaaaacaaatatttatgcagcctggtgactagaaggctgttgtgtaactaaacaccatgaaacttaatattgcgatagtcctccccacatgaagagagagtgtgagtgatgaagggccatgttcttatatctattaaaactcaagagggaatttggttgcatatgaaaggacttaggtattataaagggttagatacttggaagaactgcaagtttaataagatgctgaaataagttgccaacagaaatgttggttattaaaaaaaaaaaaaaaaaa

SEQ ID NO: 2850 - DNA, 422 bp, Homo sapiens
ggcacgagcaggactgatggtgaaacctgaaggcatagacatgacccatagctgcctttatgttttacaacttcctgttgattttcattttcctcgtttgtcagtcatctcccttgacttcccacatctatctatgttgcatcctagcctggtgcctggcctggcggaggcattggaacattggaaagaatgaatgaatgagtttagccctctggagagtgtatgctgaaaaactgttacctcgcctttaagagcttaaaagtgaagagaatgaattttgatagaaccatttttttaaagtaaggaccatccttctgtgtccccagaaaattaaatagagtcagaaaatggcaaagccaagttagaagcattcaggtgtggaagttgtatagggcacttgagttaaaaaaaaaaaaaaaaaa

SEQ ID NO: 2851 - DNA, 535 bp, Homo sapiens
  misc_feature (11)..(11): n equals a,t,g, or c
  misc_feature (13)..(13): n equals a,t,g, or c
  misc_feature (162)..(162): n equals a,t,g, or c
  misc_feature (422)..(422): n equals a,t,g, or c
tgaaatatatntncatatggaraagggtctcccttggtcgctggatatggtttggctgtgtccctacccaaatcttatcttgaattgtatttcccataattcttaggtgtaatgggagggacctggtkgggaggtaattgaatcatgggagcccagtctttncctgtgctgttctggtggtggtgaataagtctcatgagatctgatggttttataaaggggagttccccgatcatgctctcttgcctgctgccatgtaagacatgcctttgcttctcctttgccttccaccatgattgtcatgtcttcctagccaagtggaactgtgagtccattaaacctctttttctttataaattacgtgggtccaaggccaggtgcagtggctcacgcctgtaatcccaacactttgggagtctganggcaggcggatcacgaggtcaggagttcaagaccagcctgaaccaacatgatgaaaccctgtctctactaaaaatacaaaaatttagccaggcgtggtggcacacacctgtaa

SEQ ID NO: 2852 - DNA, 2259 bp, Homo sapiens
ggtcgacccacgtcgtccggaagccaggagtcctttagaagtctatgattcccatcaccgcggggctggacagctctcttggggaccttccctgtgcacctgtgaccgtgtctgcccctcataacaccctagtcacaatgccctttcagttccccaaaaaagctagactggtcccacttctgggcctctgcctggagtattcacagaccctcagtcgggccccagcttggatgagtgtcagcagaggccctccccactccacctggattaaagcaggtctgcctggcgccctgcaccacacacccttccctccctcagcgtgtctggcccgaccagcacgcagcttccatgatggcagggcctggcctctcctgcacgccatgcaggcctggcccttgccaaccactggaccttagtaaatatttgaggagcaaaagaagcaaacgctagtgggtgcatgagtggtggcagagtctggttctgaggtttcygagcttaaggccgtgcagcagctggctctgctcccttgwkattctggtgcccactcccttgccaggtttcaggcacccgtggatgagcagtcagagagtctacagaacacgcacgacgacagcaggaacagcgcggcctcagccaggaataatccaggaagtgtcccggaaaagagagagaagacatcagagcctaaaggaaacagctgggctccgaacggcctctcagaagagcctctactgaaaaatatggatcatcacagatccaamcagaaaaatggggscgatgtccccacatgragggaacacccgacttagcaaatgggaccggtccccagggtcaggctcttagagcaggcacaagactgggacactggacagaaggttgttcccatgatggttttttttatttgttatttttgagatggagtttcgctctgttgcccaggctggagtgtaatggtgcgatctcggctcactgcaacctctgcctcctgggttcaagcgattctcctgcctcagcctcccgagtagctgggattacaggcgcctgacaccacgccccgctaattttttgtatttttagtagagatggggtttcaccatgttggccaggctggtctcaaactccagacctcaggtgatccacctgcctcagcctcccaaagtgctgagattacaggggtgagtcaccgcgcctggccaatgttgttgttgtttttaagacagaatttcactctttgttgcccaggctggagtgcaatggcgcaatctctggctcaccgcaacctccgcctcccaggttcaagcgattctcctgcctcagcccccagagtagctgggattacaggcatgtaccatcacacccagctaattttttgtattttaagtagagagggggtttctccatgttggtcaggctggcctcgaactcccaacctcaggtgatccgcccacctcggcctcccaagatgctgggattacaggggtaagccactgtgcccggccggttatttctttaaaaggtaatcatttgtcaagagtaaaacccagaagctctgacaggccataatttcagatcctttggcttgggcagttttgattttccccgtgtttgcatggcatgaagtcttcgtccttgtcacagtagcttgggatgactcccagtccacatggaaaacatcagggagtgacaatccagcaagaaatccctcgctagttccacacctacgcaccgagcgtcggtgtgccaggccctgtgctgggcagagtgtggtatgtcagggtgtgccggttttaggtaacaagactccaccactgagtggcacctgccctattgcaaaggaatccagttcctccggaataacagtcccactgttaacctggtgctactgggaagttccacacagtaatctgagcagtgactcatggaaggatgaggaacgtttgctccagcttctctccctttccagcaagggcagagctcctaaagccaggggttagcacctggccagcttatgtggcagatggtctcagttacaacttcgctgctttcccaaactcctgcagccctcctgagtccgacttccgttgatagcaaggcactgggtggcagcaaccttttttctagtagttttttcccagcagttttccatttctccacagtatccttttcatttagaggagcttaataaatgctttttaaaaaaaaaaaaaaaaaaaaaaaaaaaaaaaaaaaaaaaaaaaaaaaaaaaaaaagggcggccgc

SEQ ID NO: 2853 - DNA, 854 bp, Homo sapiens
ccacgcgtccgccaccccagtcccgcagccggcaccccgatcccacagccggcactcaccccagtcccatagccagcacctcgatcccatagatgacaccccgatcccgccccagtcctatagcccgcaccccgatcccacccgagtcccgcagccggcaccccatcccacccatgtcccacagtcggcaccccgatcccactcggatccggcagccagcttggatcctgtggccctcctccagcccccagggctcatttatatgttttattggcagaggctggggctggctctgttggcctctgtgctgggtttcttcctctgcaccgcagactggctctcctgacctctccaggtgtcatcgaacacccttgtgcttgctgtcacccgctgcctgtctgcaggatcccggattccgtatcaggggaccgaaattagtcggaaaataggaagcaggtgctcgcttggatggaaccctgaccctgtgctcacacttgtaggaggagggctctgcaggccgcctcccggaacgggaggttcccaagccactgcacttcggaggggctgtaattagagttgcacattcattcagttcccagtaaagtagaacgtgctccagccagtgaggaaaaggtgtttttaaaaattagattggccgagtgcggtggctcatgccttttacctcaacactttgggagacaaaggtgggaggatcacctgtggccaggagttcaagaccagcctgggcaacagagcctgtctctggggaagaataaaaaaaaaaattgagccttaaaaaaaaaaaaaaaaaaaaaaaaaaaaaaaaaaaaaaaaaaaaaaaaaaaaaaaaaaaa

SEQ ID NO: 2854 - DNA, 971 bp, Homo sapiens
  misc_feature (41)..(41): n equals a,t,g, or c
  misc_feature (564)..(565): n equals a,t,g, or c
  misc_feature (567)..(567): n equals a,t,g, or c
agtaaattaatgtaggaacagaaaacgaaataccgcatgtnctcttataagtgagagctaaacattgggtactcacggacataaagatggcaacaatagacactggggaagagggggaatggagggagggggcaagggctgaaaaactacctattgggtactatgctcactacctattgggtactgtgctcactacctattgggtactgtgctcactacctattgggtactttggtgacagcatcatacaatataccaatgtaacaagcctgaacatgtatcccttaaatctaaaataaaagttgaaattactttttaacaaargaaaatyccacatatttatattgaaaccaagccaagctgtggtcttctgcaatgttataatcaccctgtaaagtcaatatacaaaatatattgtattaattttaacatttctaggctattcaggttaaattttgkgttccaaatcwatctttcgtaatataagattcatattattctgatcacttctggctaaaccttaaaaagaattcccctatcaatacaaagaatattagttggganntnatatatatataataaataataataataatatataacataatttaaaaaaattttaatggcaaacagttgtatctaataaagattctgaatcctggtcgggtgctgtggctcacacctgtaatcccagcactttgggaggccaaggcgggcagatcacttgagctcgggagttagcgaccaagcctgaccaacaggagaaacccagtctctactgaaaatacaaaattagtcaggcgtggtagcacatgcctataatcccagctactcaggaggctgaggcaggagaatggcttgaacccgggaggcagaggttgcagtgagccgagattgcgccactgcagtccgcagtccgacctgggcgacagagcgagctccgtctcaaaaaaaaaaaaaaaaaactcgag

SEQ ID NO: 2855 - DNA, 1229 bp, Homo sapiens
ggcacgagctggggtggggctgagaagtccatgtaccgccagactatggtgagtgaccatagggtatgaccattatctctttgtaagtaagtcaatactgttccccacagatgaaacctcagagcatagaaacccatggattagcaggaaatgtcactgagtccattacaggtcagggatcactgaaaaatgtcattgctcttcgattgacactgctccctgcttcctcagctgctctgcatttgaggagaagccctgtgtgcctccagctgttgccaaggcagttaattaaacaaccggtccgcctgatgttcaccaaggtgaagctggagcaggtgctgaaaggcccagaggaagccctcgtgacctgcagacaagtgctgaggctgtggcagaccctgtacagcttctcccagctgggaggcctagaaaaggatggcagcttcggtgagggcctcaccatgaagaagcagagtggcatgcacctgactttgcctgatgcccatgatgcagactctggctcccggcgggcttcgtccatcgccgcctcccggctggaggaggccatgtcagagctgactatgccctcttcggtcctgaagcagggccccatgcagctgtggaccacgctggaacagatctggctgcaggctgctgagctgttcatggagcagcagcacctcaaggaagcaggtttctgcacaggaggcggcgggcctcttccccacttctcactcagtactctatatgcggggccggctggctgaggtgaagggcaacctggaggaggccaagcagctgtacaaggaggcgctcacggtgaacccagatggcgtgcgcatcatgcatagcctgggtctgatgctgagtcggctggccacaagagcttggcccagaaggtgcttcgtgatgccgtggagaggcagagtacgtgccacgaggcgtggcagggcctgggcgaggtgctgcaggcccagggccagaacgaggctgccgttgactgcttcctcaccgcccttgagctggaggccagcagccctgtactgcccttctccatcatccccagagagctctgacgacgctgcagccgcagggagggaggggctggccagagggagaggcagcagggaacgtgggtcagggtggggcaacagtggcatcaggtgcggggcctcagggaaatacatctttagtgaacgccaaaaaaaaaaaaaaaaaaaaaaaaaaaa

SEQ ID NO: 2856 - DNA, 1260 bp, Homo sapiens
  misc_feature (15)..(15): n equals a,t,g, or c
  misc_feature (37)..(37): n equals a,t,g, or c
cccggtttttagaanctaaggggattcccccccgggnctgccaggaatttcgggcaccgaagtgagaaaagagcctggcaacaagatgaagcaagccaagtctgtgggtgacctcgccccacctgaatgggactggaggagtaagggggctgtcacaaaagtcaaagaccagggcatgtgtggctcctgctgggccttctcagtcacaggcaatgtggagggccagtggtttctcaaccaggggaccctgctctccctctctgaacaggagctcttggactgtgacaagatggacaaggcctgcatgggcggcttgccctccaatgcctactcggccataaagaatttgggagggctggagacagaggatgactacagctaccagggtcacatgcagtcctgcaacttctcagcagagaaggccaaggtctacatcaatgactccgtggagctgagccagaacgagcagaagctggcagcctggctggccaagagaggcccaatctccgtggccatcaatgcctttggcatgcagttttaccgccacgggatctcccgccctctccggcccctctgcagcccttggctcattgaccatgcggtgttgcttgtgggctacggcaaccgctctgacgttcccttttgggccatcaagaacagctggggcactgactggggtgagaagggttactactacttgcatcgygggtccggggcctgtggcgtgaacaccatggccagctcggcggtggtggactgaagaggggcccccagctcgggacctggtgctgatcagagtggctgctgccccagcctgacatgtgtccaggcccctccccgggaggtacagctggcagagggaaaggcactgggtacctcagggtgagcagagggcactgggctggggcacagcccctgcttccctgcaccccattcccaccctgaagttctgcacctgcacctttgttgaattgtggtagcttaggaggatgtcggggtgaagggtggtatcttggcagttgaagctggggcaagaactctgggcttgggtaatgagcaggaagaaaattttctgatcttaagcccagctctgttctgcccccgctttcctctgtttgatactataaattttctggttcccttggatttagggatagtgtcccyctccatgtccaggaaacttgtaaccacccttttctaacagcaataaagaggtgtccttgtaaaaaaaaaaaaaaaaaaaaaaaaaaaaaaaaaaaa

SEQ ID NO: 2857 - DNA, 1124 bp, Homo sapiens
ggcacgagggaatttgagattgcactgaaggccctctcagtactacgctacatcacagactgtgtggacagcctctctctcagcaccttgagccgtatgcttagcacacacaacctgccctgcctcctggtggaactgctggagcatagtccctggagccggcgggaaggaggcaagctgcagcagttcgagggcagccgttggcatactgtggccccctcagagcagcaaaagctgagcaagttggacgggcaagtgtggatcgccctgtacaacctgctgctaagccctgaggctcaggcgcgctactgcctcacaagttttgccaagggacggctactcaagcttcgggccttcctcacagacacactgctggaccagctgcccaacctggcccacttgcagagtttcctggcccatctgaccctaactgaaacccagcctcctaagaaggacctggtgttggaacagatcccagaaatctgggagcggctggagcgagaaaacagaggcaagtggcaggcaattgccaagcaccagctccagcatgtgttcagcccctcagagcaggacctgcggctgcaggcgcgaaggtgggctgagacctacaggctggatgtgctagaggcagtggctccagagcggccccggtgtgcttactgcagtgcagaggcttctaagcgctgctcacgatgccagaatgagtggtattgctgcagggagtgccaagtcaagcactgggaaaagcatggaaagacttgtgtcctggcagcccagggtgacagagccaaatgagggctgcagttgctgagggccgaccacccatgccaagggaatccacccagaatgcacccctgaacctcaagatcacggtccagcctctgccggagccccagtctccgcagtggagagcagagcgggcggtaaagctgctgaccgatctccctcctcctcaccccaagtgaaggctcgagacttcctgccccacccagtgggtaggccaagtgtgttgcttcagcaaaccggaccaggagggccagggccggatgtggggaccctcttcctctagcacagtaaagctggcctccagaaaaaaaaaaaaaaaaaaactcgagggggggccc

SEQ ID NO: 2858 - DNA, 920 bp, Homo sapiens
gagcacctcaggggaggtgaaactcaggtggtcttgtggcatgcgtgggtgtccctctgcactctggcctctgtgctcttgggtgctggtgctgtgtcacacgccagggcatgtgaaggcaccacaggtgtgaacgagtccccgatgatgacctggggggaggttgagaacacacccttgagagttgaagggtcggaaacgccctacgtggacaggacacccggcccagcttttaagatcctggagccaggccgcaggaacggctgggtctgaagatggccaacgaggccgctgccaagaaccgggccaagaagcaggaagccttgcggagagtgacggagaatctggccagcctcacccccaaaggcctgagcccagccatgtcgccagccctacagcgccttgtgagcaggacggccagcaagtacacagaccgggccctgcgggccagctacacaccatccccagcacgctccacccacctcaagaccccggccagtgggctgcagacccccacaagcacaccggcgcctggctctgccacacgcacccctctcacacaggacccggcctccatcacggacaacctgctgcagctccctgcccggcgcaaagcttcggacttcttttagagccaggcctgggctgggctcatagacgcttcacagagcctgcagggcagctgtacacccagcagaggactccagccttctcggggcccaggcctgggccagaagctgttgaccataccaggagtcactggagaaaggggctgtgctggggccagactggcacaaggcactcgtgcccacaccacaccccagggccttgccaagctgtttgctgtttaattggccccttgaactgtcattaaagaacacctaggtaaaaaaaaaaaaaaaaaaaaaaaaaaaaaaaaa

SEQ ID NO: 2859 - DNA, 489 bp, Homo sapiens
ggcacgagctgtttcaaccaaaacctcatgctgaccagagttgaggaacagaagaagatggtgaaggcctgcaggtataggtgttcagcatgtcatctgaaatattccccacagaggcaaaaagaaaggaaattatctctgaaaaggaatgggaggacaagagcctccctctaatcttgtccatgcagtaaagagagatcacacgaaccctggacctacctctttgaggtggtactctcaaactctttgaagtcagcagaatatgtcaatgttttggttgaagaagctgcttgaatctgggcttttctgtgccatgtgttctcccagggccagcacaaagaagggcttttggtgcaggcccaagaccaccataatcatcattgattattcctctccacgccagtgtctctaaataaactttctcttctttctctgaaaaaaaaaaaaaaaaaaaaaaaaaaaaaaaaaaaaaaaaaaaaaaaaaaaaaa

SEQ ID NO: 2860 - DNA, 882 bp, Homo sapiens
ggcacgagcccgctccgtccctgctgccggtcgagggcacctccttttgggcagcggccgtgaagacccctccgtcgccgcccatgctgtgcgcggccgccattgcgaccgtggcctcctcgtgtagggagggtttggtgccgtgtgcggcgcagcagctgctggaggtgaagctggagcaggtgttgctgctaccacagccccacgttcctggcaagggcgccgcttcctctcccagcggcagttcaggcccgacctgcggctcctgctgccgcccgcctcttccgagggcgccccctgtaggcccgagttacacccggtgcagccccgggcgctgcacgtcaaggccaagaagtaggagctaggggcttgcctggacgcatcggtgaggcctcggggggccgtggagaccggtcgtagagcctccagggcggtcaagttggaaggcctcgggccggccctcgactacttccgagggaacgagaagggcaagctggaggcggaagaggtcatgagggacgcgatgcagggcggggaaggcaaaagctcggcggccatccgagaaggtgtgatcaaaacggaggaacccgagagactcctcgaggactgcaggctcggcgcggagcccgcgtccaatggcccggctcgtggcagcgcggaggtcatcttggccccaacgtccggtgcctttgggccgcaccagcaagacctcaggatccctctggactctccacactgcttcccctggggcccggatccagtttcaggaagctccgccttcagagctgataagattgaccaaggtccccctgacaccagtgcctattaaaatgcagtccctaaaaaaaaaaaaaaaaaaaaaaaaaaaaaaaaaaaaaaaaa

SEQ ID NO: 2861 - DNA, 957 bp, Homo sapiens
ggcacgagaggagatctacaagctggtggctctgggcaccggcagcagctgctgtgctggctggctggagttctcgggccagcagctccacgactgccatggcctggtcatcgcccgcaggcctgctgaggttcttgttccggcagctcctgctggccacacaggggggccccaagggcaaggagcagtccgtgctggccccccagccagggcccggacccccattcaccctcaagccccgcgtcttcctgcacctctacatcagcaacacccccaagggcgcggcccgtgacatctacctgccccccacctcggaaggtggcctcccgcacagcccacccatgcgcctgcaggcccatgtgctcgggcagctgaagcctgtgtgctacgtggcgccctcgctctgtgacacccacgtgggctgcctgtcagccagcgacaagctggcacgctgggccgtgctggggctgggtggtgccctgctggcccacctggtgtccccactctacagcaccagcctcatcctggtgccgccctggggcctccctcccgtctctgcaaggcctcctttctccgggcctttcaccaggcggccagggctgtggggaagccctacctcctggccttgaagacctacgaggctgccaaggctgggccctaccaggaggctcgcaggcagctgtctctcctcctggaccagcagggcctgggggcttggccctcgaagccactggtgggcaaattcagaaactgaagccagcctcggcgggaccgaggtcccggagccaagctgtacccctgctgggggagtgccctatctgaggagcgttgtggggagaacatgggttgtgcggggtgaaactggggctggagggaaggaggagcctgctgtggttgggaggcggctgctgcacgtttgggcttgaataaagaagtatttctggtaaaaaaaaaaaa

SEQ ID NO: 2862 - DNA, 1240 bp, Homo sapiens
ggcacgaggtgcagctcagcccattttccaggtgggcatctgcaaagttgagggggctccggtgggtctctctgctgtgaggagactcagaccaccccctgcctcctgggggaaatgtcagaagggcttctctgcctatgaggatctggggcagggcttggccttggcctgctggtcttggaggcgttgagcttggtctggaaggggtggaggagcgtctgggctcactgggccaggggcattgctggcagtgtggacgggaggctgcagggcgctgcctcctgtggcttagtgccctggagctagagagcagtgcttggttgagtcctgccaacagcttccagatcctcacccaggccagaacccaggccagctggggaaggcagaggctggcagggcccgtggtgggtgctggtcttgactttggtgtccactgagtcccgaggctcaggcccaggagggatgcagtccggctgagggcgaggctgtccccaggacatggagagggtgagatcccaaggccacggggggggggcagggagaacccctcctaccctggatgagtgggtgactggagagctagagaacgtggcagacccaagacctctcagtgctgagcccatggaggatgccccaggctggcgggactgggaagcagagggctggtcttaacacaggtgtgtccagtgctggaggcaagtccttgtcgtgactgtccagcgccactccatgtctctcctgtccttggatgttggggggctcagcctcttgcatgggtgtcctgctgggcgctgggccccgccactggccccctgcttgctttggggtctgagttagctcctggctccactgagcaggccgtcagctgccagcccaccacgcggatacccaggccctgttccgaggcctggaacagctgcttccgaagaaggggctgccttcagggaaatgcgtgcaccgtgcagcctgtgctgtgcccagggaggcctcttcagcgggattggcagttgctgtgccctgagaacaggcagaactgtgtgatccctgaatgtgaacctgaagttcaaaggacttggaaagctctggaatgtgttggtttttcccccccaaaatgggtcctaaggagggtaaaaaaaaaaaaaaaaaaaaaaaaaaaaaaaaaaaaaaaaaaaaaaaaaaaaaaaaaaaaaaaaaaaaaaaaaaaaaaaaaaaaaaaaaaaaaaaaaaaaaaaaaaaaaaa

SEQ ID NO: 2863 - DNA, 928 bp, Homo sapiens
gggcttctccacctacgtgtgcctggtgctgctggtggccaacattttgcggatactcttctggtttggaaggcgctttgagtccccgctgctgtggcagagcgccatcatgatcctgaccatgctgctgatgctgaagctgtgcaccgaggtccgtgtggccaacgagctcaacgccaggcgccgctcctttacagacttcgacccccaccacttctggcagtggagcagcttctcggactacgtgcagtgcgtcctggccttcacgggcgtggcgggctacatcacctacctgtccattgactccgccctgtttgtggagaccctgggcttcctggctgtgctgaccgaagccatgctgggtgtgccccagctttaccgcaaccaccgccaccagtccacggagggcatgagcatcaagatggtgctcatgtggaccagtggtgacgccttcaagacggcctacttcctgctgaagggtgcccctctgcagttctccgtgtgcggcctgctgcaggtgctggtggacctggccatcctggggcaggcctacgccttcgcccgccacccccagaagccggcgccccacgccgtgcaccccactggcaccaaggccctctgacagtggggaggacgaggatgtgggaccgccagccgcgggcactggtgggccctgacctccccgcggggagggtgggtgccgtggcccctgcaggtgtggcagagatggggcacgggcattggggtctccatcagcctctgtggggtgtctcagggtgggcagtgggggtggggctgggacgctgtttgtgctcagcggggacagccagggttgatctggccccgagggttttggatgtttttaggatgacataaaaagcaagtgttttccccaaaaaaaaaaaaaaaaaaaaaaaaaaaaaaaaaa

SEQ ID NO: 2864 - DNA, 2569 bp, Homo sapiens
  misc_feature (3)..(3): n equals a,t,g, or c
  misc_feature (2564)..(2564): n equals a,t,g, or c
  misc_feature (2567)..(2567): n equals a,t,g, or c
ggncacgagcggccctccactccctgactgtcgtgtttgtctcgctctgtgctgagggctgatgctgaggacctccttgactccttccttagcaacattctacaggactgcaggcaccacctgtgtgaaccggacatgaaactggtgtggcctagtgccaagctgttgcaggcagctgcaggtgcatctgcccgggcctgtgactctgtcaccagcaawgtactgcctttactgctggaacagttccacaagcacagtcagagcagccagcggcggacaatccttgaaatgctcctgggtttcttgaagctgcagcagaaatggagctatgaagacaaagatcaaaggcctctgaatggcttcaaggaccagctgtgctcactggtattcatggctctaacagaccccagcacccagcttcagcttgttggcatccgtacactgacagtcttgggtgcccagccagatctcctatcttatgaggacttggagctggcagtgggtcacctgtacagactgagcttcctgaaggaggattcccagagttgcagggtggcagcactggaagcatcaggaaccctggctgctctctaccctgtggccttcagcagccacctcgtacccaagctcgctgaggagctgcgtgtaggggagtcaaatttgactaacggagatgagcccacccaatgctcccggcatctgtgctgtctgcaagccttgtcagctgtatcaacacatcccagcatcgtcaaggagacactgcctctgctgctgcagcatctctggcaagtgaacagagggaatatggttgcacaatccagtgacgttattgctgtctgtcagagcctcagacagatggcagaaaaatgtcagcaggaccctgagagttgctggtatttccaccagacagctataccttgcctgcttgccttggctgtgcaggcctctatgccagagaaggagccctcagttctgagaaaagtactattggaggatgaggtgttggctgccatggtgtctgtcattggcactgctacaacccacctgagccctgagttagctgcccagagtgtgacacacattgtgcccctcttcttggatggcaacgtgtcctttctgcctgaaaacagcttcccgagcagattccagccattccaggatggctcctcagggcagaggcggctgattgcactgcttatggcctttgtctgctccctgcctcgaaatgtggaaatccctcagctgaaccaactcatgcgggagcttttggaactgagctgctgccacagctgccccttttcttccaccgctgctgccaagtgctttgcaggactcctcaacaagcaccctgcagggcagcagctggatgaattcctacagctagctgtggacaaagtggaggctggcctggrctctgggccctgtcgtagtcaggccttcactcttcttctctgggtaacaaaggccctagtgctcagataccatcctctcagctcctgccttacagcccggctcatgggcctcctgagtgacccagaattaggtccagcagcagctgatggcttctctctgctcatgtctgactgcactgatgtgctgactcgtgctggccatgccgaagtgcggatcatgttccgccagcggttcttcacagataatgtgcctgctttggtccagggcttccatgctgctccccaagatgtgaagccaaactacttgaagggtctttctcatgtacttaacaggctgcccaagcctgwactcttgccagagctgcccacgcttctttccttgctgctggaggccctgtcctgccctgactgtgtggtgcagctctccaccctcagctgccttcagcctcttctactggaagcaccccaagtcatgagtcttcacgtggacaccctcgtcaccaagtttctgaacctcagctctagcccttccatggctgtccggatcgccgcactgcagtgcatgcatgctctcactcgcctgcccacccctgtgctgctgccgtacaaaccacaggtgattcgggccttagccaaacccctggatgacaagaagagactggtgcgcaaggaagcagtgtcagccagaggggagtggtttctgttggggagccctggcagctgagccctcagtcctggcctagactgttctgacaatctaacctgggattactaactgttgagccatcttccccaaagcagggaaaccactggtctctgactgcctttcccacagacacagcacaaatgctaggcctctgttgcatggctgtacaaagaacataagagtccatatttctagtggatttgtaaaataagtgtgtgtgagacacttgcgtttgaagaaagatctagggtcctgggtctcttgcatttatatgtcagaaaaggggcgatatgctgctgaggggtgagtgcatatgagtgtggccctgaggaccagggctggcagatgttgtctacctgctgaagaataaagatttcttttggtaaaaaaaaaaaaaaagggcggccgctctagaggatccctcgaggggcgcaagcttacgcgancangc

SEQ ID NO: 2865 - DNA, 1192 bp, Homo sapiens
ggcacgaggcaccctgcagggcagcagctggatgaattcctacagctagctgtggacaaagtggaggctggcctggactctgggccctgtcgtagtcaggccttcactcttcttctctgggtaacaaaggccctagtgctcagataccatcctctcagctcctgccttacagcccggctcatgggcctcctgagtgacccagaattaggtccagcagcagctgatggcttctctctgctcatgtctgactgcactgatgtgctgactcgtgctggccatgccgaagtgcggatcatgttccgccagcggttcttcacagataatgtgcctgctttggtccagggcttccatgctgctccccaagatgtgaagccaaactacttgaagggtctttctcatgtacttaacaggctgcccaagcctgtactcttgccagagctgcccacgcttctttccttgctgctggaggccctgtcctgccctgactgtgtggtgcagctctccaccctcagctgccttcagcctcttctactggaagcaccccaagtcatgagtcttcacgtggacaccctcgtcaccaagtttctgaacctcagctctagcccttccatggctgtccggatcgccgcactgcagtgcatgcatgctctcactcgcctgcccacccctgtgctgctgccgtacaaaccacaggtgattcgggccttagccaaacccctggatgacaagaagagactggtgcgcaaggaagcagtgtcagccagaggggagtggtttctgttggggagccctggcagctgagccctcagtcctggcctagactgttctgacaatctaacctgggattactaactgttgagccatcttccccaaagcagggaaaccactggtctctgactgcctttcccacagacacagcacaaatgctaggcctctgttgcatggctgtacaaagaacataagagtccatatttctagtggatttgtaaaataagtgtgtgtgagacacttgcgtttgaagaaagatctagggtcctgggtctcttgcatttatatgtcagaaaaggggcgatatgctgctgaggggtgagtgcatatgagtgtggccctgaggaccagggctggcagatgttgtctacctgctgaagaataaagatttcttttggtaaaaaaaaaaaaaaaaaaaaaaaaa

SEQ ID NO: 2866 - DNA, 1507 bp, Homo sapiens
ggcacgagaattcactcaagttgtctcatctataccccttcaaaccctgtgagcctctaggtgctgtgctgtcctgaggcctgggccatggtgcccaaggaaagcccctgaagctcaccaggaggaagaagcatgcagggcactcctggaggcgggacgcgccctgggccatcccccgtggacaggcggacactcctggtcttcagctttatcctggcagcagctttgggccaaatgaatttcacaggggaccaggttcttcgagtcctggccaaagatgagaagcagctttcacttctcggggatctggagggcctgaaaccccagaaggtggacttctggcgtggcccagccaggcccagcctccctgtggatatgagagttcctttctccgaactgaaagacatcaaagcttatctggagtctcatggacttgcttacagcatcatgataaaggacatccaggtgctgctggatgaggaaagacaggccatggcgaaatcccgccggctggagcgcagcaccaacagcttcagttactcatcataccacaccctggagagatatatagctggattgacaactttgtaatggagcattccgatatgtctcaaaaattcagattggcaacagctttgaaaaccagtccattcttgtcctgaagttcagcactggaggttctcggcacccagccatctggatcgacactggaattcactcccgggagtggatcacccatgccaccggcatctggactgccaataagattgtcagtgattatggcaaagaccgtgtcctgacagacatactgaatgccatggacatcttcatagagctcgtcacaaaccctgatgggtttgcttttacccacagcatgaaccgcttatggcggaagaacaagtccatcagacctggaatcttctgcatcggcgtggatctcaacaggaactggaagtcgggttttggaggaaatggttctaacagcaacccctgctcagaaacttatcacgggccctcccctcagtcgagccggaagtggctgccatagtgaacttcatcaccagcccatggcaacttcaaggctctgatctccatccacagctactctcagatgcttatgtacccttacggccgattgctggagcccgtttcaaatcagagggagttgatgtggccagtgggatcaccgtcgactgggcctatgacagtggcatcaagtacgccttcagctttgagctccggacactgggcagtatggcttcctgatgccggccacacagatcatccccacggcccaggagacgtggatggcgcttcggaccatcatggagcacaccctgaatcacccctactagcagcacgactgagggcaggaggctccatccttctccccaaggtctgtggctcctcccgaaacccaagttatgcatccccatccccatgccctcatcccgacctcttagaaaataaatacaagtttgaacaggcaaaaaaaaaaaaaaaaaaa

SEQ ID NO: 2867 - DNA, 1129 bp, Homo sapiens
ggcacgagcgcaagcaggagatggaggccttcgggaagaaggctgccaacaggtcctggcagaacgtgtactgtgtcctgcggcgtgggagcctcggcttttacaaggatgccaaggcagccagcgcgggagtgccataccacggagaagtgcctgtcagcctggccagggcccagggcagcgtcgcctttgattaccgaaagcgcaaacatgtcttcaagctgggcttacaggatggaaaagaatatttattccaggccaaggatgaggcagagatgagctcgtggctacgggtggtgaatgcagccattgccacagcgtcttctgcctctggagagcctgaagagccggtggtgcccagcaccacccggggcatgacccgggccatgaccatgcccccagtgtcacccgtcggggctgaggggcctgttgtgctccgcagcaaagacggcagagaacgagagcgagaaaaacgcttcagcttctttaagaagaacaagtagttgggggcaaggtcccaggccaactccctccctccgttcaggaaactgccagggacagtcgacagggaccgccctcttgtcaggacaactgcctgctgctagggtctgttgccaaggtcaacccatcaccaggaactgtcactggggacgagtccatgttcccaagggcagcccttctcttctgctgtttaattccagactggtggtgggacccaggtaaccccctctcccacccccgccgacttctcccctttccccagcctcgtgcctctgtccctcaccacggtgtggacagtgccgcaccctcaacataggccatgtggggagtggctgcccctgcctcagggtcattctcctgccatgcgagggcactcgccttctgccttctggttcctcacccctcagaccagccaggaacctctcagagctgaagcaggccctgggggcagaagtgccagatgacagtcagaggcgcaggagccctccctccccacccccaccctgtaactccagctgccactccatctccagctgctctcaatggcttccaggtgtgttgttcggggacagccaccgccttgagtctggccaaggaggtgattaaacagctcagcttctcaaaaaaa

SEQ ID NO: 2868 - DNA, 1003 bp, Homo sapiens
ggcagagtaaaaattataatcttagccgggtgctgtggcttacatctgtaatcccaccactttgggagaacaaggcaggaggatcccttgagcccaggagtttgagaccaccctggtcaacacagaaaggcctcgtctctatttattattattttttaaataaaaaaataaagaattataatcttgatgtggttaattgcacctttgtgtctattacctgtttctgttgcaggtgaacttaatagagcattaggtctgtcatcactctgtggagaaacagacatatatcaataattgttattcaagaagaaatactttctacttttatggtaattttgaaattataaaagacaaaaaacaggtaactctccttcacgattaagtctagaggtgagaatttgggtcaggtgcagtggctcatgcctgtaatcccagtactttgggaggctgaggtgcgaggattacttgagagcaggagttgagaccagcctaggcaacatagtgagaccctgtctctacaaaacgtctaaaaaattggtcaggcattgtggtgtgctcctgtagaggctgaggagggagggttgcttgagcctaggaattaaagactgcagtgagtaatgattgtgccactgcactccagcctgggtgacagagggagactctctctctccctctctctctctttttttgagacaaggtctcactcttgttgcccaggctagattgcaatgccatgatctcccaggctcaggtgatccttctacctcagcctcccaagtagttgagactacagggacacatcaccatgcccagttaatttttgcattttttgtagagacagtgtcttgccatgttagccaggttagtctcaacctcctgagctcaagcgatgcacccgcctcagcctcccaaagtgctggattataggcatgagttaccgtgcctggcctgaccccctttggaaaaaaaaaaaaaaaaaaaaaaaaaaaaaaaaaaactcgag

SEQ ID NO: 2869 - DNA, 1314 bp, Homo sapiens
cccgggagttgctggactgagacatgagcctccaactgtgtggttgggctcggtagcacatcgtgggacttgggtgtgcgcccacagatggtttggccctgcagtgaccagagcagcccaagccgccaccatggtgaaattgctagtggccaaaatcctgtgcatggtgggcgtgttcttcttcatgctgctcggctccctgctccccgtgaagatcatcgagacagattttgagaaggcccatcgctcgaaaaagatcctctctctctgcaacacctttggaggaggggtgtttctggccacgtgcttcaacgctctgctgcccgctgtgagggaaaagctccagaaggtcctgagcctcggccacatcagcaccgactacccgctggccgaaaccatcctcctgctgggcttcttcatgaccgtcttcctggagcagctgatcctgaccttccgcaaggagaagccgtccttcatcgacctggagaccttcaacgccggatcggacgtgggcagcgactcggagtatgagagccccttcatggggggcgcgcggggccacgcgctgtacgtggagccccacggccacggccccagcctgagcgtgcagggcctctcgcgcgccagccccgtgcgcctgctcagcctggccttcgcgctgtcggcccactcggtctttgagggcctggccctgggcctgcaggaggagggggagaaagtggtgagcctgttcgtgggggtggccgtccacgagacactggtggccgtggccctgggcatcagcatggcccggagtgccatgcccctgcgggacgcggccaagctggcggtcaccgtaagcgccatgatccccctgggcatcggcctgggcctgggcattgagagcgcccagggcgtgccgggcagcgtggcgtccgtgctgctgcagggcctggcgggcggcaccttcctcttcatcaccttcctggagatcctggccaaggagctggaggagaagagtgaccgtctgctcaaggtcctcttcctggtgctgggctacaccgtcctggccgggatggtcttcctcaagtggtgagcggcctcgccattgtccctgccgccggagcccgccgggagccccgggccggacacaggccgcgtcccccggccgcgcgtcccccaagagcgagcactgtggccctgggccaccacctgtgcacaaggggcctcccgggaccaggctgtgcccccgatcctacaccctgagcctcagagcactgctactttttaaaatacttctttctcttaaaaaaaaaaaaaaaaaaaaaaaaaaaa

SEQ ID NO: 2870 - DNA, 1703 bp, Homo sapiens
ggcaaaaagctaccacctgccagtctgaagcaccgagatgacatggccgcttaccaacaagaagagcagatgcagcttccccgagctgatgccattcgttcacgtctcatcgatactttctctctcattgagcatttgcaaggcttgagccaagctgtgccgcggcacactatcagggagttacttgatccttcccgccagaagaaacttgtattgggagatcaacaccagstagtgcgkttctctataaagcctcagcgtatagaacagatttcacatgcccagaggctgttgagcaggcttcatgtgcgctgcagtcagaggccacctctttctttgtgggccggatgggtccttgagtgtcctctcttcaaaaacttcatcatcttcctggtctttttgaatacgatcatattgatggttgaaatagaattgctggaatccacaaataccaaactatggccattgaagctgaccttggaggtggcagcttggtttatcttgcttattttcatcctggagatccttcttaagtggctatccaacttttctgttttctggaagagtgcctggaatgtctttgactttgttgttaccatgttgtccctgcttcccgaggttgtggtattggtaggggtaacaggccaatcggtgtggcttcagcttctgaggatctgccgggtgctgaggtctctcaaactccttgcacaattccgtcaaattcaaattattattttggtcctggtcagggccctcaagagcatgaccttcctcttgatgttgctgctcatcttcttctacatttttgctgtgactggtgtctacgtcttctcagagtacacccgttcacctcgtcaggacctggagtaccatgtgttcttctcggacctcccgaattccctggtaacagtgttcattctcttcaccttggatcattggtatgcactgcttcaggacgtctggaaggtgcctgaagtcagtcgcatcttcagcagcatctatttcatcctttggttgttgcttggctccattatctttcgaagtatcatagtagccatgatggttactaactttcagaatatcaggaaagagctgaatgaggagatggcgcgtcgggaggttcagctcaaagctgacatgttcaagcggcagatcatccagaggagaaaaaacatgtcacatgaagcactgacgtcaagccatagcaaaatagaggacaggtcgtttggactgggagactcttgtgcacgaaaatctgcccgggctaatggaaatggatcaggatgaccgtgtttggcccagagactcactcttccgatattttgagttgctagaaaagcttcagtataacctagaggaacgtaagaagttacaagagtttgcagtgcaggcactgatgaacttggaagacaagtaaagcaatggatggcttcacttccacccttcctgcaacctctactgcctgattagagtcctaattttaccctctccctccctgatgcataggtaaaggcccctctgtggagtaaggagatcttcagagctgttagtgtaactaattgagaagtattgtttccattgcgtgttccactcatgttgcttctcttgtgaaccattaactttaattggatattatttttacctgttaaaaaaaaaaaaaaaaaaaaaaaaaaaaaaaaaaaaaaaaaaaaaaaaaaactcga

SEQ ID NO: 2871 - DNA, 669 bp, Homo sapiens
ggcacgagccaggtttcaccacaatgcccatccctgcctccccactccacccacctctgccttccttactgctgtatctgctgcttgaactggcaggagtcacacatgtgttccatgtgcaacaaacggagatgtcacagactgtatcaactggggagtcaatcatcttgagttgcagcgtacccaataccttaccaaatggacctgtcttgtggttcaagggaacagggccaaaccggaaattaatctacaatttcaaacaaggtaactttcccagagtaaaagagattggagacaccaccaagcctggcaacacagacttttccacccgcatccgtgaaatctctcttgctgatgctggcacctattactgcgtgaagttcataaaaggaagagctatcaaggagtaccaatcaggtcggggcactcaggtgtttgttactgtctcttacagttctagaagccagaagtctgaaatctgcatctctggactgaaatcaaggcatcagcagaactgctccttctggaggttctaggagagaacatattccctttctcttttggcttctggtttgctgccagcatccctggcctgtcagcagcatagaataaatcttcaaggccagtgtcaaaaaaaaaaaaaaaaaaaaaaaaaaaaaaaaaaaaaaa

SEQ ID NO: 2872 - DNA, 1189 bp, Homo sapiens
  misc_feature (609)..(609): n equals a,t,g, or c
gccactacgcctggagggggtccctgctgctggtgtctgccctctccctccacctagtggcctgtggtgctctcctccgcccaccctccctggctgaggaccctgctgtgggtggtcccagggcccaactcacctctctcctccatcatggccccttcctccgttacactgttgccctcaccctgatcaacactggctacttcattccctacctccacctggtggcccatctccaggacctggattgggacccactacctgctgccttcctactctcagttgttgctatttctgacctcgtggggcgtgtggtctccggatggctgggagatgcagtcccagggcctgtgacacgactcctgatgctctggaccaccttgactggggtgtcactagccctgttccctgtagctcargctcccacagccctggtggctctggctgtggcctacggcttcacatcargggctctggccccactggccttctctgtgctgcctgaactaatagggactagaaggatttactgtggcctgggactgttgcagatgatagagagcatcggggggctgctggggcctyctctctyargtaagtggaatggggttnccagggggtgaagggctgccatgktgsacaactaggggagggtactawtctyattacagtgkatgtgaatattgscctctggtgtagtacagtacacagcctgsgkggccaaccatagcatccctgaaatgggtccatggggcaaagaacttggggctgggaaagtctgagtggaaagacaaaaagaagctaagtggaacccttggcagggtcctacggcttgggtttgcagaggacctggcagaacctggccagacacagacgtagcattccagtgtgcaccctttcctttggcctactgggccccaaaccaggtatctgaggcacctggtcaaagttctgctggctcagggtgccagaactttcagacctttatctcctcttacccattaactgaagctttagaaaggccacagttggtgggcgcctgtagtcccagctactcaggaggctgaggcaggagaatggcatgaacccgggaggcggagcttgcagtgagctgagatcgcgccactgcacttcagcctgggcgacagagcgaactccgtctcaaaaaaaaaaaaaaaaaaaaaaaactcga

SEQ ID NO: 2873 - DNA, 1245 bp, Homo sapiens
gagcggctcagacgcacatcatcctcagtccctcgggactggagggactcgtgagccggagcccagaaatccgggggtggataagacaccgcgtcccctccaattcccgtaagcaccccttgctccatcctgcgccccaatacctcagctagcccccttccccacttcttacactccaaactcagccgggacagacctctgctgccgccgcccccacgaacgtgtgacgacggctggaggccaacagagtccctacaggtggtgctcacggtaatgcaccgacaatgagtggctgttttccagtttctagcctccgctgcctatctagggtgtgtcatggcctggtgcgggaggctcttactctccccaagccccactgcttctcctgctgcccgcttgcttcggactctggcagaaaccccacctgctgacacgttcctcctggggaattggtgttggatgtgccagcgcctctggccgtggcccgctaaccagcctctcccgggcgggctcctgccgcgccccctctcgcttgccccctcctcctcctcctcctgctgctctcccccctgctcccaggacggcaggatggccgcgcagggcgcgccgcgcttcctcctgaccttcgacttcgacgagactatcgtggacgaaaacagcgacgattcgatcgtgcgcgccgcgccgggccagcggctcccggagagcctgcgagccacctaccgcgagggcttctacaacgagtacatgcagcgcgtcttcaagtacctgggcgagcagggcgtgcggccgcgggacctgagcgccatctacgaagccatccctttgtcgccaggcatgagcgacctgctgcagtttgtggcaaaacagggcgcctgcttcgaggtgattctcatctccgatgccaacacctttggcgtggagagctcgctgcgcgccgccggccaccacagcctgttccgccgcatcctcagcaacccgtcggggccggatgcgcgtggccttcccgcgccgcggctaccccatgcaccgctctcattcaggaggcccagaaggccgagcccagctcgttccgcgccagcgtggtgccctgggaaacggtgcagatgtgcgcctccacctgcaacaggtgctgaagtcgtgctgagtctggccgcctgcaggggggtacccgggccaacggcggagggggcggggaagggagattcggcaaagacagctttactaaaaaaaaaaaaaaaaaaa

SEQ ID NO: 2874 - DNA, 2204 bp, Homo sapiens; identical to SEQ ID NO: 149

SEQ ID NO: 2875 - DNA, 2240 bp, Homo sapiens
ggcctgggcgacagagtgagaatctgtctcaaataaataaataaaattaaattataacaggcaaaccgtcactggccagggaactcctacgtggaataaacawagctgatgtgtaaagaattctgaggtgtgcttcacaggtcaccacacacagctagccttctgttggggtctggcccagccctgtgcttgggtaaggacagaaggctctgggtgacgctccgtgaaggagaacccagttgctgggcattgtctcttgtgcggtgatgctgatgcctatcctttggtctcatgcctggctctgctttgctgcgcaytctgtctcccactccgtgctgtctgagatgcaggtgattgagcaggaaaccccagtgagtgcaaaatcctctcgctcgcagctggacttgtttgacgatgttggtactttcgcctctggacccccaaagtacaaggacaatcccttttccttaggggaaagctttggctcccgctgggatacagatgctgcctggggtatggacagggtagaggagaaggagccagaagtgaccatctcaagcatccggcctatttcagaaagagccacaaaccggagggaagtggagagccggagctcaggcctcgagtctagtgaggcgcgtcagaaattcgcaggagccaaagccatctcatctgacatgttctttgggcgggaggtggatgcggagtatgaggccaggtctcggctgcagcagctctcaggcagcagtgccatcagctcttcagacctctttggggacatggatggagctcacggagcaggaagtgtatctctggggaacgtgctgcctacagcggacattgcccagtttaagcagggtgtcaagtctgtggctgggaaaatggctgtgctggccaatggtgtgatgaattccttgcaggatcgctacggttcctactgatccgagctctgtgactcaggcttacgatggtgacggcaacaagaactccacagttcccaggctggggatgctttgccttgtggaagctggggaggatttgttacttcgtatgtgtggtgtgtgtgtggggtggcctttgaggcgctcactcctgtgaggggaatggtcagtaccagcccttgtcctctgcctgtggactgagccctttattccctctcacaccaccctccgtgtgttagactcttgtccttctgtcctgcccccacagctgctgctcacttatcctgccatactgggaaagggggttcccccacgatggcttattctgggtccagactttccccaggtagggaaagcggaaggtagaaggctttttttgctggctctagggttcttctagttcgaggccttgggtccccatcctctggaaccagggggaggcctggaaggagttcactgtagacccgtcccatggggaaagaggctgcggacttgctgctgctgctgctgccagtggcctcttctgggtgccaggagaggggaaggacctttgtctgggcgttaccaagggctggaaactttacctggtacctaaaggtttcatttggtatcagaccggagacccttgggttctcccgtctcaccacccctttctacagtaagcacttggaagattgtttcagggtgtctcagggtccctctgtaccatctgctgtggaatgcaggaccctctgtgacattctttatcccttcttccccgggttggtggccatggagggtcttgtctgctgtgattcgactctggatgctgtgagcttgatgctggccagggaagcagaggatgtgagaggcagaggcaggctcctggggctgagctccttcctctgcatcattctgggcttggcctggacagcacccgccagtgagagctgtgggcctcaccctctggcagctgagccaagcactgtcattcttggtgccatcttcccctgccgcaccggcagtctcagcccagcccccacctttgggttgtaggttgggctcccaagcaacacagaccactcttccccttgcccctcccccagagggacttgactttctttctggactgtttgtattgaaacaaagtggtgtcaaaataaagcccctgcagggcctggctccctgttggtctgagtgaaaaaaaaaaaaaaaaaaaaaaaaaaaaaaaaaaaaaaaaaaaaaaaaaaaaaaaaaaaaaaaaaaaaaaaaaaaaaaaaaaaaaaaaaaaaaaaaaaaaaaaaaaaaaaaaaagaaaaa

SEQ ID NO: 2876 - DNA, 2240 bp, Homo sapiens
ggcctgggcgacagagtgagaatctgtctcaaataaataaataaaattaaattataacaggcaaaccgtcactggccagggaactcctacgtggaataaacawagctgatgtgtaaagaattctgaggtgtgcttcacaggtcaccacacacagctagccttctgttggggtctggcccagccctgtgcttgggtaaggacagaaggctctgggtgacgctccgtgaaggagaacccagttgctgggcattgtctcttgtgcggtgatgctgatgcctatcctttggtctcatgcctggctctgctttgctgcgcaytctgtctcccactccgtgctgtctgagatgcaggtgattgagcaggaaaccccagtgagtgcaaaatcctctcgctcgcagctggacttgtttgacgatgttggtactttcgcctctggacccccaaagtacaaggacaatcccttttccttaggggaaagctttggctcccgctgggatacagatgctgcctggggtatggacagggtagaggagaaggagccagaagtgaccatctcaagcatccggcctatttcagaaagagccacaaaccggagggaagtggagarccggagctcaggcctcgagtctagtgaggcgcgtcagaaattcgcaggagccaaagccatctcatctgacatgttctttgggcgggaggtggatgcggagtatgaggccaggtctcggctgcagcagctctcaggcagcagtgccatcagctcttcagacctctttggggacatggatggagctcacggagcaggaagtgtatctctggggaacgtgctgcctacagcggacattgcccagtttaagcagggtgtcaagtctgtggctgggaaaatggctgtgctggccaatggtgtgatgaattccttgcaggatcgctacggttcctactgatccgagctctgtgactcaggcttacgatggtgacggcaacaagaactccacagttcccaggctggggatgctttgccttgtggaagctggggaggatttgttacttcgtatgtgtggtgtgtgtgtggggtggcctttgaggcgctcactcctgtgaggggaatggtcagtaccagcccttgtcctctgcctgtggactgagccctttattccctctcacaccaccctccgtgtgttagactcttgtccttctgtcctgcccccacagctgctgctcacttatcctgccatactgggaaagggggttcccccacgatggcttattctgggtccagactttccccaggtagggaaagcggaaggtagaaggctttttttgctggctctagggttcttctagttcgaggccttgggtccccatcctctggaaccagggggaggcctggaaggagttcactgtagacccgtcccatggggaaagaggctgcggacttgctgctgctgctgctgccagtggcctcttctgggtgccaggagaggggaaggacctttgtctgggcgttaccaagggctggaaactttacctggtacctaaaggtttcatttggtatcagaccggagacccttgggttctcccgtctcaccacccctttctacagtaagcacttggaagattgtttcagggtgtctcagggtccctctgtaccatctgctgtggaatgcaggaccctctgtgacattctttatcccttcttccccgggttggtggccatggagggtcttgtctgctgtgattcgactctggatgctgtgagcttgatgctggccagggaagcagaggatgtgagaggcagaggcaggctcctggggctgagctccttcctctgcatcattctgggcttggcctggacagcacccgccagtgagagctgtgggcctcaccctctggcagctgagccaagcactgtcattcttggtgccatcttcccctgccgcaccggcagtctcagcccagcccccacctttgggttgtaggttgggctcccaagcaacacagaccactcttccccttgcccctcccccagagggacttgactttctttctggactgtttgtattgaaacaaagtggtgtcaaaataaagcccctgcagggcctggctccctgttggtctgagtgaaaaaaaaaaaaaaaaaaaaaaaaaaaaaaaaaaaaaaaaaaaaaaaaaaaaaaaaaaaaaaaaaaaaaaaaaaaaaaaaaaaaaaaaaaaaaaaaaaaaaaaaaaaaaaaaaagaaaaa

SEQ ID NO: 2877 - DNA, 2240 bp, Homo sapiens; identical to SEQ ID NO: 2875

SEQ ID NO: 2878 - DNA, 1082 bp, Homo sapiens
ggcacgagcatgggcgcgcgcggggcgctgctgctggcgctgctgctggctcgggctggactcaggaagccggagtcgcaggaggcggcgccgttatcaggaccatgcggccgacgggtcatcacgtcgcgcatcgtgggtggagaggacgccgaactcgggcgttggccgtggcaggggagcctgcgcctgtgggattcccacgtatgcggagtgagcctgctcagccaccgctgggcactcacggcggcgcactgctttgaaacctatagtgaccttagtgatccctccgggtggatggtccagtttggccagctgacttccatgccatccttctggagcctgcaggcctactacacccgttacttcgtatcgaatatctatctgagccctcgctacctggggaattcaccctatgacattgccttggtgaagctgtctgcacctgtcacctacactaaacacatccagcccatctgtctccaggcctccacatttgagtttgagaaccggacagactgctgggtgactggctgggggtacatcaaagaggatgaggcactgccatctccccacaccctccaggaagttcaggtcgccatcataaacaactctatgtgcaaccacctcttcctcaagtacagtttccgcaaggacatctttggagacatggtttgtgctggcaatgcccaaggcgggaaggatgcctgcttcggtgactcaggtggacccttggcctgtaacaagaatggactgtggtatcagattggagtcgtgagctggggagtgggctgtggtcggcccaatcggcccggtgtctacaccaatatcagccaccactttgagtggatccagaagctgatggcccagagtggcatgtcccagccagacccctcctggccgctactctttttccctcttctctgggctctcccactcctggggccggtctgagcctacctgagcccatgcagcctggggccactgccaagtcaggccctggttctcttctgtcttgtttggtaataaacacattccagttgatgccttgcagggcattcttcaaaaaaaaaaaaaaaaaa

SEQ ID NO: 2879 - DNA, 1913 bp, Homo sapiens
ggcggatccgacgcgcgagaccgggaggggacgagggcgttgcaatcgttcggggcgggggctttccggggagggggtgctcaggtgcaccagcggcggcggaccctcwgactctgccctcccctccctttaacccccttccagccggacgggaggcggrgcagggctgagcatttgtgacacctacatttccgtggctcccttcttttcccccgacccctgtttatctcttcgccttccagaagttcttttccatcaggccgtcgcaccttgcgtgggaaggagcaccccacttggaagcaggaggcggggttcagatcttggccctacccctcctgtgttaaagtccgcgagcctcagtttccctcacagtattttttgcctcgccttacccggttttgaggatctgtacgagaaagagaaaggaagtggacatttgttgaattcctgcatggccaaataccacgcagactgcttcatccgccacgtttaatccttattacttggtgttctcagaactcccatttcatggattcttaagctcacagagtcagtgaataacagaaagggattcagatctagccgtttagctgcacagtggagttcttctccagagtcttcccttgtctgggctctggctggaactattcctcagccaaatcctcgccccagaacagtgcttcctgtttctccagctragaagtctccctttcagtttccttcttccagcacggagtacactgctctgcctccacttagattacttcagaaatgaaatgcagcaaatatttatccagcagtgcagggagttgaacttttggagtcgggaaccttggattcttgttctggctctgccacttactgtgtggccttgggaagtcctttgtcttctctgagctttcttttctctttgcgtaaaagcggtgctcttgtcccattctccctccctgtcttccagcaggctctccccggaggctcagccccctctgctccccatgggcaactgccaggcagggcacaacctgcacctgtgtctggcccaccacccacctctggtctgtgccactttgatcctgctgctccttggcctctctggcctgggccttggcagcttcctcctcacccacaggactggcctgcgcagccctgacatcccccaggactgggtctcttttttgagatcttttggccagctgaccctgtgtcccaggaatgggacagtcacagggaagtggcgagggtctcacgtcgtgggcttgctgaccaccttgaacttcggagacggtccagacaggaacaagacccggacattccaggccacagtcctgggaagtcagatgggattgaaaggatcttctgcaggacaactggtccttatcacagccagggtgaccacagaaaggactgcaggaacctgcctatattttagtgctgttccaggaatcctaccctccagccagccacccatatcctgctcagaggagggggctggaaatgccaccctgagccctagaatgggtgaggaatgtgttagtgtctggagccatgaaggccttgtgctgaccaagctgctcacctcggaggagctggctctgtgtggctccaggctgctggtcttgggctccttcctgcttctcttctgtggccttctctgctgtgtcactgctatgtgcttccacccgcgccgggagtcccactggtctagaacccggctctgagggcactggcctagttcccgacttgtttctcaggtgtgaatcaacttcttgggccttggctctgagttggaaaaggttttagaaaaagtgaagagctggaatgtgggggaaaataaaaagcttttttgcccaaaaaaaaaaaaaaaaaaaaaaaaaaaaactcgagggggggtcccggtaacccaatcgtccctc

SEQ ID NO: 2880 - DNA, 1989 bp, Homo sapiens
ggcacgagtttttaaaagatatcttttgtgtagaagtaacccaggaatgccagcatttgttttgatagtctcattccaatagtagttactttaaaatgaagaatgttcttaatttacaaaatattatgtatgtatttaagttatgaatattgcagatatgtaaatatgtgtatatgtgtgttgattttaatttgtatcttcacagattttattatcagttatgttttgaatttttacctttggagaaaacatactacttaaatcttccagtgtagtgatagcaaattatctttatataaattttattcagattattcaaagtaatcaaagatttttaattatttttattaaattaaatttatcagtataaataattaagatcattaaccttatttaattaaatttattaattttgattatagaaaaatgcattttcttcttaaatagattctttacacttaaagctgaagtgttattttgctacttgtatgtatatcagatactttgtttattaatctaatacgttagtaataaaaggagtactttacaattattgcctgtatattttttcatgtgtaggaaaatgaagaagattatgggacctgttctagttctgtacaatatacaccagtttacaaattacacaatgaaaagggaggaaactcagaaaagcgtaagcttgctcaggtaagtaaggttatttacccttcattcccccacattctcaaattatataattccagtaaattatttaggaacaatttggatccactaattttttatcttatatgaaaacctgcagtattggtcaaggggaggagttagtggaacctgggaaggctacaaggggattgagagtcaaatgtttcagatatcggtttctacatgctttgttagcccatgccctcatagatctcatagtccagtgaaggaaaagacaattgaatgtgtgattcttatagagtgtgaatagcttgatgataaactggaaatcataggattcctttactacaaaaataaaatcaatcttatacatgggtatttggccattaaaatagtctatagaaattaaaatctgaactactataagtctatcctattctaaagttagattattttatttgctataaatagttaaagcttctttttatatgctgatgctacttaaaatattgtttcaagtgactgagtgttcagaatcatagctataagtgttcctggtttttttttcataagtacatttatgaaggctctaactaaacaaaattggtatatacaaaattgtatcttaagtggccttagaaaactagcttcaaaaaagaattcttgagtggactgtagctacaaaattacagaactggaagtggctgcaaagcttcatttataacagttgccaaggtttgcagatgagaaagttgatagctagaatggtcacaacacttgccataagtctcataactgatcagtggcagaaggaggcgaaaagccatctctgatgctcagttagctttcctggatagcccaggcaccacagaagtatacatggccataaggtgcttccagggtctttgtctttgagcccattttgtgctgctgtaccagaatacctgaggctgggtaatttgtaaagaacagaagtttatttctcacagttcgggaggctggaaagtccaagatcaaggcactggcaccttatgaggcccttcttgctgtgtcatcccatggtggaaggcagaaaggcaagagagatgagggggccaaactcacccttttataacagcactaatcccacccaagagggtggaaccctcatggcccaatcacctcttaaaagtcccacttcttaataccattacaatggcaattaaatttcaacatgagattttgagaggacaaaattcaaaccgtaacaacagtctttaagaatgggaaaggatagtgaagctgtactgaaactctagtcctttgtaaaaaaaaaaaaaaaaaaaa

SEQ ID NO: 2881 - DNA, 336 bp, Homo sapiens
gctcgtgccgatattagtatattgttgaacatacattatgccttagaaatgcacattctgtattttgtgggatgataatctaattcagtatagaatatgctgtttggcaatgagtttgtggccagatttcaaatagggagttaagtggtactttcacaatccaaagatttttagttaaaaatcatgtagtctaatatgctgcagttatttttttatatttttcaatgcatttaattatcttttttataattctttgtactaactcagcatgtaacaaccaatttacatggaaataaatcgaaatatgataactattatgcttaaaaaaaaaaaaaa

SEQ ID NO: 2882 - DNA, 2794 bp, Homo sapiens
gcaggaaagtgcatctatcataagtgtgcaaattgatgaattctaaaatctttattgtacctgtttagcacmtagattgacactgaacataactaacaaccagaaatctccgtgtactcccttcctgtaactacccctgcgcccgaccaaatcactctcttctaacagcataactttgtgtgactagcttttttaatgtaaaagaatgaaatctacagcatgtattcatttgcatctggcttctgccacccaacattatatttgtgggattcrtttgtacagttgcatattagtttgcagatccctcactctcatttctatatggtattatattgcataaacgtaccacactttatccaactactgttaaatatttgtgcattttctacttgggggtgatttcaaatagtgctgctatgaacattcttgtaaatgtcttttggtgaacatatgcaacacatatatgcgttgttgttggttcccaggaggggcattcctgggtcataaacaatgcgtgtgttcaggtttagtacagtataatgccaaacaggtttccaaagtgtttgtgccactttacatacctgccattattgaaaaagagttctgtttgctccacattgtcaccaatacttgatattttctgctttttttttcttttaaaccgtactagtgggtgtgcagtgatattgcaatgtggttttaatttgcatcttccttgtgacaaccttgattactgtaagccacttggaaatgtgatttaaattcatataaagatatagtagcaaaacgcatactaggttactttcgtatccagaaagtttagatagaatgatttctatgtaagcttttactgtgtagtctgagtccatgaatattgattacaaaaaacacatctgtaggtgagttacaatacctcacttataattcmaaattcatgttgtgttagctcaatatttttcaaataatttttgcatgcaattttcaccttctttctgagtagtttcaggtattttgtatggttccagcagtcagttaggttgccattgtttggaagcacacatccacgtatctgcaccatgatgatatgacacrcccataccccccatttcacattttgtcagaagtgcatagttatcactaactttgccagtagaaatgtactcccaatttcccacggacttatcttgaataatctctccactgaagcataacaggttttgaattctgttagaatagttgtttttactatcttttaattttatacaaatttcaaagttacgtaatacttttatttaaaaagtgaaacaaagcttttcctctcccttacccacatgttagtccagcagagggggaaagcattggacccaggccaaaatcataaacgctttcaattaactaataataattgctggcatgttgccattaaatattcttgtctcattatctctggttgctttatcaaacccataggtcactgaagcccacttttgagacaaagactatttctcccccaaaagtcaagggaaatataaaaaatgaaattagtgattaagaatagaagtcaattaatacawtcattttgtcttaattatttaaagtccagttttttccctccagcaaacctgaaaatacactatcctccagctatcagaattatattgagatctactcacatttatgatgatgttcagagattctcattgggaaggaaaaggcacacgctgcggcggtcttgcatgactctgttgttgtggaaattcaatttgttcattgtgttttgggctctctgggtggtcagggctgggctctgggtccttggcaattcctcaggttcccagcactccaaagccaagctcacctcctcatcacacaccctacaggagaagcattagggtgtccgactacgtgggtttcatagctgtggaaaagccaaaggggagactcctgaagaaaggcggtgaagactgtgaagagcgggtcaggaagatgagcacagcactgctactcctgtgggcacagggacagcatgtctccagccagygccaccttgtttaatacatgggaactcactgaaattcattctgtattttgcccgcaaagttttaaagmtttcatccacagtcaggaattaaacttataccaatgagagcctcacacattcaaggatgtactaagcactacaggcctcacagaaacagagatcccatcttggagttttcagtaccacatgggagataaagggttttgaacatgaaatgacaaaaacaacagcaagaagaaaattcttgtcctttttcattactatcagactcaaataaatgtcttggctcttacattacattcattcttcaaccattgtggtctggcttccacttccttcacttcaccaacatggctctgccaaaggaagcccgtgatctctaggccatcactttaattgatctytctacaacatttatcctggttgttaagccctccttacaacattcttctctctttgtttttatagctccatctctcctgcttctttaacttgataatgcatacttgatttttctatttgttatttcataaaccaattaatacacagataaaatgactgtatatcaaaccatgtttgtatagaaaaaatggattttggatgcctctcatatgtaattagttctattaaacatattaattgtattgtttaatttgtcaggtttttgacagaattttgtttacaagtaataaaaattttatctccaattttcaawaaaaaaaaaaawaaagtcgacgggccgcgaatttagta

SEQ ID NO: 2883 - DNA, 2792 bp, Homo sapiens
gcaggaaagtgcatctatcataagtgtgcaaattgatgaattctaaaatctttattgtacctgtttagcacmtagattgacactgaacataactaacaaccagaaatctccgtgtactcccttcctgtaactacccctgcgcccgaccaaatcactctcttctaacagcataactttgtgtgactagcttttttaatgtaaaagaatgaaatctacagcatgtattcatttgcatctggcttctgccacccaacattatatttgtgggattcrtttgtacagttgcatattagtttgcagatccctcactctcatttctatatggtattatattgcataaacgtaccacactttatccaactactgttaaatatttgtgcattttctacttgggggtgatttcaaatagtgctgctatgaacattcttgtaaatgtcttttggtgaacatatgcaacacatatatgcgttgttgttggttcccaggaggggcattcctgggtcataaacaatgcgtgtgttcaggtttagtacagtataatgccaaacaggtttccaaagtgtttgtgccactttacatacctgccattattgaaaaagagttctgtttgctccacattgtcaccaatacttgatattttctgctttttttttcttttaaaccgtactagtgggtgtgcagtgatattgcaatgtggttttaatttgcatcttccttgtgacaaccttgattactgtaagccacttggaaatgtgatttaaattcatataaagatatagtagcaaaacgcatactaggttactttcgtatccagaaagtttagatagaatgatttctatgtaagcttttactgtgtagtctgagtccatgaatattgattacaaaaaacacatctgtaggtgagttacaatacctcacttataattcmaaattcatgttgtgttagctcaatatttttcaaataatttttgcatgcaattttcaccttctttctgagtagtttcaggtattttgtatggttccagcagtcagttaggttgccattgtttggaagcacacatccacgtatctgcaccatgatgatatgacacrcccataccccccatttcacattttgtcagaagtgcatagttatcactaactttgccagtagaaatgtactcccaatttcccacggacttatcttgaataatctctccactgaagcataacaggttttgaattctgttagaatagttgtttttactatcttttaattttatacaaatttcaaagttacgtaatacttttatttaaaaagtgaaacaaagcttttcctctcccttacccacatgttagtccagcagagggggaaagcattggmcccaggccaaaatcataaacgctttcaattaactaataataattgctggcatgttgccattaaatattcttgtctcattatctctggttgctttatcaaacccataggtcactgaagcccacttttgagacaaagactatttctcccccaaaagtcaagggaaatataaaaaatgaaattagtgattaagaatagaagtcaattaatacawtcattttgtcttaattatttaaagtccagttttttccctccagcaaacctgaaaatacactatcctccagctatcagaattatattgagatctactcacatttatgatgatgttcagagattctcattgggaaggaaaaggcacacgctgcggcggtcttgcatgactctgttgttgtggaaattcaatttgttcattgtgttttgggctctctgggtggtcagggctgggctctgggtccttggcaattcctcaggttcccagcactccaaagccaagctcacctcctcatcacacaccctacaggagaagcattagggtgtccgactacgtgggtttcatagctgtggaaaagccaaaggggagactcctgaagaaaggcggtgaagactgtgaagagcgggtcaggaagatgagcacagcactgctactcctgtgggcacagggacagcatgtctccagccagygccaccttgtttaatacatgggaactcactgaaattcattctgtattttgcccgcaaagttttaaagmtttcatccacagtcaggaattaaacttataccaatgagagcctcacacattcaaggatgtactaagcactacaggcctcacagaaacagagatcccatcttggagttttcagtaccacatgggagataaagggttttgaacatgaaatgacaaaaacaacagcaagaagaaaattcttgtcctttttcattactatcagactcaaataaatgtcttggctcttacattacattcattcttcaaccattgtggtctggcttccacttccttcacttcaccaacatggctctgccaaaggaagcccgtgatctctaggccatcactttaattgatctytctacaacatttatcctggttgttaagccctccttacaacattcttctctctttgtttttatagctccatctctcctgcttctttaacttgataatgcatacttgatttttctatttgttatttcataaaccaattaatacacagataaaatgactgtatatcaaaccatgtttgtatagaaaaaatggattttggatgcctctcatatgtaattagttctattaaacatattaattgtattgtttaatttgtcaggtttttgacagaattttgtttacaagtaataaaaattttatctccaattttcaaaaaaaaaaaaaaaagtcgrcgggccgcgaatttagta

SEQ ID NO: 2884 - DNA, 3351 bp, Homo sapiens
  misc_feature (3250)..(3251): n equals a,t,g, or c
  misc_feature (3272)..(3272): n equals a,t,g, or c
  misc_feature (3282)..(3282): n equals a,t,g, or c
  misc_feature (3323)..(3323): n equals a,t,g, or c
  misc_feature (3335)..(3335): n equals a,t,g, or c
  misc_feature (3341)..(3341): n equals a,t,g, or c
gcaggaaagtgcatctatcataagtgtgcaaattgatgaattctaaaatctttattgtacctgtttagcacmtagattgacactgaacataactaacaaccagaaatctccgtgtactcccttcctgtaactacccctgcgcccgaccaaatcactctcttctaacagcataactttgtgtgactagcttttttaatgtaaaagaatgaaatctacagcatgtattcatttgcatctggcttctgccacccaacattatatttgtgggattcrtttgtacagttgcatattagtttgcagatccctcactctcatttctatatggtattatattgcataaacgtaccacactttatccaactactgttaaatatttgtgcattttctacttgggggtgatttcaaatagtgctgctatgaacattcttgtaaatgtcttttggtgaacatatgcaacacatatatgcgttgttgttggttcccaggaggggcattcctgggtcataaacaatgcgtgtgttcaggtttagtacagtataatgccaaacaggtttccaaagtgtttgtgccactttacatacctgccattattgaaaaagagttctgtttgctccacattgtcaccaatacttgatattttctgctttttttttcttttaaaccgtactagtgggtgtgcagtgatattgcaatgtggttttaatttgcatcttccttgtgacaaccttgattactgtaagccacttggaaatgtgatttaaattcatataaagatatagtagcaaaacgcatactaggttactttcgtatccagaaagtttagatagaatgatttctatgtaagcttttactgtgtagtctgagtccatgaatattgattacaaaaaacacatctgtaggtgagttacaatacctcacttataattcmaaattcatgttgtgttagctcaatatttttcaaataatttttgcatgcaattttcaccttctttctgagtagtttcaggtattttgtatggttccagcagtcagttaggttgccattgtttggaagcacacatccacgtatctgcaccatgatgatatgacacrcccataccccccatttcacattttgtcagaagtgcatagttatcactaactttgccagtagaaatgtactcccaatttcccacggacttatcttgaataatctctccactgaagcataacaggttttgaattctgttagaatagttgtttttactatcttttaattttatacaaatttcaaagttacgtaatacttttatttaaaaagtgaaacaaagcttttcctctcccttacccacatgttagtccagcagagggggaaagcattggmcccaggccaaaatcataaacgctttcaattaactaataataattgctggcatgttgccattaaatattcttgtctcattatctctggttgctttatcaaacccataggtcactgaagcccacttttgagacaaagactatttctcccccaaaagtcaagggaaatataaaaaatgaaattagtgattaagaatagaagtcaattaatacawtcattttgtcttaattatttaaagtccagttttttccctccagcaaacctgaaaatacactatcctccagctatcagaattatattgagatctactcacatttatgatgatgttcagagattctcattgggaaggaaaaggcacacgctgcggcggtcttgcatgactctgttgttgtggaaattcaatttgttcattgtgttttgggctctctgggtggtcagggctgggctctgggtccttggcaattcctcaggttcccagcactccaaagccaagctcacctcctcatcacacaccctacaggagaagcattagggtgtccgactacgtgggtttcatagctgtggaaaagccaaaggggagactcctgaagaaaggcggtgaagactgtgaagagcgggtcaggaagatgagcacagcactgctactcctgtgggcacagggacagcatgtctccagccagygccaccttgtttaatacatgggaactcactgaaattcattctgtattttgcccgcaaagttttaaagmtttcatccacagtcaggaattaaacttataccaatgagagcctcacacattcaaggatgtactaagcactacaggcctcacagaaacagagatcccatcttggagttttcagtaccacatgggagataaagggttttgaacatgaaatgacaaaaacaacagcaagaagaaaattcttgtcctttttcattactatcagactcaaataaatgtcttggctcttacattacattcattcttcaaccattgtggtctggcttccacttccttcacttcaccaacatggctctgccaaaggaagcccgtgatctctaggccatcactttaattgatctytctacaacatttatcctggttgttaagccctccttacaacattcttctctctttgtttttatagctccatctctcctgcttctttaacttgataatgcatacttgatttttctatttgttatttcataaaccaattaatacacagataaaatgactgtatatcaaaccatgtttgtatagaaaaaatggattttggatgcctctcatatgtaattagttctattaaacatattaattgtattgtttaatttgtcaggtttttgacagaattttgtttacaagtaataaaaattttatctccaattttcaataaaaaaaaaaaaaaaaaactcgagggggggcccggtacccaattcgccctatagtgagtcgtattacaattcactggccgtcgttttacaacgtcgtgactgggaaaaccctggcgttacccaacttaatcgccttgcagcacatccccctttcgccagctggcgtaatagcgaagaggcccgcaccgatcgcccttcccaacagttgcgcagcctgaatggcgaatggcaaattgtaagcgttaatattttgttaaaattcgcgttaaatttttgttaaatcaagctcattttttaaccaataggccgaaatcggcaaaatcccttataaatcaaaagaatagaccgagatagggttgagtgttgtccagtttggaacaagagtccactattaaagaacgtggactccaacgtcaaagggcgaaaaaccgctatcagggcgatggcccactacggtgaaccatcacccctaatcaagttttttgggggtcganngtgccgtaaagcactaaatcngaaccctaangggagccccccgatttagagccttgaccggggaaagcccgncgaacgtggctnagaaangaaagggaag

SEQ ID NO: 2885 - DNA, 2794 bp, Homo sapiens
gcaggaaagtgcatctatcataagtgtgcaaattgatgaattctaaaatctttattgtacctgtttagcacmtagattgacactgaacataactaacaaccagaaatctccgtgtactcccttcctgtaactacccctgcgcccgaccaaatcactctcttctaacagcataactttgtgtgactagcttttttaatgtaaaagaatgaaatctacagcatgtattcatttgcatctggcttctgccacccaacattatatttgtgggattcrtttgtacagttgcatattagtttgcagatccctcactctcatttctatatggtattatattgcataaacgtaccacactttatccaactactgttaaatatttgtgcattttctacttgggggtgatttcaaatagtgctgctatgaacattcttgtaaatgtcttttggtgaacatatgcaacacatatatgcgttgttgttggttcccaggaggggcattcctgggtcataaacaatgcgtgtgttcaggtttagtacagtataatgccaaacaggtttccaaagtgtttgtgccactttacatacctgccattattgaaaaagagttctgtttgctccacattgtcaccaatacttgatattttctgctttttttttcttttaaaccgtactagtgggtgtgcagtgatattgcaatgtggttttaatttgcatcttccttgtgacaaccttgattactgtaagccacttggaaatgtgatttaaattcatataaagatatagtagcaaaacgcatactaggttactttcgtatccagaaagtttagatagaatgatttctatgtaagcttttactgtgtagtctgagtccatgaatattgattacaaaaaacacatctgtaggtgagttacaatacctcacttataattcmaaattcatgttgtgttagctcaatatttttcaaataatttttgcatgcaattttcaccttctttctgagtagtttcaggtattttgtatggttccagcagtcagttaggttgccattgtttggaagcacacatccacgtatctgcaccatgatgatatgacacrcccataccccccatttcacattttgtcagaagtgcatagttatcactaactttgccagtagaaatgtactcccaatttcccacggacttatcttgaataatctctccactgaagcataacaggttttgaattctgttagaatagttgtttttactatcttttaattttatacaaatttcaaagttacgtaatacttttatttaaaaagtgaaacaaagcttttcctctcccttacccacatgttagtccagcagagggggaaagcattggmcccaggccaaaatcataaacgctttcaattaactaataataattgctggcatgttgccattaaatattcttgtctcattatctctggttgctttatcaaacccataggtcactgaagcccacttttgagacaaagactatttctcccccaaaagtcaagggaaatataaaaaatgaaattagtgattaagaatagaagtcaattaatacawtcattttgtcttaattatttaaagtccagttttttccctccagcaaacctgaaaatacactatcctccagctatcagaattatattgagatctactcacatttatgatgatgttcagagattctcattgggaaggaaaaggcacacgctgcggcggtcttgcatgactctgttgttgtggaaattcaatttgttcattgtgttttgggctctctgggtggtcagggctgggctctgggtccttggcaattcctcaggttcccagcactccaaagccaagctcacctcctcatcacacaccctacaggagaagcattagggtgtccgactacgtgggtttcatagctgtggaaaagccaaaggggagactcctgaagaaaggcggtgaagactgtgaagagcgggtcaggaagatgagcacagcactgctactcctgtgggcacagggacagcatgtctccagccagygccaccttgtttaatacatgggaactcactgaaattcattctgtattttgcccgcaaagttttaaagmtttcatccacagtcaggaattaaacttataccaatgagagcctcacacattcaaggatgtactaagcactacaggcctcacagaaacagagatcccatcttggagttttcagtaccacatgggagataaagggttttgaacatgaaatgacaaaaacaacagcaagaagaaaattcttgtcctttttcattactatcagactcaaataaatgtcttggctcttacattacattcattcttcaaccattgtggtctggcttccacttccttcacttcaccaacatggctctgccaaaggaagcccgtgatctctaggccatcactttaattgatctytctacaacatttatcctggttgttaagccctccttacaacattcttctctctttgtttttatagctccatctctcctgcttctttaacttgataatgcatacttgatttttctatttgttatttcataaaccaattaatacacagataaaatgactgtatatcaaaccatgtttgtatagaaaaaatggattttggatgcctctcatatgtaattagttctattaaacatattaattgtattgtttaatttgtcaggtttttgacagaattttgtttacaagtaataaaaattttatctccaattttcaataaaaaaaaaaaaaaagtcgacgggccgcgaatttagta

SEQ ID NO: 2886 - DNA, 1014 bp, Homo sapiens
agccaccctgctggttgcagtagagcttgtttgactatcttgtcccaagccctctgcacttccacccactccctccctctttccagaatttgggagcaggctcagaaaatgccatgccctgaaattccacctgataggaattgaagagaaatgaatgagcgattcccagcagggatcacttgccctaaaagatgaattgagccgagtttccgcagtgactgggtccttcccacacctcatcagtagactccaagccagaatgtaaatgaatgcaaagtgatctcattcactgagcttatccatcatggatattggtgccatgactgaaggcggtgttcttgtccaagagtaagacttgtgcatgtgcttttcccctccactttcctggggagggaatggcctgatgctaccgaccagtccacattctctgaacagatgcatccccagagtgcacgtgagttcatcagcttctccaggttgatggacacatggcctgtgatgatgtttctcaaagtgtatgccacacagaacactagttcgtgagttgctccatgaaccaagggtgccatggtcagataagctgggaaatgctgcgtgctgcaccttccttagcaagattcatgtgcaaaggatctgagaagtcctgtgataccaggcttaccaatccatttggtcacatcacacaccccactcctcactgttttttggtttttgttttttttttttgactaaacacactgtctcctagggacacagttctgtgtagttaacaggaaatatttattgagtttctatgtggcaggccctgaactaagctttcttttgtatgatttcatttgctccttaaagcaaccctgtgaaatttatatattgtcatcactcccattcgacaggtaaagcattcgaggcttggagagttcaagccactttccctcctcactcagccagtaagtggtagagccaggttcaaacccaggcctgcctccctccaaagtccactttatcatgcttccc

SEQ ID NO: 2887 - DNA, 1382 bp, Homo sapiens
  misc_feature (558)..(558): n equals a,t,g, or c
  misc_feature (763)..(763): n equals a,t,g, or c
  misc_feature (768)..(768): n equals a,t,g, or c
  misc_feature (976)..(976): n equals a,t,g, or c
gttttaggtaacaaatgtttgctgagcatctaatgatgatgacaataataactatgatctatggggcactggctatgggccagggcattgctaagagctccagatccttgatcttatctaatccacataagagcactatgagggaggtactgttatttttcttgttttacacacgaggacactgaagcagaatggtcaagaaggtggctcatggtccatatggggtacagccaggacccagcccatgatttcagctcccgtgcatgttccctccatccacagggcctggtgcagttctaggagctggggggatgaagaaaggaagccaaggtcttcaccctcaaacactcacagcttttgctggtagacacaaataagtaggcaattactagaagacatcaaagtgctgttttacagcaggggttggcagactgtttctgtgaarggccagacagtgaaggttttagagtctgcarggcargcagtcgctgtcgcagctcctcagsgcmaccactgcarctataaatgtatgggcmtkgctgggktccyattaaactntatttacaaaaacaggcctctggtgggattggtcggtgggtggargggtgtarcttgccccagttctggarggattggccaaatgttctgtgaggacgctgtartgaccctaaagagaggcacccaactccatcagggctcagggaargcttcctggagggggtggcscctgaatgagcatgagctggccgagacgaagagcagnctggntgaacgggtcgggtctcacaacacggtgctcatgaggaacgctcttaatgtgcacactgtcctgtgtctgcagagcctgctcgctcagcacaaagactttggagcagcttttgagcccctgcagaggaagctcttggacctccaggtcagggtccaagccgagaaggggmttcagcgggaccttcctggaaaacaggsccagctctcnaaggttgcaggtgaggggtctgtgaggcctgaatcactcctgcccaggtgctcagctgcacctggaagcagcgtctccctctagcagtaaccagcaaagcaacagctgccgtgagccagaaawttagacccttarttgagatctgacctttcacctcaacagaacctctgcttatttatctgatggttcctgacctcaaacaactgagtcttgagctcagcaaaatgacaaactgtctttctgtttactcctcagttccaaagtctaacattggtatttgtttttagaattgctttgctaagtattcttaatgagtccagaggtgttcagttaaaccaactttgggattaagaataaatgttctgaaacgtggactgtaaaaaaaaaaaaaaaaaaaaaaactcga

SEQ ID NO: 2888 - DNA, 1282 bp, Homo sapiens
ggcacgagtataattgaaaattatattagaatattttagactgacctcccacataaaacagaaatgccttctgaggcttttgtgatagttattcagcctttaattgtctctacctccactgaccactttgtcactacctcttgtgggagttattattcccaaactgtgtcattgaaaaggaagcctctcttctataaatcaacccttcaagtattttaagaatctttccaggtcacctttctccagactaaatacacccagtttcttaactttctcttgggtgatgtgtgttccaggtatgccaaatctctattatatagttttatattgcctctatgtcttctaaactgaaatgttttccattcagttttggctattatatagaagtctaaaagtctttaagttagattttctgccgaggaactgagaggaatttggactttcctggagtgaactggagaaaggagttactttagctgttgaaaatgaggtgaggctgggtagagaaagaataagaatcccttccacctggatatagggcagattggtactgaccgaggaattactggaattcttcagttgaccttgtttgttggaacatataaatgtttaaaccttttaactagagaatcagatacacatttgcatagtctatggcctttaatacgtaaggaatattcatttggctgtagcttatataatgaattggacaattatgttttttgtggacaaagatcctgaatggcatcaaaagtttaatttctttcatttcttctttgccagcttcaaggaagtgtaacagagtatgaattctcccaggaggagtttcgaaatttacaacaagaattctggtgcaagttctatgcctgttgtcttcagtatcaagaagccctctctcaccctcttgccctacatttgaatccacacacaaacatggtgtgcctgctgaaaaaagtaagtgagctaaagcatagagaagacctcttgagacagttcagtggctgttataacaaaatgccttcagaaaacaaaaagttcagtggctcttgccaaatgttagtctggtgaatgttgcggttagcatttaggactttgcatttgtattttttcccctaaaattgtgattcattcatttaaatagttttctgtgttattctctatactttttttgtattttattgtatttatttctttttctttttttctctttttttgagttggagtcttgcattccagcctgggaaacagagtgacaccctatcttaaaaaaaaaaaaaaaaaa

SEQ ID NO: 2889 - DNA, 1637 bp, Homo sapiens
ggcacgagctcgtgccgtgacatttgtatatatgtaaaggaagaccatctgtaaatttttccagttaaagtaaacaaaaaatttaatacgcaagtacaaacctgtgcagtgccctttataagtctttcgaagaagtactacaccctgccacatcaaatgttgatgatctgcttgcttagcgggagggcatttgcttactttttctctaattactttacttctactctgatcttgctgtctcagttctcctaccagcattgatacagtataaaagggaatattaagagttccatttagtaaaaggcttcaatctaaatgagatgaagggatatagaaactgtttttcctctgactaaagaaaaatgattgggatgatctgttaaagtttcgagaaactcaaataggccctatttgccaatataggacaggaaacccacagattaagtattggataatctcaaagctccttttggccaattggtgccagttttctcacccaccaatctttcctcaactgttaaaaaaaaaaacaggaaatacattgattgacatttgtcttctcttagctgtgctttgtttcaaagttgaaaaacaaagaaaaggagagaaacttacctcctgagtaatctaatcatgaatgttctaattcttggcagttgattttaaagaagaagccagacaggaacttttctcttcattttcctctaccaataaatagcaagtaaatatgtgtcatgtgattttcttcttgacatgtacttttcttctgctctccctcagtgctcttgggaagaacaattcattgatttggtaccaacctgatgcaccctgatttgtcaaaggtggtaccaggtgggtgtcagtgtcacatacaagagtaaaactgttcctagagcaaatggcgatgagagagctgaacgcggattcatgctcaagcccccagatgggggctatgtgggagactagtgggtctgtgaaagagaactccagtcagagtaagaaatacagcacaaaaatagagaatcttggtcctgagagcgcttgcaggcacttctggagcttccgttatcatgaagcaaccggaccgcttgagactatcagccaacttcagaaattgtgccatcagtggctgaggccagagatccactcaaaagagcagatcttggaaatgctggtgttagagcagttcctgagcattctgcccaaggagacccagaactgggtgcagaagcatcatccacagaatgtcaaacaggctctggtcctggtggaattcttgcagagggagcctgatggaacaaagaatgaggtaagaagaaagattgcctacatgtacaatgaagtaggataaaagtggatatatcagaatggaggagttatcagagaattagacagattaagtcgctcttctgttgctcctttaggacagctagcaaggatctgaaatgacatacatgcatcaatagtccacaggtttcaagatttctggcagagcctttccttgtcttagagaaaataaatgcattttgtcttctctagggccagggtgaattgatggtggtgggcctagtctggcatgggcaaggacaagagttgagttcttaaaaaaaaaaaaaaaaaaaaaaaaaaaaaaaaaa

SEQ ID NO: 2890 - DNA, 1522 bp, Homo sapiens
ggcacgagggagagcggggcctacggcgcggccaaggcgggcggctccttcgacctgcggcgcttcctgacgcagccgcaggtggtggcgcgcgccgtgtgcttggtcttcgccttgatcgtgttctcctgcatctatggtgagggctacagcaatgcccacgagtctaagcagatgtactgcgtgttcaaccgcaacgaggatgcctgccgctatggcagtgccatcggggtgctggccttcctggcctcggccttcttcttggtggtcgacgcgtatttcccccagatcagcaacgccactgaccgcaagtacctggtcattggtgacctgctcttctcagctctctggaccttcctgtggtttgttggtttctgcttcctcaccaaccagtgggcagtcaccaacccgaagacgtgctggtgggggccgactctgtgaggcagccatcaccttcagttcttttccatttctcctggggtgttggcctccctgggcctaccagcgctacaaggctggcgtggacgacttcatccagaattacgttgaccccactccggaccccaacactgcctacgcctcctacccaggtgcatctgtggacaactaccaacagccacccttcacccagaacgcggagaccaccgagggctaccagccgccccctgtgtactgagcggcggttagcgtgggaagggggacagagagggccctcccctctgccctggactttcccatgagcctcctggaactgccagcccctctctttcacctgttccatcctgtgcagctgacacacagctaaggagcctcatagcctggcgggggctggcagagccacaccccaagtgcctgtgcccagagggcttcagtcagctgctcactcctccagggcacttttaggaaagggtttttagctagtgtttttcctcgcttttaatgacctcagccccgcctgcagtggctagaagccagcaggtgcccatgtgctactgacaagtgcctcagcttccccccggcccgggtcaggccgtgggagccgctattatctgcgttctctgccaaagactcgtgggggccataacctgccctgtgcagcggagccggaccaggctcttgtgtcctcactcaggtttgcttcccctgtgcccactgctgtatgatctgggggccaccaccctgtgccggtggcctctgggctgcctcccgtggtgtgagggcggggctggtgctcatggcacttcctccttgctcccacccctggcagcagggaagggctttgcctgacaacacccagctttatgtaaatattctgcagttgttacttaggaagcctggggagggcaggggtgccccatggctcccagactctgtctgtgccgagtgtattataaaatcgtgggggagatgcccggcctgggatgctgtttggagacggaataaatgttttctcattcagtcaaaaaaaaaaaaaaaaaaaaaaaaaaaaaaaaaaaaaaaaaaaaaaaaaaaaaaaaaaaaa

SEQ ID NO: 2891 - DNA, 1344 bp, Homo sapiens
ggcacgagctgaagaagaagccgccgcagcagcaccacaaggccaagcgtaaccggacttgccgaccccccagcagcagcgaaagcagcagcgacagcgacaacagcggcggcggtggaggcggcggtggaggcggaggtggcggcggcggcaccagcagtaacaacagcgaggaagaagaggacgacgacgacgaggaagaggaggtttctgaggtggagtctttcattttggatcaggatgatttggaaaatccaatgctggaaacagcttccaagttgctcttatcaggtactgctgatggtgcagacctcaggacagtagatccagaaacacaggctagactggaagctttactagaagctgcaggaataggaaaattgtccacggctgatggtaaagcctttgcagatcctgaagtacttcggaggttgacatcgtctgttagttgtgcgttggatgaagctgctgctgcacttacccgtatgagagctgaaagcacagcaaatgcagggcagtcggacaaccgcagtttggcagaagcctgttcagaaggagatgtaaatgctgtgcgaaagttactcattgaagggcgaagtgtaaatgaacacacagaggaaggggagagcctcctttgtttagcttgttctgctggatactatgagcttgcacaggttttgttggcaatgcatgcaaatgtggaagataggggaatcaaaggtgacattacacctttaatggctgctgctaatggaggacatgtcaaaattgtgaagttgctgctagctcataaagcagatgttaatgcacagtcttcaacaggcaatacagcacttacatatgcttgtgctggaggctatgtagatgttgtaaaggtgctcttggaatccggtgctagtattgaggaccataatgaaaatggtcatacccctcttatggaagctggaagtgctggacatgtggaagtagccagattgctgctagaaaatggggctggcattaatacgcattctaatgaatttaaagagagtgcccttaccttagcttgttacaaaggacacttagagatggtgcgatttcttttggaagcaggcgcggatcaagagcataaaacagatgaaatgcacactgctctgatggaggcttgcatggatggccatgttgaagtagctaggttacttcttgacagcggtgcccaagtgaacatgcctgctgattcatttgagtcaccattaactttggctgcatgtggtgggcatgtggaacttgcggctttacttattgaaagaggagctagcctggaagaggtcaatgatgaaggttatacaccattgatggaagcag

SEQ ID NO: 2892 - DNA, 1399 bp, Homo sapiens
ggcacgaggtatatcttgtctgtcagctaaattgtgtccttaagggcaggacctgtgtttcagacatctttgatatttaccatgtttgtcataaatttagtgaatgtacagtatattttggttttaggcgagcagtgtatctgtcccttttgctgcttgctagttctgccttacaacttccactggaaagagctttttagtgcagcaaatagtgtctgcattttattgtataaagcattgcctgggccataccaaatcattttgacagaggtcatttcagggatgccacaggcttcataatgctacttgatgctagttgtagcaaattgcacttgggttttggtagttgtgagtatagtgttgtctccttccaccccgccttgtgtgttaatcactgactgccaggaaatctctttgacataacatcctaaaaagtttttgttatcagtagggccctgtaacattttttttccttttctaaagcctatgccttcaaattttttacaagtgtcttattccttctaaattgagaactaattgaatattttttcttgtagataaatcttattttaaatatctagttatcattactttgcattctccttttctgattttatgttacattaccaatatcttatgatatttaaacttttttgaactctgctttttaaaataaataatataaatgcctcaattatctggaacttacactgaaacactgtaatcttgtctctgagcctgcttcccctcaaaaaatttagatttagcttttcagatgcttatagctagccaagtaagtgagaataaacacaaaaaggctaaaatatgcaagttccggagttgtcaaagcttcatgtaaaatgtgtcattgtggaatttaaaaaaattctacgctttttcatcaaggtttttggttggggcatttagacacttcctgaaatctggcattctcctaggcactgggataccatggagaagaggcagatatggtcttggctcacatggggcatataatcaagcagtaattcttaaccttggacagacttgagtccattatgccaatggtcatctccactttgccatgccattttagttttccctaagtaaaaactacgcctgtaatcctagcactttgggaggccaaggcgggtggatcacctgaggtcaggagttcgagaccagcctggccaacatggtgaaacctcatctctactaaaaatacaaacattagctgggcgtgatggcgcgtgcctgtaatcccagctactcaggaggctgaggcaggagaatcactcgaacttgagagacggaggttgcggtgagccgagatcaagccactgcactccagtctgggtgatagagtgagactcagtctcaaaaaaaaaaaaaaaaaaaaaaa

SEQ ID NO: 2893 - DNA, 3261 bp, Homo sapiens
ggaaaaagctaagcaagtgcttaaaataattgctactttcaagcataccacctcaatctttgatgactttgcacattatgaaaagcgtcaagaagaggaggaagccatgcgtagggrgagaaatagaaacaaacaataaccgtatgargatgtcctgttaaatttacaacactaacgatgtagactctggaaatgcctaataagtcaaagaagacgtattaaagctcttttctgcttaaggtgacatctttgaacactttaacacaaagttgactcttctcgtaatggttttcatcagcgcatctgcccttatactcttcaccaaacacacttgagaactgtaacttcgtcaagcactttctgtcctgaagcttttaccagtatctgctgtcttttgtaattatgcatcctagctaaggcacagaagactgaatgaatgcaaggattcattaactctttgaatttgttaaatactaacagttaaccattagaagtggttcaatgatgtaagagtcacactgcttcaactttttctttgttgtagtttttaaattgtcgatttttagctatttgacagattaaaagcaaaataatcatgccatatttagtcctggagttcaagtctaaatgttgatgtgaaaaattattgtagtaaacttttaatatggcaaagcaaccttaagctctattttagccaaatgaaacataatctgaaattatattagaacatttcccttgtcttcaaactgtttggtgtaacagaatattgatatgcagcttggtggatttcaccagttaatgcacattcttcttccctcctccccccattaatatgtatactgaaaaatgtgcatttgtctgaggaattattttgtttgctaccacttaatgaatctcaaaattttgagtaaatgtacctcagtctaatcagactttttatgacctttataactacatttaaaacccttaattcctatttctgggtgtttgcgagcctgattgctatcatgaagtaaaaatttattactctaggtattcactagctaaataaacatagttcttgtttagcaagcatatgttgttcctcagctcttttctccagcttttgcagtgtcctggcatccttaaaatactttgaaaatatggccttgatccatggattaaatcagtatctaagtgaatgtgttgatgttttattgatcagatctatataagtgggaatacagcatatatctggatattcttatagttatctttttaacatcttatttttttcattaattacatatcaacattaattttgtatcttgaagcaaattgattttgtataattaaatgtgtcaagcatctgtattaattgatttgatggcataaggttatgaaaataatgtactgccccatgtattactgttccaaaaggagaaagctatgtagaaagatacattaagggtgaaaatagcaatacagtagatttgaataccttgatgttttgcattacttcatttatgtttacatcatgtttagaaatgttttcatttactgtggtctttggtcacttcagctcaaagacctagtgatggatatttctttgaggctttcatttatataattttattttgtacaatgttttttttaaatgtgcaaatactgtattcaagtgaaaaaaatacagtatttgtagataaccatagctactacacagttcttcggtagtcccagtgtagttatatcagtgtttactgaagggaacatcaaaatattaatggtatattataaaataaagactttcttaaaggaaaattgcacctattttacctttttaagagtaagccatgaaatcttgtaacatgtctcttaactatttataatgaaaagtggcatttgggtatagtcaccacagcaatgttctacatccctaagattatctaggtaggacatgtcaaagatgactgttgtcattctggaggtcctattagagaatattataaaagggtgaccttgtaggaaggatctgagtcctccccctgaggttctctttttcttggtgctttattagcaactctggatatttttataaaactagttacattataaacggtttcaaacatgtttaatttacattaggtttttatgtaagagtgtcatggaagcactcagcaagcaggctgattgcaatagactcagacatgcgaataaatgtaattgagagtctattcatggtgaggagtacatcccagtgcctttaacctggatttctaatcttaagtgaaatgggtgcagcattcctttggaaaaaaaaatctttttattttcaagtgataattttgtgtttttctcatataagttttctccagagcacccaccttctcttccttcttggtctgtcattatattgcaaaatatttttcctctgaatgaaattatcacaggttgtctcaagcacaaccaactgaatgtctcttaactgtggggaccaaaagggagagagcctggggtctacaagaggagacacatcatcaaatgtttgaatgatcacaaattaagacattatcagcccagtaaatttcttgcttaatgtttttccaagttctggcttgaatatttcttattaaagctatcttatgtgggtattttattttgaaaggtattatagtttgtatatttaacagtaaggaggaaactgtaaccaaaattagtatttctctatacgtattggtacttgaagattcctttcaaaagaaatccagcgttttcctaattttagtacttaatttctctttttaatttaagtgatctttctaattcgaaagctgtgttctttttgaataccgtgcatgggggttaagctgatgttaaaacagtttgcaataaaaaaaaatgaatcagcttaagtcatttaatcatttcaagtgcattctgcatcctttaaaaataagtttaagaaatttaagagaattgtgttttcattaagttttgcatatcttttgttatgccatgtaaattccctttttcgtatgattaaaggaaggttatgataaaatgattagttcatttacattcacttgtagcaattacatgagaatttgaattttgtcgtgtttgggtttgttcattcctgtgaatgatggtacagttaggtgagattttctgttatggtacccaaactcaccatttggtcctctttaatctttgagggtttcaataaaaattgttcactcaaaaaaaaaaaaaaaaaaaaaaaaaaaaaaaaaaagggcggcc

SEQ ID NO: 2894 - DNA, 1594 bp, Homo sapiens
  misc_feature (1090)..(1090): n equals a,t,g, or c
actcgtgccgaattcggcacragggaaactttggaagttcattcttaaaaattttataagtaatatatgagtacgtttttatgggatattcaaaccacctactgtttttaggtcttactctcttrtgwtgcagctgttgctgatccctgtagagtaaagtacacactgaaggctatggcaatgatctaccgttccagcttcctctaggaagggagtttgacaaataaaatgctagtgaactggagcacagtgagcaagggggaggtggcatgagctgaggacacagtgggcaggccagaacacacaggcctggacatcacctcaggaacttgcatgttatttggagcataatggaaaaccattagaaagttttagggagtggttatgatttcatttatttatattttataaagatctttctggttattcggtgaatagttatggttaaaccagttcaacccagtgacagtacctgtcacatagagttattgtgaggattggttgagatgtatgtgatagattatctggcacaaagtaagggccccctcaatattgtttttctctcaagtgcacccaaattggggtattggaaacacttcctccgtagtttggtagaaggcaccaaatcactagggctgataccgtttgagtggggccccagctgatggggcagggggtaaaggggtgaggggcttaatatgaggcagaaggaagggccaggcctctagaactcatcccaagccggccccattctctggctccctgtacatcctgcctttccatagaggaagccagtcccaggggtggctgcatcttattccatgcttwacatctcatcagccttgctgactttccccagcctgctgtagatcagagtgaaatctgtttttcctgtctagagcaagcgcactttttcctgaggatttccaaatattttgaattcccatatgcagtggaagccgaagaagctggagggagagtggggttgggaggtgcagaggttccatgtcttcttgcctttatgaagcttctggcattgtgctgggtgcaggtgatccatggaataagatggatgtggttctagtgacgnttcacatcacgaaggaccatctgtgtcctcttagggagtctggctttcctgctaagggcaacaggaaggcattgtagggtctgtgccaggataccaagtgaaggaagagatttccttactgtggacttgcagacgataagtaaacttttgggtcataagagaccatctcttggaagctgaagaacttaggccaaggttttcctgagaaatctagttttgcagaatgttgtgaaccttgatgctctggtgacagtgaattaatggtttattttaggaagcactacacaattttacttaagagtgaggctagaaagttgagctgtttctcaccttttataaatgaagtttaagatcagattaatctccatggagtttttagctcaaagcacaattagttttctatagaaagggcttgggctgaaccaaattatgccattgatctgcctggtagacatacaaatcattctgttcttagaaaaaaaaaaaaaaaaaaaaaaactcgag

SEQ ID NO: 2895 - DNA, 1455 bp, Homo sapiens
ggcagagcccaagctcccttggactctgtatgttccaactgcatactgtgcttatgctaatgaatttcgttgttgccttgtctgtccctctgactttgaagacagaggcagtgagtacagatgtttgacacagtgcccagtacatatatgatcttaatatttgttgactattaacatcgttgttattgttaataattatagaatgtactgttaactttttttaactttttaaaaaatcttgttttttatagcctcaaggaataggttctcctagtgtctatcatgcagttatcgtcatctttttggagttttttgcttggggactattgacagcacccaccttggtggtaagtaatcttttaaattatttaacactgactccaaaatctcttcttcttcagttttggaggaaaatgtgggccttttccctttgcacggttaattctcccaccagtattgttcagtattcaccagtattttactggttgtcttttccaactgttaactctcccttacctttttttgggaggggggtggcgtggaggtgtttgaatttggacttgtcactgggcatgttcaagcagaggctctgtaactactctgagtaaaatggaagagattcttaaaccgacaggtttagaaaagatgatgtctgtgacctgcatgactcggcataattactttsaggttcatttatgcagctgmctttmcaaaarcaggtttctgttcatttgggctaagtacctagaagggctattctttaatagatctaagctgattttacccaaattctcccaggtttgaaactttagaaaagacctccctgcccgaccaaacaactcagaagatagccagttttcttatattggtgtagataaggggaatggaaggagggaaggactatctatggtaaatatctataccatcttgaaaggagtaattatgataaatgtacagtttaccaaatcctagaggaatagagttttaaagtaatatactatgttttcatgaaggtttttataaaaaagttatttaatagaaaaattatgtaagtagattgaactagcctaagaacatttacagtacatatttcttgatatatttattgacagctgtgtaattgttactatctatacataaaatattgatgtttagcagttgcttatgcctgtaatcccagcattttgggaggctgggtgggcagatcgcttgggctctggagttgagaccagcctgggcaacatggtaaaaccttgtctctacaaaaaatgcaaaaattagttgtgcatggtggcatatgtttgtagtcccagctgctcgggaggctgaggcaggagagtcgcttgagcccgggaggcagaggttgtagtgacccgatatcgtgccaccacactccagcctgggcgacgggagtgaaaccttgtctcaaaaaaaaaaaaaaaaaaaaaactcgag

SEQ ID NO: 2896 - DNA, 2020 bp, Homo sapiens
gaattcggcacgagccgcmttaactttaaattcggatacttttaattctttggttatggtttgttggttgctaccactgtgggtcactgtcttatccttcccagtagggagagatgtggctgctcttctgattttcacctcctcttactaatttaccctgtggtgggaaacacatcaactgatagtgttatttcatgttaagtaaaggcaaatagccaccttcctcatttgactgaaactcaatgtgtcacattctacctcttttcttagtccttaaagacttctgtcatctgttagtctgcaggctcttaaggtcaggctctgtcttcccttcatctttgtagcttctactcttgtgcttccctcttgatgtaggccctgaatcactgttttgttgactaggagagcacatgaactgtttgtgcaacctctcaagctccgttagaaatggaagatgatcatacmtcytgtggcacccctttttcccagatcccaagcttccgggcaccctttctttcttcacctccacagatgctgccttcacccaccctttgatgaaccatcttgatcaactgccaagaatgtcaagggcatttctaacgccagggcaacagctatgagcacttatgagaccacatcaggtttgactcctgaacgaaggatgtccttawccatggkcyctttttcctggcaggcatcttgctgttattttggaaattttctctgggccgtaraggtttgaaccagtcatgtctaggagcgtttgttttctcaggaaaagcaaccctgttaaagccattgttttaaaaagtcacttggarcmttwaaaacctttgaccatccattcataaggctaaaatttagragtggggcttcaggcaagcaatattgaattaaatgtgtggagcactttaagmcagcatttgattgacatttaaaatagggaatgcaaattgaaattcctcctgggtgctttaaatcatgcattatatgtgcagtattttcaattagctgcagaaaaaaatatgttcggtgtggctgtatttttacagctgggaattgctcagagamcmcaattgactatttcatccatgtgagatttatttaaatgactcgtggggcatttgcagtttagccaataattgaaaatattgttgcaatgtggcaggtaaacctaggaaatcatttcgcattcctgaagaggtgttccaagctcagcagcatattatattagttgaagaggggcaaacggagtgagatcagtgttgagttctagtctttcacatttcattcctgggttttgccccaccatggaaatatatgggatggtgctttccagaaggacctgaaacgctaaggtgttatcttgtttctattctgtttttatatgccaamcwcaaatgaatggtcagaccagatatggaaagacccatctatcccccaactctcttctgactcctatacctttctttctatttttcgtaccatttcacttcagaagtcacctggaatactgatgcaggaggctaagctgagtctctcagggtagacagttcaacctttctatggttgttcataaatattactagggatttggaatgcatgttcccactaaaatgatgtaaatgtggttaggtgataccatattaaaatgcatcatcacttgtgcgattcagacaaagtatgggttaactaggcattgtgaaggcagaattaaaatactaaccaccaccactttctctgtaatagtggttgccaaccaggggtgatccttcctctctccttcagggacatttgtcagtgtctccagacatttggttggtccatctgggtggggtgctattagcatctcttgagtaaaggccaggaatactgctaaacattctgcaatacacaggatagccccctacaatgaataattatccagacccacatggcaagagtgacaaggttgtgaaactttgctctagaaatgtgtacattcttttttttaaaaaaaaaaaaaaaaaaaaaaactcga

SEQ ID NO: 2897 - DNA, 1774 bp, Homo sapiens
gaaaggtacctctagagctgcagcctgaaactgtacattttaaataaacccttgggggttatcatgcccagtgaatttgagaatggccctcaggtgaatagactgatgctgggacagcagcagcccgtggctgatgtgctgagcttactgcatcccctctctgtgcccccgggctccctggagcaagatggagtataatcccgccagccaggattttaggacagggacatagccctccgaacgatggtggaagtcagtgggtgccacatgggatgaagactgagagggaaacccttagaattggctgggcgtggacaaagcggggaaaaaagtactgaccaaactcacttcagtcttggagaactcaaggaacaagggacacacatacgtacacacacacacaggcatgaacacatcagacacatccttcagcctgcatactttagcttcagatagacttttcttttactagaggcaaagtgatctcactagaagaatgtgttcctcaggagctgctagatggcctgtcgctctgtgcccgctcactgtggacggctgccccacgtggatgtccataccacagtgggatccacggcctcactcaaaagagagctatggttcccagatccctgacaagagggccacaatctgaaaaggggttcctggttagctcttttaggcttagcctgagaacagaattagcctcatatttttaggccatttgccatacacattttctctcattctcaactgatacgggtggggggagattttcgaaaacagtgatgttggtaatttatagttagtaaataaaccatgtttccatatgcaaggattcacaccaggggatcctgcccacaggtatctggaggtcaaattcgtatgtgctttctgccaatctgagccactgcctctgtgtctctgagaataatatactctgcaagaaggaaagacgcacaagcaatagtgcagtcttcttagcaggcggaagtcagcacggtgtgccccctgtgtaaggggagttgcgctaagcaatgtgtttggtgattgacagattctctgccccagattctggttacctctgattagtagatgcggacatggaattaagggtaattgaaggatatttatcgagtcagacatacaccttagaataaggcttttactgttctagaaacaatattccagaagatgaaatcatccaggatgccccaaaaatatttatttatacaaagattttgagagtaatattcatacttgtctttatacctcagtctatgcgtctggggccaagtcactgtgtggcacatgtgcagcttccccgaatgcctcacatgttgtagcacctgcttccaggaacaccaaatgaacacagggtcttggaggggaagtgggggaagaacccataatgccccaaggctgcatggaaccacaatccagaaatgtgcatcctgacctggaaggcgtctaaccaagtgtccaaggggaaatatgatcgagggagaggtgagaggagggacccagagggcagacaggagagggttgatttccaccctttcttctgcgttcagcatatccaaaaggcccaatacagttgatgggccaggaactgcatgacctggattttctccctgtagtgacccacgatgttaattgatgtagaggacagtttgcaaaagtaatagatttgcccttaatcmcagacagtatgagatacaattctgggactttgtcttcgtaacctgtctttaaaaaaaaaaaaaaaaaactcgag

SEQ ID NO: 2898 - DNA, 1619 bp, Homo sapiens
gtttgtaataaaataccagtgaaggacatgtttggatatctgttaagcatttttccctgactaatgaattaggaaagaaaacataaaacataaatgaatagttatgtctcttctaataaacagtgtcattaatgctgcagttgtgggtcaaacttagggagccttatttctaaatagcaaaaattctgttttcacttcagcccttattttttttgttagtttttctctgcactgtgatacagagctaataagaggaaatgtgacgtttcagagagagagcaagcaaattgggtatgacttttttaccctatgttccccaatactggggatgtttggctactttgaacagcagtttttagtgatctaaagtttagatcaatactcgtataagagaaaaatctaactctcagtgagctccatagggcagcacagctttccatcttctctttcgccttcttgcgtctgcccaccacagtcccgaagaatgcacacgcacatatgatctgtacccatcccgcccgaagagtcatagaatcctcttctttcacttgtttcttttttcttcgtttgtttgtttttgtttgtttgtttttttaagctggggaccactgaagtaagctctatatgcacccaaagttccccttggaaaaattttcaacacgcagtgcagaaggctccagtgcagctaaatgccacaccattggttctacctgggggaatagactgatttgccctaaaatgactccaacctgcatcattaaggtacagttggctccagtggattagtgctgaaatgatgggaagtctgacacttgttgacattgtcttcatctgtttggaagggttgaatctgttcctctcaacagtgatagttcttttcactgtatagtattgagtatgtctcagggattccttgtggaaattagggcagtttttaaaataagaaaatagttttaaaagaaactaaaggtgactcatcattgaagagagcggaagaaagaggaaacatttggttttgtagcccacagtgtcttgcataggactttttcctttctcctccaggctctcatctcagcttcagaatacagaatcctttcccatcacgcacagctttaaaacttttatttaaaaatttccttccccaatgagctttcagaatacttattgtagattttaagagaaaaggtatattaatttatgctattaacatcacctcataaattataagttttatactaaagctgtatcgagtgtaatgaattatgttgcctatgtgtttaatagctaaatatatatgagcttttttttttttttttttttgacgaaaacaaactagtaagcacctttttacactggatctgccgtgtcaaggtgtatagctatcctttgctaccttgcagatatataaaataaaaggatatcctggggcctcaaaatgtagaaccctttagaccatttataactgttcctagaactgttgagaatcatgttctttagtaaatgatctgtggtttacacttaagatggctagaagcttagttacagggtttgttaaaaaaaaaaaaaaaaaaaaaaaaaaaaaaaaaaaaaaaaaaaaaaaaaaaaaaaaaaaaaaaaaa

SEQ ID NO: 2899 - DNA, 1921 bp, Homo sapiens
gcagaccccaaagcgcctgtggtgctgctgagtgagccggcctgtgcccatgccctggaggctttggctactctcctgcgcccacggtacctggacctgctagtctccagcccagcttttccccaaccagtgggttccctgagtccagagcctatgcccctagagcgttttgggcgccgcttcccccttgccccagggaggcgtctagaagagtatggtgccttctatgtagggggctctaaggccagccctgacccagaccttgacccagacctgagtcggctgctcttggggtgggcaccaggtcaacccttctcctcctgctgtccagatacagggaagactcaggatgagggtgcccgggctggacggctaagggcacgaagacgatatctggtagagagggccagagatgcccgcgtggtagggctgctggcaggcacactgggtgtagcccaacaccgtgaggcactggcccacttgcggaacctgactcaggctgctggcaagcgtasctatgtgttggccctggggcggcccacccctgccaagcttgccaacttccctgaggtggatgtctttgtgctattagcctgtcctctgggtgctctagccccccagctttctggtagcttcttccagcctatactggcaccatgtgagctggaagctgcctgcaaccctgcctggccacctccaggcctggctccccacctcacacattatgcggacttattgcctggctctcccttccacgtggctctcccaccacctgagtcagagctgtgggaaaccccagacgtgtcactcattactggagatctccgacccccacctgcctggaagtcatcaaatgatcatggaagcttggctctgaccccacggccccagctggagctggctgagagcagtcctgcagcctcattccttagttcccggagctggcaagggctggagccccgcctgggtcagacgccagtgacagaagctgtgagtggaagacgagggattgccatcgcctatgaggatgagggaagcggctgataccatgtggggctggagacatagatggacttatgaatggctgctaggacctttagtgctccctgcaccaacctcccatccccctgccaagatccttgaaggaccctggaaggagggagagcaggcagcccttcacaggataggatccgtctctgtcctgtcctggcactggcacaagctcagcacatgcccagtaatgcgtgttgtttggctgatggaataaagggcttagggacttccctgaggcctctggacccatctgtcttcctgagggcagcccaggacctttggccaatcccagttcccaggctgcagttgagggtctgtccttgtcaaaaggcaggtgctagacagtctagaccagggtttctcaaactcgtacttgacatttggggccagataattctttgttgtggggctgtctggtgtatggtagggtgctcagcagcatccctggcctctgcccactagacatcagaagcactcccccagttgtgacaaccaaaaatatctccagaccttggcaaatgttatctgtgggggaaaattgccctcaattgagaaccactggtctagctagacctgcactgtccagtacagtagccactaaatacatgtggctaaacttaaatttaagttaattaagattaaaagctcagtttctcagtcacattagtcattcaagtgttcagacagccacatgaggggacagtgcagctacaggatatgccatcatggcagaaagttctrttggttggacagygttggtctatactgactcttatttctcagggagatcacagcaacctaaataaaccagataccttttcaaaaaaaaaaaaaaacaaaaaaaaaaaaaaaaaaaaaaaaactcgag

SEQ ID NO: 2900 - DNA, 1920 bp, Homo sapiens
gcagaccccaaagcgcctgtggtgctgctgagtgagccggcctgtgcccatgccctggaggctttggctactctcctgcgcccacggtacctggacctgctagtctccagcccagcttttccccaaccagtgggttccctgagtccagagcctatgcccctagagcgttttgggcgccgcttcccccttgccccagggaggcgtctagaagagtatggtgccttctatgtagggggctctaaggccagccctgacccagaccttgacccagacctgagtcggctgctcttggggtgggcaccaggtcaacccttctcctcctgctgtccagatacagggaagactcaggatgagggtgcccgggctggacggctaagggcacgaagacgatatctggtagagagggccagagatgcccgcgtggtagggctgctggcaggcacactgggtgtagcccaacaccgtgaggcactggcccacttgcggaacctgactcaggctgctggcaagcgtasctatgtgttggccctggggcggcccacccctgccaagcttgccaacttccctgaggtggatgtctttgtgctattagcctgtcctctgggtgctctagccccccagctttctggtagcttcttccagcctatactggcaccatgtgagctggaagctgcctgcaaccctgcctggccacctccaggcctggctccccacctcacacattatgcggacttattgcctggctctcccttccacgtggctctcccaccacctgagtcagagctgtgggaaaccccagacgtgtcactcattactggagatctccgacccccacctgcctggaagtcatcaaatgatcatggaagcttggctctgaccccacggccccagctggagctggctgagagcagtcctgcagcctcattccttagttcccggagctggcaagggctggagccccgcctgggtcagacgccagtgacagaagctgtgagtggaagacgagggattgccatcgcctatgaggatgagggaagcggctgataccatgtggggctggagacatagatggacttatgaatggctgctaggacctttagtgctccctgcaccaacctcccatccccctgccaagatccttgaaggaccctggaaggagggagagcaggcagcccttcacaggataggatccgtctctgtcctgtcctggcactggcacaagctcagcacatgcccagtaatgcgtgttgtttggctgatggaataaagggcttagggacttccctgaggcctctggacccatctgtcttcctgagggcagcccaggacctttggccaatcccagttcccaggctgcagttgagggtctgtccttgtcaaaaggcaggtgctagacagtctagaccagggtttctcaaactcgtacttgacatttggggccagataattctttgttgtggggctgtctggtgtatggtagggtgctcagcagcatccctggcctctgcccactagacatcagaagcactcccccagttgtgacaaccaaaaatatctccagaccttggcaaatgttatctgtgggggaaaattgccctcaattgagaaccactggtctagctagacctgcactgtccagtacagtagccactaaatacatgtggctaaacttaaatttaagttaattaagattaaaagctcagtttctcagtcacattagtcattcaagtgttcagacagccacatgaggggacagtgcagctacaggatatgccatcatggcagaaagttctrttggttggacagygttggtctatactgactcttatttctcagggagatcacagcaacctaaataaaccagataccttttcaaaaaaaaaaaaaaaaaaaaaaaaaaaaaaaaaaaaaaaactcgag

SEQ ID NO: 2901 - DNA, 2206 bp, Homo sapiens
ggaccacttgaagtcattgaagggaactctctggagatagtggagttcttagtctctgccctttgttcttaaaatattcagctgcattttaggtaaggtagtgatctgccttcaattgcaaatagttgataatatcacttttaatgtagactaaagccaacatttttcatgtattgttctatttggagtaaataacacattttggcatggttcttcatgtcttagcatctgtcagttttcatgtgaggactcagtttacaggttatatacagcacatgttgagcgtggtcagtgggtattgtacctgaagtacgtacttcccttctgttgctgatattgtcatgagcagttccaccctcagtgtttacctctatgctttgaaatcttctctcaaacgcatattcattcctawtttttgtaccctttgggattcctcaatctcatatacatctttccatttctgacctaatcccagcactttgggaggctgagccgagcatagtggggtgtgcctatagtcccagctactcaggaggctgaggtgggaagatcacctgagcccgggagctggaggtttcagtgagctcagatgtgccactgcattccagcctgggctacagagcgaggcctgtctcaaaaaaaaaagtctcatgacttcgtctcctagatgaraccatctctagctgatgcctttgcttgcattctcatgtgcagggccagcagatactgatggarcagatgttctctgargctgtaggtgctggggcacaratcttttcctcatcctactacctartgaargggaraaatgacaagcgaagcaactgcaggtkaaaaktgtttggagaggtttctatasggctccagtctatgcactgagcccaggcatagacttcagagatgcttcctgaaaagaagttggcaagatatgagggaggagggcgcagctcctgattcctctgacctttctattgtgggtttgatgccccctccccacctgagtcctcatgggcagctgtgttttgtttttttttgttttgttttgttttgtttgagacagagtctcgcactgtcgcccaagctggagtgcagtggtgcgatctcagcagctgtgtttttaagaagtgtttctactcctttccttactcaatcctgaccctgtaaaattcccacttgctggctgccccctccccaaggaaaggccgccctctgcccctccacagtgggtggtgcccggagtcaggggacaggtctgggctttcctattcttgctgacccagctatagagaccgtgctctttcccattcagagagtcatagctacttggtttttttttgkttgktttgktttgktttgktttgktttgkttgtgtgtgkgkcttttattttacgcttggggktgkctttttaaaactttcttttawtcttttatcttgggawaattacytattttaaagwaagccttgkttgkttttgkctgktaaaaatctttacagccatccagcttatatcaacttttttatttcctgccaggcaaaaagaattaatagaaaatggcagcccaagaggtaagatacgcagtctgtccacaccccaracagggcaggataaatgcctttcttggttctaataagccctgaagagatactccctgtagcaccaagtcatttccctctgctgcccctttgaggtgactgtattcccaaaagtagtcagtgtagaggaatggatggcccgtttaggataggtagttgcacagattatctctgagggaggtgactaagaagctgaactccaaagacaagacaaaggaattgatgaacagtatcattctcttaactctgggatagggattctgtgaaggttaatgtatgctcttttttctagggagaagatccctttatatttgattgtcctggggatctgtggcccagagtaaaatcagcagtcccagctgtatagactttcaggttcattatggttgtgatctgaaaaccttggtcacctctgtggtatgtgtcattggattctagctacttgagtgaagtggctcctgtgcattcttagaagcgagtatgagagaggatggggtggagttccagttttactagagaaagctctcaaaagagaattttgatacccaacttgaaacctggaaaattaccaagtacagcttcgtgttaaaaaaaaaaaaaaaaaactcgta

SEQ ID NO: 2902 - DNA, 2597 bp, Homo sapiens
  misc_feature (588)..(588): n equals a,t,g, or c
gagatttaagtcgaatgccctctttaaagggaacaaaagctggacctccaccgcggtggcttagaaggaggcattgtttatttattatatattttgtaatgttattaccaatcttgttatactctttcttataccctacaattgttagcagaaattattttaaattaataagatcctgcatgcttttccttaaaaaaaaaaaaaagaaagaaagaaagatctctgtgtagagtgtcctattctgagccagtcctgagaggaaaggaagtataatcaatttgttattaaccgatgaaagaattaagtgaaagataaatctcaggaagcagaggaagtaaacctaatctctgactaagaaagctaaatactatgataactcatcattccttcttttgttcaattacattatttaatcataagtccatgacgtgccaggcactcaggaaatagtaaaaattggacgtgcgatattctgcccttgtgtagcgcacactagagtgggaaagaaagtgcacttttaactggacaactaccaacatgatgaggggaggaaacaggggctggaaatgtccacggactgtgccgaanaatgaagcccataatatttgaaagtcagtttcttccatcattttgtgtattaaggttctttcttcccctgttctccgccttcctgcttgtcatcttcactcatcagctgaccatgttgcctcttgtggtgtaaacttgtaccagttttacggtccctctggccagttcacccatgaatttgatggagatgagcagttctacgtggacctggagaagaaggagactgcctggcggtggcctgagttcagcaaatttggaggttttgacccgcagggtgcactgagaaacatggctgtggcaaaacacaacttgaacatcatgattaaacgctacaactctaccgctgctaccaatggtatgcgtccaccattctgcctctctttacttaagctatcccttcataccagggttcattattttcttcccaagaggtccccagatcttcttatggcaattgctgaaattttatcatctcccatctctaaaatcacatattcccatgtaatacaagggtctttccattatgcattcagcaaatccttctaggagaggtctcatcaacctcctactttattaaacatgcccacagagagaaggcacaggaataaagcagagcaatgtgtcattgctcccaagcagaaggtaaataagacctctttgactatcaggtggtgaaatgctggtaggagggctcttccaggatgtaatgcagaacttcagggcagagctattcacacttcacaccagtgctgtttcctcaccacagaggttcctgaggtcacagtgttttccaagtctcccgtgacactgggtcagcccaacaccctcatctgtcttgtggacaacatctttcctcctgtggtcaacatcacatggctgagcaatgggcacgcagtcacagaaggtgtttctgagaccagcttcctctccaagagtgatcattccttcttcaagatcagttacctcaccttcctcccttctgctgatgagatttatgactgcaaggtggagcactggggcctggaccagcctcttctgaaacactggggtaaggatgagtttcatcattttttgattcttttctgtctcacttttttttttgaaagaataaagcaaaaaaagcagagatttattgaaaatgaaagtacactctacaggatgggagtgggcctgccacttcatggttttctaaatgatagacttcactctcctccctaagctgggggccttgagtctttgtagagccaaccctgtaccccatcccatcccacacacatgcacatgagcaaactctggcattctgacctcaacaacttcacttccacagagcctgagattccagcccctatgtcagagctcacagaaactgtggtctgtgccccttggggttgctgtgggcctccttgggcattgtggtgggcactgtcttcatcatccaaggcctgcgttcagttggtgcttccagacaccaagggcccttgtgaatcccatcctggaagggaaggtaagattgagactggttacagttgaagcggcagtatgaaaggaaggaaagtgggagggcgttgtggacatgaatgtggtttaaagttgtaggggaattgggaagtggcatgatgatgacacaggacccccctcagacccattgatctcatgtctgccctgttgcaggtgcatcgccatctacaggaacagaagaatggacttgctaaatgacctagcactattctctggcccgatttatcatatcccttttctcctccaaatgtttctcctctcaccttttctctgggacttaagctgctatatcccctcagagctcacaaatgcctttacattctttccctgacctcctgattttttttttcttttctcaaatgttacctacaaagacatgcctggggtaagccacccggctccctaattcctcagtaacctccatctaaaatctccaaggaagcaataaattccttttatgagaaaaaaaaaaaaaaaaaaaaaaaaaaaaa

SEQ ID NO: 2903 - DNA, 1075 bp, Homo sapiens
ggatgactagaatcccaacactgtattttctatcttccttttgttttcttgtattttaaatacaagaaagtttaataactgaaaagttcaagagaattgcccaggtgtacaagaattataagtgacagagctataattaggaacacattgttaatgacttcaattcacttttgcttctaatgctgccctgttatctttgctgtcattatcccttattcttcccatcttaaagaaaataacaagaatagtatataamctgtaaatamcacatttatgtttatgattgttatatatgaaaacaaaggcttgcatagatggcatagaaatgggctttattaaacaattgaaacatagtgagagataaaggaaagtcaccacaaagccttgcttaatcatcagagtaagtggactgatgtcaatttagctccccttgccctgttaatcttctctaggatgttgatgaaaaaaataagtctgacagctacggttctctgtggtcattgtctatacgtatttctccatggcttccaccagtaataatcagaggcagttgctttgtttgatgttatgtatagaatacgtaatatcagcattgtagaaatggtactttgaaaaaataaggtagtataaatcaattaggaggagcacaggctttggtgtcagtgcaccttagtttgaggtctgtttgtttgtttattttgagacagcctgggtgacagagtgagaccctgtctcaaaacaaaaggattattagaaagtaccatgcacaggccaggtgcggtggttcacacctgtaatcccagcactttgggacgccgaggcgggcagatcacccgagttcgggagttcgagaccagcctgaaaaacatggagaaacaccctctctacaaaaatacaaaaaattagccgggtgtggtggctcatgcctgtaatcccagctacttgggaggctgaggcaggagaatcacttgaacccaggaggcggaggttgcggtgagccgagatcacgccattgcactycagcctgggcaacaagagcataactctgtaccaaaaaaaaaaaaaaaaactcgag

SEQ ID NO: 2904 - DNA, 2778 bp, Homo sapiens
ggaattcggcacgagaaacgttaaagaaatggagaatgggaacttacctggttggcactgtagttagtggccatgatcttgtgctgtttacactcgttgcttggcaactgcagaaggccgacctcctgggactaccaatgagcagaggctgcctttctcttctgcttattattattcacttccttggctcacactgcccccatttgttttctctggaacttagattcatttttattttacagacgggaaagactgagtaaatgtgagaaaattagctgaatagccactactttttttctggcataacctacccctgcttaagaacttccacgggcctttgattggggtttttaaccactttaacaaaccatgtaaccctgagagctatgcttgttggacaacatggtgtaatgtaccacaggctgtagagccagatactggggtttgaatccttattcaacatgggaacataggagctatatgacattaaacaactgtcttgtcttcactaaatttctatcaactcatttgtattgtggggataatagagcctgcttttacagggtaagtgagataaaatgaataaagtgtctagacaatatcatagcatagtaggtattcaatcctggtgagatcctgtttataaggcccactactttgtcttatcaggcagaataacaaaggaacaatatttaaaaagcaactagctcaaatctgtccccagaaggaaaaacatatcttgtccttggtccttaaaaaatttcctctgtcactgtctagaatcagcacctaagaacacaggcgtttagtgttgactggaataaaatggaatcgggtgctggtgcagggagattgagcagggatgaagagagaaaatcacagagtggaaaggatcaggtttggagagttcaatggggggctgccaggacataagcctaatatgtgtgggacaaggaaacccctctgaaactcataaaatggtattgtaatacccatctatgaggtggttaggagaattaataagtaagtagaactgtgctttgtgaattgtaaagtgaatttatatataaggtgtcaagatgaaagggaaaaactaagaaataagttgcccaaagatatcattaggaccaggagaccattataaagtatatccaggccgggcacggtggctcatgcctgtaatcccagcactttgggtggccgaagcagacggatcacaaggtcaggagttcgagaccagcctggccagcatggagaaaccctgtctctactaaaaatacaaaaaattggccaggcgtggtggtgcatgcctctaatcccaagtagttgggagtataggcatgagctaccatgcccagctaatttaaaaaaacaaattttttttaagagatagggtcttaactatattgttcctcttgtcttgaattcatggcctcaagtgattcttcgacctctggaagtgttgagattacaggcacgagccaccacacccacccaacatggtatatcattgttttaaatttgcatttctttaattagggtgtttttatatgtgtataaactgtttttattttaatttttttccctgaaaatggcctttaatgtattttgccacttactattgggctgttgacttttttttttgaaaccagtcctccctctgtcacccaggctggagtgcagtggcatcatcttggttcactgtaacttctgcctctcaggtccaaacaatcctcccgcctcagcctcccgaataactggaactacagggatgcaccaccacacccagctgattttttaattttttttgtagagatgggattttgccatgttgcccaggctggttttgaactcctgggctcaagccatctgcccacctcagcttcccaaaaagctgggattacaggcttgagccactgcacccagcctgttgatcatgttcattaatctgtttgaactccatatattaaggaaattagtcctttgtcaaatatgttgcaaatattccctccaatttgtcacttactttcattttgttggtggtttttctgttttgttgttgtttttctgtgggtttttttttttttttttttgccatggacatgtttttagtacttatgtagtagtcagatgtattactcattttttctgtgctctggatcttatgctttgaatggctttttgtgaattccaatattttaaaaataatttacccctagcttcagttcttacatttaaatatttgttccttctggaattttagtgaatgtggacaaggttatgcttcagttgccttaactagttgccttggcatcattaataagttttcttttcctctactgatttgaaatgccatttttaatgtattccctaacatatttgggtctgtttctggatcctctaacccactgttctagagagaaaggtgatcgttttagattatttgtctctctgtaatctaaaatccaaggtacacgctgggcacagtggctcacacgtgtaatcctagcactttcggaggctgaggcaggtggaacagttgaggacagaagttcgagaccagcctgaccaacatggcgaaactctgtttctactaaaaatacaaaaattagctgggcatggtgacacgtgcctgtagtcccagctactcgggaggctgaggcaagagaatcgcttgaacccgggaggtggaggttgcagtgagccgagattgcgccactgcactccatcccccgggcgacagagtgagactccatctcaaaaaaaaaaaaaaaaaaa

SEQ ID NO: 2905 - DNA, 1904 bp, Homo sapiens
ggcacgagcaaattacagatttaaaatgttagttaatttggttcaaaacctctaagcattcaactcaccagactactttttcgtatttaaaaaatgtttaaagatcaatgaagttggagattttctttcccactgtttagaatttttgttgtcagctgtttaattttttaattctgtagaaagtagaataatagaagtgtgttggtttcggtaaaagtaggcatggctgccatgctcattcagagttgtagcctctgatttcccaagacagtgttaatagggggcgtgcttctcgtgtttttatagacagtgctcatttacccatactaatggctttgaagtatatggtatgattatttttgcaccacatttaactttttgtttgtattttgcttaagataatattaaagttcagctgtgatttctaagtacatactaacaggacaatgaggcacagtaacctagaagcattacatgatgtggatgtgggtggaatggggccctgattaaaaatmcaatgtgttgttggcamcacagtaagcagatacyccaaatatgcataatctggacttaattmcagaattggataaagcagtagcttcattttgcagagtagtggtcatattagggaggccgaagcccaattttgttggttatctaaaccagggaagaggagatttcaaataatttcagaacggtctcttgctgcctctcaaaattcatcaagaccattcctttttgttggggtcctcaaaagagaatttttaaattttttattattaaaaatttcgaatatgttgttacaaaagtagagggagcaatgtaaaaacttcatgtactcttatgtagcttcaacatttaatagtccatagccaaccttgactaatttacatctttaatttctccccagctccatgcctcaaattcttttgaaacaaatctcagactccatataatttcatttctaagtatttcagaatgtatccctaaacgatatgaactcttggagtttcactcttgttgcccaggctggagtgcaatggtgcaatctcggctcactgcaacctttgtctcccgggttcaagcaattctcctgtctcagcctcctgagtacctgggattacaggcgtgcgctgccatgccaggctaattttgtatttttagtagagatggggtttctccatgttgatcagcctgggaatcatagcaaaacctcatctcaaaaaaatatttaaaagttagccaggtgtggtggcacgtgtctgttgtcctagctactggggaagataaggcgagaggattgcttgagcccaggagttcaaggctgcagtaagctatgattatgccactgcacttcagcctgggcaacagagcaagaccctgtctctaaattaattagttaattttaaaaaaaatactgtttttttgtattttattatcttcaatttataggaattaatatgttatttttcgtattgatagtgatactgttctcttttcaaataatgtatttaagctttaaaatattcagcatggccgagtgcagtgtctcatgcctgtaatcccatcacttttggaggccatgcaggtggatcacttgaggccaggagttcaagatcagcctggccaacatggcaaaaccacatctctactaaaaatacacaaattagctgggcatggtggcacacacctgtagtcccagctactcagggggctgagcgtgaggattgcttgaacctgggaggtagaagctccagtgagcgaggtcacgccactgcaccccagcctgggcaacagagtgagactatgactcaaaaataaaataaaataaaaataaaatattcagcaaatagcaaacagatagtgtgcactgttgtggtaaaaaaaaaaaaaaaaaactcgag

SEQ ID NO: 2906 - DNA, 1918 bp, Homo sapiens
  misc_feature (9)..(9): n equals a,t,g, or c
  misc_feature (28)..(28): n equals a,t,g, or c
taacgcctnccttgacggcctccacaangcactcttcgccactcagcgcagcttggagcagcaccagcggctcttccacagcctctttgggaacttccaagggcwcatggaagccaacgtcagcctggacctggggaagctgcagaccatgctgagcaggaaagggaagaagcagcagaaagacctggaagctccccggaagagggacaagaaggaagcggagcctttggtggacatacgggtcacagggcctgtgccaggtgccttgggcgcggcgctctgggaggcaggatcccctgtggccttctatgccagcttttcagaagggacggctgccctgcagacagtgaagttcaacaccacatacatcaacattggcagcagctacttccctgaacatggctacttccgagcccctgagcgtggtgtctacctgtttgcagtgagcgttgaatttggcccagggycaggcaccgggcagctggtgtttggaggtcaccatcggactccagtctgtaccactgggcaggggagtggaagcacagcaacggtctttgccatggctgagctgcagaagggtgagcgagtatggtttgagttaacccagggatcaataacaaagagaagcctgtcgggcactgcatttgggggcttcctgatgtttaagacctgaaccccagccccaatctgatcagacatcatggactcgcccagctctcctcggcctggggctctggccaaggatgggctggaggtcattcagttggtctgtctcttccctggaaaccttctgcaaagatggtgtggtgtacgtggcttccctgtaaccacatggggcttggccatttctccatgatgagaaggactggaatgcttctccgggcaggacatggtcctaggaagcctgaaccttggcttggcatgccttctcagacagcacggcctgggctccaactcttcaccacaccctgtattctacaacttctttggtgttttgctcctcctgtggttggaaacttctgtacaacactttaaacttttctcttgcttcctcttctcttctcccttatcgtatgatagaaagacattcttccccaggaggaatgtttaaaatggaggcaacattttggccaacattggaaagcactagagggcaatgggattaaaccaacctgcttggtctctattagtcagtaatgaagacgacagcctggccaaccaagggaaaggaaattagtatctttagtttcagtcattccttgtaggatatggtttagctgtgcccccacctaaaatatcatcttgaattgtaatccctataatccccacatcaagggagagatcaggtggaggtaattggatcttgggggcggttcccccatgctgttcttgtgatagttctcacgagatctgatgattttataagtttgatagttcctcctgtgttcattctccttcctgccaccttgtgaagatgccttggttcctcttcactgtctgccatgattgtaagtttcctgaggcctccccagccatgtggaacagtgagtcaattaaacctctttcctttataaattatccagtcttgggcaattcttgatagcagtgtgaaaatggactaatacacttgtgtttatctgtaatttaaatttcatgtctttttctccttgccttacatagggtaaagaccaagaaatgccaaacgtgaactaaaatatgtagggccttcaacttttttacttcctccagtatcttaggaccatcgtaattcttgttagcatctctaaccaggaggcagctgagggaggagggaaagaagactgtaaaaatccccctcactaatgatcaactttggaataaagtgatgcccttcaaaaaaaaaaaaaaaaaaaaaaaaaaaaaaaaaaaaaaaactcga

SEQ ID NO: 2907 - DNA, 1768 bp, Homo sapiens
  misc_feature (1277)..(1277): n equals a,t,g, or c
  misc_feature (1327)..(1327): n equals a,t,g, or c
  misc_feature (1364)..(1364): n equals a,t,g, or c
  misc_feature (1478)..(1478): n equals a,t,g, or c
  misc_feature (1543)..(1543): n equals a,t,g, or c
  misc_feature (1554)..(1554): n equals a,t,g, or c
  misc_feature (1639)..(1639): n equals a,t,g, or c
  misc_feature (1649)..(1649): n equals a,t,g, or c
  misc_feature (1653)..(1653): n equals a,t,g, or c
  misc_feature (1655)..(1655): n equals a,t,g, or c
  misc_feature (1668)..(1668): n equals a,t,g, or c
  misc_feature (1671)..(1671): n equals a,t,g, or c
ggcacgaggcctttaaaagcttctgctctttccaacccagcctgaaggggaaagccacctcggaggacaccctcaatctaaggtaatggcgggtagccatgctgtctgggcatggcactgccctgggctttgatgttcctcctctggcctcatcccactctaaagaagtcttgcagagagcatgcccaactgtttccctcatttttctctctcctattcctatacatccttcatcctactcctggaattccttctggccagttaaacctctgtgaaacagacttgaagtcttcacatgccctgtggctttttcaaacccaagtggcaggaagccatcctctgcctttggtgactgggcaggtggcacagaggtgtggagtcaggcccagccttggaggtcaggccctcccgtgggggtgtgtgagcaatcccatgctgtccctcctgtgatgagggtttctgaacgcttagaagctaaattcatacaagttggtgtgcgaatcacacattaatttaggaatctgtgctatggggcgtctctcccagtgaatgaattgcttgcagtcccccccgccgccgccaggtcccctttccagctacccagttctctggaaggccacttagggatcagtaggtgtttttatttcagtcggggtgagaatagaagaaggtggtagctggttttctacaggaatgtgtggggaccaatcaagagggtgtccccaggaatgacattcaagatatttataatcagtataaaatgggtctcactaattccttcaaaattatttattaatagcttgtgatacatggtatttgcttgttgatggagcaacaagcaaatagaaaaaaaaaatcccctgtccttattgagttcacattctcaccaggaggacagacataaaccaatataaatgagtgaactataaagcatattagataattataagtgtaagtgtaaaaaaccaagcagatagaggtgggcattgaaatcttagatgaggtggcaagcgaagcccttatcaagaaaacaatctttgaattaatacttggccgggcgtggtggctcactcctgtaatctcagcacttggggagaccaaggtgggcagaccacctgaggtcaggagttcaagaccagcctggtcaacatggtgaaaccctgtttctataaaaatacaaaaacttagccaagcatgatggcaggtgcctgtaatcccagctacttgggaggctgaggtgggagaatcgcttgaacccaggaggtggaggttgcagngagctgagatcgcgccactgcactccagcctgggcgacagagcaagactntgtctaaaaaaaaaggtggagaaacatgttatgcagntaattgagtaaagagtgtgtcagacccagggaagagcaaagcaacaacaagtacgcggccagcagctacctgagcctgacgcctgagcagtggaagtcccacagaagctacagntgccaggtcacgcatgaagggggccccgtggggaagacagtggccccttcagaatgttcataggntttaaaccctnaccccccccccggggggcttgagctgcaggatcccagggggggggtttttcctccccccccaaggcattaagcccttttccctgnactcaattancccncnataaattttctcnttntcaatcaaaaaaaaaaaaaaaaaaaaaaaaaaaaaaaaaaaaaaaaaaaaaaaaaaaaaaaaaaaaaaaaaaaaaaaaaaaaaaaaaaaaaaaaaaa

SEQ ID NO: 2908 - DNA, 2196 bp, Homo sapiens
ttttttctttgttgactagaacctctcgtccctcttgactttcatgggcatccttctgatatttatcatttaatgtaatatttcccttaggctcctcatatgttatcaaataagatttttcctgtctatttccagttggtcaagagctttattttcgttgtcggttgctgtttgtttaccttaggtggaaattagattttcaagtactttggcctttgatactaggtatcaataaagatggtaatatatatgttctctatttatctgttaatgtggtaaatatgttaccttaataggtatctttaaatttacctgtcttacattcctggattaaatcttatttggtcatatttttaactattcagctggatttatcaagattttatttggaaaatttgtacctatatttataaataaggttctgtagttttttcctgatgtcttttttcattttttggtatcagagttattctgtccccatttttcctaaatataaagcttgatgttctactctttattgattttacattctctctgagtaatatctggtcttaccacttcaattatatgtctccttataccattttatcacctaatattctgtcagaggaccctatgtaggcagctatggttgatatttcaaatgttttcagaagacacagaagaaggagaaagaagaaatatgtggataaaaccagtgttttctattcataacttatgtaacatatatagctgactatgtttatggtgtctatcataaaaatgtataaagatagtcttttgatatattaagttgtatattctgagaaagtccttttttgtgtatgtgtatatttatgtatatatgtagtctgtatatgttttcaatacccatagcccttttcccactgaactggacggaaccttattgccattacaatgttttttcagagaagagtgttaatgcaataaagaaaagttaagtttcttttttctgagttctaagtaggctcctgaaacttctagttggcttaataatcttgacacacaagatagtgtatttcaagcagctgagctatatgaaatagaaaagggttttgagtttttaaaataaagctctgaagatatcagtgcataaatttatttttattttaacttttaacaacagattggaaagaaattagccaaagagtgagatgatctcatcacattattaaataagtgttgccttggttagaaggggagttgaaacaaggttcaggagacatggcagccctgtgttctgcctttctttcctctacagcctgagaccagggataatgatagaagctccctttagttgaagatttgagcattggagatttgtgcttcactctccaggtgaaagccaggggatggcaagcgttatctaaggcccctgtctgatgatagtgtgctggtggcagagttggaatggctgcacagcctgcttcttctggaattttgtgaagcaacaatgtcatgggtgtgtcccatattgaatgacatggtatcacttagatggagatggttaactatatgagagaagtctgtagataaagcaggtagaagatagttagcaggctcctatgggcccaggaaggcagttgagacttcatgcacttttgggcagaacaagggagctggatgcaagaccagtgctttaaaggacctcacagtaatgttgagaagaagccaggaatggtagtatggattacatgattagagtctactaagactacagatagttcactgaaaacccgatcacacaaatgctgtgactagagacttgacaggtgccaaatcagagtgctacaggtccaatgcctctcaccgataccatgcggctgctgtgtgaacttccctcaccacgtaaccctcaccttagggaagagaaggatgagaagtcatgaattcttaagatgagcatatgcagaaattactgaggaaaatcagaatgatgtaagcttatctagaaatgactagattatgttttctgatacttggtgctacagaagcatgagagagaggaggtaagttctattgcagaaaacagtatgaccaggcacagtggctcatgccctataatctcagtactttagaaggttgaggcacaatgattactcaaggccaggagttttagatcagcctggtcaacacagtgataccccatctctatcaaaaaaaaaaaaaaaaaaa

SEQ ID NO: 2909 - DNA, 1561 bp, Homo sapiens
atgtcagaggcattttaggttcttcatgtttctcccactttcagttgattaccattacaggatcttaggcttctttttatctttttgcagtgccttgcatccactggttgtttgttttttctgttgggcactacttatttccttacctctggtttcttctcctacagcttatgttctgaaatgtgtattcctaaaatactgttttcctcttgttacttttctgctcgaggacttccagtaacttaccattgtttataaggtgatgttcaaacccttcagtctggagactttctgccacctatctgactgtacctttatcttcaagcttatctctttccaamcaagaggctcatttagcagctttctctgattgccatgttcatcctacactmagcctcattcagtttacagcatggaaactgtataggacctctttcctatagaaattgaagmcacttaaataggaagaaaattaaaatatacatttggatacatgagtattccagtcaaataatatctataaaataccagatagagtataaaagacaactgamggacaacagagtgatgaaaggactttattaggcatttggatttggttatgatttaaatttcaatttaattagaacgtttccatggcaaggaaggaagcatggaggactgtggaaaagtcattcagtattgagttcatttgcattagaggaatttcatagtttaaaacttgtatatctttacctatccttcgtatgttttcttcttaagcatatttgactttttctacctcagcatctgtataagaaaatatttgtgagtcaratgtttgtgggttttccttacctattattattttcttccatgctttacaacacattttttaaactaccttgttcttaaataattacacggacctgcttctgtgtactttcacagaatctttgacagttaaaaattgtatgttatataaaaatttgacaagcttctacagttaggaaaagcctttagaaatctgccttccccaaaccgtatgttatcatarcactcatgtctccccatgtctaaaaggtaaatagatacagaaacctcaccaaaagttgaatcatctgtactaaaccactgcttttttatccagactttttatataaatcttttattttccaaaaaactgatcttttacctacccctcttagagttaaaaatattgcctgtcaggcaagagtatagtatgccaatataaataatatgctttatttggttagaaacagttggtttgggaagctagcaacatagcatattctttacaaatttaataaggtgtattttgatactgtgataacctgcattgtaaattaccaaatggttggaattgaccagtttatacttattaaaatttttgatgtgccaatggctatccaattcattgcatttgtgaattgtgcttttagaaaaattgtggacattttagttttatatacatatttatgagttatttgtgcatatgataaaattatatataataataaaagtatatatgtaacttaaaaaaaaaaaaaaaaaactcgag

SEQ ID NO: 2910 - DNA, 1963 bp, Homo sapiens
gattagatattaaacacttcaaccacataagaatattgaggactgttgaatgagtcctgtgctctggtggtcctggaacttaattttatttatgaattttcagtcattagagaagagtatggtgtggatatgggaggttggattagccgactaaactttgaagtttgcaactttagcagatgttgggatagaagttaacacagtagttcaaattgatttcgcacttcatggtttatagaaatgctttcacattcatatctgaatatttgaaacaacctagtgggtaggtaggtaagcaatttkatctgtgtttcccatggaagaaactgaggctgggagatgttcattgtttgttatccaaggtcatatagctagtaagtagaagagtccagatgcaaacccaggccacctgaacaatgttcacatcattttaccatggagaagagattagtgcttttatttgtctaacactctggtcagtgaaattaaagtatctccgtgtgaaacagcatgcaaaaggctttgtttctaatatttttaacaaatccctttagatcgttgggaattaaacaaatmcctagggcagtgtggacttacctgaagtcttttgacattttatgaagttctgttaaacctagaaataaagtcaaataaattttttattgctttagagacatagttattggaagttatttatagtttaaatatgtagccataataattattcgtgmctatatttcaagatagtttattcagcaagcacttactgagaacctaccatgtactgggcactgtgttcttaaaaggactaattgatgagctcagtctagtgggggagatgagtaaaccagcaattataatacagagtactacttgagtagaggtacgcatagggaaaaccctgtaatagagggagcactgtctgtgttacctaatgcagacttgaggtaattcgaaaaggcatgttaagccatgtgatgcttgagtacaatcttgaaagcatgttaatacttaacttggtaagaacattttaagcgaataacagcctatgcaaatacacagaggcatttgagaatgcggcacttagagggagctacaaatagattgacatggcaagagtatgcactgactgttaagggatggaaggagttgagaccagagagagagagacatgattaggattgtgaagagccttagatgacatgcttttaaaaagttagtactttttcctaaagataattgggagtcattggtgaattttaatagggaaatgcttgctatccatttatgtttgcaaagattacataatagtgtggaggatggaattggtggtgcaggatatgagattggaagcaagaataccagttagttacgatagtaaccatgtcataaatgctccacgtccaaactggtactgacattagagagaaaagaaagaaatttgagaaataattagaaggttgagatttaactagtcttggtgagagagagagatagtcttcagatgtggtttggacaaatgggtggatggcgatgctggtcaaagccaatacatggttgaaaaagccggtttctgtggctagagggtgttgatgagctcagtttgagatattttgagttgaaggtacctgtgggaatttacggttagaaataactgttaggaggctgggcatggtgtctcacatctgtaatcccagcagtttggaggctgaggtgaacagattgcttgagatcaggaattttgagaccagcctggtcaaagtggtgaaaccccatgtctactaaaaattcaaaaattagctgacatggtggcgggcgcctgtaatcccagctgcttgggatgctggcttgaacctgggaggtggagtttgcactgagccaagatcacgtcactcactccagcctgggcgacagagcaagtctcaataaagaaaaaaagaaaaaaaaaaaaaaaaaactcgag

SEQ ID NO: 2911 - DNA, 1300 bp, Homo sapiens
ggcacgaggttatttgtattttacctggcaaccctatgttggagcctccttccctgctgcagccaacaggggtagaggatctgagctgcttatttgtaactgaaagtccatgggactgcttttatttgggggaatttttctgttaactgtcattatgaaagtgatcacgatgagagattcagatttatttttaaaattcggtggaggaatatctcctcattgatttagatctttgatttttttcatcagaggttttgttttcctgctatagattttgcatatcttttgttagatttatacctgagggttttgtctttttggagtgtgtgtgtgtgcacgtgtgtgctaatgtgtttttaagttcaaatttattgctggcatatagcagttgatttttgtatattatccttgtgaaaggagcaaaagacctgatggagctgttgtttgggggcctttcatcctacctcatcacttctgcaggacagccccttgggaagcccccaggtcacttgttttggggctcctgaacgtctcactagttggccacaggaagtccacttgaagtttttaaaaagagggcgtatcattgttttgatgcctcattcccgccaggtttttctatggccccacatggtcacagcttttgaactgctttttgctttttggctgcattgttctccgtgagtggtgggttcagtcctggcttcatactgaaatatctgcaaagttttaaaaacaaacaaacaaacaaaaaacaaacaaacaaaaacacccatgcctggtctggttggggggtgtaacggagcttttttttttttttttttttttgttctccaggtgattctacagcccagcttgggttaagaacatcttccctaaagtctcaaacaccaaaatcccctttcctgtccaaaaaaaaaaaaaaaaaaaaaaactttttagggcagttagtccatcttaggtaaggaaggaaggaaaactgattaaatgaatgtacactaaggtataagtagttgctagcccaactctcctgagcccctttttccctcctgccacaggcacctgccaccccgtctctactaaaaatacaaaaaataaaataaaataaaataaaaataaccaggcatggtggtgcatgcctgtaatcccagctacttgggaggctgagacagaagaatctcttgaatctgggaggcagaggttgcagtgagccaagatcgtgccactgcactccagcctgagtgacagagcaacatcctgtctcaaaaaaaaaaaaaaaaaaaaaaaaaaaaaaaaaaaa

SEQ ID NO: 2912 - DNA, 1146 bp, Homo sapiens
ggcacgagcccgcctgtaatcccagctaccggggaggctgaggcacaagaattgcttgaacttgggaggcagagtttgtagtgagccaagatcacgccactgcattccagcctggccgacagtgtgagacggtcccagaaaaaaaaagaaagaaagaaagaaaaagaaaaaacttggggtaatttatgtccagcttaagtacctgaacagtttccggaaatgtatattttttttctgagaggcaaaggatgtaaacagcttctaagtagctttaatgtttctgtacagaaataagtttatccctgtaacattgtggtagagttttaatacagtatttagttttttattgggcttttttaaaaagttaacttttaacatagctgctcagggattaaatcagattggaaaacccattctgactccacatactgctacaaagaaatacatcgttgtttatattgagctgcaggagatagtacactttaaacttaagaaagttaaatgtttcacaataacattgcaatataatcttcagctactctctttccattggtaaaatctctgatggtgtgataactctttgccaacctacgaaacccatatctggaagaatcaccagctcccgtgagcagcttcatgtaaatagatgcactccaagcagattgcatgcctcaggtgtttgtcttctagtaatcatggagtgtgcaacacccagagtaacactacaaggggcaggactgcaaacagcaggtcctggctaaaaacccttaatgctgcattgctgccagttgtaaagagatgcctgaatggaggcaagttctgccctgtgggtgaaactgatgatgtactgtactggcatatataaatccactaaatccagctaccaggaactgcctggaactgtggccatgcatttttttttttctttaaagaccagtgtgatagtaggccatgcatctgagatacgatattccttggtaactagagggagaaaaaaaaaatcaagtaggttcaggcttatgttgtattttgagagtctggttttatttgaacagaaataactctacagaaagctcttgtaaataatgctcaaatttgcacccgacgatcaaatccattaaaaatgaatcttgtaaaaaaaaaacg

SEQ ID NO: 2913 - DNA, 1472 bp, Homo sapiens
cccccgggctgcaggaattcggcacgagcagtacctaaaatagtggctggcccctatgtattgggtcatagcaggtactacattcacctctctactatgtttaatacagtttatttcccttgtgtgtgccttgctaaaatatttatgtttaaatttctgtatttgatacacattgtgaaaggacattttcaagtctaagtcccatgacttgagtttgcctgtgtctcccattaaaagctctcaattacaccattgtgtgcccagtacctcgcattgtgcctggccagtgttggacagtaaataaaaattcagtgtcttattcactgaggtatagtgcctaaaacagaagacattccataaatatgtgtggaatgaatgacttaaatatttgattaatgaagtttaagttgagcaaagaaaggagaactagtagcttagatttactaagaatactatgccacatttatttgtttatttttagagacagtcttactctgttgcccatgctggagtacagttgtatgatcatagctcactatggactcaacctcctgggctcaagcaatcctcccatctcagcctcccaagtagctgggactacaggaatgcaccctcttccctggctaatttttaaatttcctgtagagatggggtcttgctatgttgcccaggctgtcctcaaactcctggcctgaagtaatcctcccatctcagcctcccaaagtgctgggagtacagatgtgagccaccgctcgtggcctatgctacatttattttaacatctttatcgttcacaagtaatttcacaggtatccccttacttgagtcttgcaacaactctatgaggtttattttgccagatttatagctgaggaataagactcagaggagtcagagggcttctctaagattatttagcttgcagattggaacttgaacccaagccttgactcctaattttatatttgtatgaattcatacaaatgtcataggaaattatccacattttataactagaattatagaattagaagtggcctcacacatcacaaatcctgaacccctcactcatttttcaaagaggaaaataagaattggaaagtttatatatgtatccaaaggtacacatccagtttaggaatttcaaaaagctggctaggcacagtggcacatacctgtaattccagcagtttgggagcccgaggtgggtggatcacctgaggtcaggagttcgagaccagcctgaccaacatggcgaaaccccatctctactaaaaatacaaaactagccaggtgtggtggtgcacacctgtaagtaatcccagctacttgggaggcggaggcaggagaatagcttgaacctgggaggcggagattgcagtgagctgagattgcaccactgcactccagcctggacgacagagggagactccgtctcaaaaaaaaaaaaaaaaaaaaaaaaaaaaaaaaaa

SEQ ID NO: 2914 - DNA, 1117 bp, Homo sapiens
ggcacgagaattaatctaggctcttaacctttaaaaaatgtatataatgtttacatatgtttataatgtcacgccatttatttcatttaaaattttaaatgattttatctttggtcctctcttacaacttattcttggtacaacttattctttgtactataacagcagagatgagtaattgggacagactagcctccaaagcataaacttatttatgatttggccctttacagtaaaagtctgctcatcccaggttttgcttgtcaatttatatactggcgtttgttcctgatcctatttatttatttctggcatccaactctggtagttctttctgaatcagtttaatgaagtttgtaaatgatgtaattaaacgttatttattacttttatttttttctagagatagggtcttgctgtgttgcccaggctggtcttgaactcctggcctcaagtgattctcctgctttggcctcccagagttttgggattacacgtctgaggcattgcactcagacacttttatctaaagtttatatactgttaaactaaagaaaccatatacaaatttcaagtcaggtgcttttactcattttataccttgattcttgaatggccagattttctgaaaatacccagttaatgattagattatgctacttcagtcaccacgtgtttgaaggctgatcacagaaaactagaagcaatgtaactagtttcaaaatataattaaatggaggaggaagtgtttggcttttttccctccagaccacaaattggtaggtaaagtaaaagttagatttgaaaattgggcctgggtgtggtggcttacacctctcagcacgttgggagtccaaggtgagtggatctgttgagtcccagagtttaagaccagcctgggcaacatggcaaaatgccatttttactaaaaatacaaaaatgtagctgaatgtggtggcgcatgcctgtagtcctggctacccaggaggctgaggtgggaggatcatctaggcccaggaagttgaggctgcagtgagccatgataatgccactgtatgccatcctgggcaatggaaatgagagacccccgtctcaaaaaaaaaaaaaaaaaaaaaaa

SEQ ID NO: 2915 - DNA, 1797 bp, Homo sapiens
ggcacgagctgagagggccatggagaatctgtggccagccctccctggccccctgacctggcagaggaaggaaagggcattggagtaggcttctgtcttcaggccagagggggaggtggttcaggggcaggcttggtgcaccccttggctgcaagctatcacctccctatctgcttcctcttttctgcctcccctggtgcatctggtcacttcttgctgcccttcctgtgaaatcgtggcaccttggaccaagtcctgaagcacttgggcagaaggcgggagaggttgggtttctaggatccttgtttcccagggcctggctctggcctgggctcagaccactctggtctaggcaggctgctggggaaaggctggagctgcttctgctttctgctcctgttgccacctctgctaatgatggggaaaacctgcagagggctgtggttggagctgggctgaaggccggcaggggtgggtctctccatggcagtagcacacaggcaggcaggaagtggccctgtgcaaaagcgggaagtggcagttgtcaaacaggaaggggggggctgggctgtgggaggggcggggatgagcctggtagaaaggtgcgtggaggagggtccaccttggaaggtctgagcctctccctagtggttactggaaggaggggtgtctcaaggggagacacctttgcagcaccttgagatgccgagccagggccctcccactgtggaccaagcccattcagtggcctcgccctttttggggttggagatgctgcgtccagctgggatgcccttgcttttgggaaagatgctctagaaaccactactccatcctggaacccctctgctgccactgctgctgggatggaccctctgcttttttgcagccgtgggccagccctggatgtgactacaggacaggaagtgtcaggggaagagacaggagacaacagctggagaggctgggtggtggccgggcagtatgtggcagcaggaacggggagaccggggcaggtagaaactgctctgttcattgaggagagcttgtggatggcagggtgccacggctgcgaggaagaggagggaagcggacagtggcacttcctgcggcgttcccctctctctgaggagcccctgttgctgcccatcacctgcagactgtagacacaggtgggccccgccaaaacagggagggacactccacctccaggactgcaatggaggaccatgtggggagcccagaagccaggcaggagggcttagttgctgtgttgcagaccctgcatctgcctgggctgaggggacagtgggtcccattcacagtgtctctggtgatagctgtggccacaagcccagcccaggagaccctgtcaagcttctcactgggcccttggaaaggagctatatgccagaccttatgcaaaactcttgacctgtaccacctcagttaaacctcagatcttgctgtctctattttagaagtgaggaacctcttggccgggtgccgtgctcacgcctgtaatcccagcactttgggaggccgaggcaggaggatcataaggtcaggagatcgagaccatcctggctaacacagtgaaaccccgtctctactgaaaaatacaaaaaaattagccgggcatggtgatgggcgcctgcagtcccagctactcgggaggctgaggcaggagaagggcgtgaacctgggaggcggagcttgcagtgagccgagatcatgccactgcactccagcctgggcaacagagtaagactccatctcaaaaaaaaaaaaaaaaaa

SEQ ID NO: 2916 - DNA, 1435 bp, Homo sapiens
aattcggcacgaggttggccaggctggtcttgaactactgacctcaggtgatccacccgcctcagtctcccaaagtgctgggattacaggcgtgagccaacacgcctggctggctgaatattattttattgtgtagagtaatgtattcattcgttggttgataaggcatttgggttattttcaccttttggctgttgttccagataatgctgctatgagcatatttgtacaggtttttgtgtggaaatatgtttttgtttctcttcggtatataggaaaagaattacagaatcaactctgtgcttaaccatttgaagaactggttttcttttccaaaatggctgcaccatttacagccctgccagcaggttataaaagttccagcttctctgcatccttggcaacatttgttattatttttttattatagccactcaggtgggtctgaagtattttgtcgtgttttttatttgtgtttccttgttactgatatcgttcagcatatttccatgtgcttattgctcatatgcatatgttctttggagaactgtctgagattctttgctcatttttaactgggttatttctctttttattgttgaatttcaatggttctttatatattccagatacaagtccttatcagttacatgatttacaaaaattttctaccattccccattccttgagttgtcttttcactttcttgatggtgccctttgaagcacaacatttgtgtgtgtgtgtgtgtatttttagtagagatggggttttgccatgttggtcgggcgggtcttaaactcctgatctcaggtgatccacccaccttgccggtgaaccaccacagcacccggcccgtttttggtttttttgtttgtttgttttttgagccagagtattgctctgttgccctggctggggtgccgtagtgccatcttggttcacggcaacatctggctcccgggttcaagtgattcttctgcctcagcctcccgagtagctgggattacaggtacacaccaccacaccctgctaatttttatatttttggtagagacagagttttgccatgttcctcaggctggtctcaaactcctgaattcaagtgatccacccgcctcagcctcccaaagtgctgggattacaggcgtgagccaccactcccggccagaagcacaatttttaatttttatgatgttcagtttatatttgtttttccctttgttgcttgtatttttgtgtgtcttaatatgtcttctaagtctgttttaatggatggattctccccttcctgcctctcatttatctgttgaagaattttgcctatttgacctgtagagtttcctatggtctggatttttctaattatggttcccatggtacagttcaagcttctctctgtctctgtatttcctgcaaaaaaaaaaaaaaaaaa

SEQ ID NO: 2917 - DNA, 1472 bp, Homo sapiens
attgaacaaaagctggagytccaccscggttgcggccgytytagaactagkggatcccccgggctgcaggaattcggcmcsaggttttccagctccgtttattgtcttccataatgcttaacgtactgtttgtatatgttgtccttgcactatattttgatatgctctcatatattttattcatctctggctttctacgaaggcaagctcgcagcaacactgagaataattattctccgccatcaatcaagagtctccgtggttggctcctcatgggatggccttgattttaagcatgaaatgtaactcttgctctttggggccatttcattctttgttcctggggcctgcctgtgggctcgtcgggacactagagagcaggcattcccgtggccgcgggagagccgcgttcctggctggccattcccgggccctctagaagggagcggctgagagctctttagccctacttggggtttaaaagtgaaaaaggagcagctcttcctggtggaaattgcgagcagaggctgcgtgagttccgtaactcgcacacagcctccatttggagccagaatgagcacgtgagggaccccgggcagaggggccagtgctgacattatgctccatgcaacctcccatcctgttgtgggagatggtgcagaccaggggagggagtcagtgtgtgagggkatgakgctccagtcctttcctgggcaccaaagccaaatcccccctgagcacaaggatcttccctgggtgactgcagaagcaaggagacctggcccaccgtccctgctggcttcctactgcccagccgcgtctctgcctccctaccccaaagcctgcagctcctaagtgcactatttgggctgtcttgtttgcagcggatgtttgaaagacagaccctcttctctagtgctggccttgagtcctcagagagctgctgtttcctgggtttctagctccatggaggcagaaagagaccccagggtggcctttggaggaagatgagccccctgggttaaccgagcttctgcagtggtgctcctgggtcatcactgttgccactggtcagagccagagtgtgtctgcctgtgctctcctgaacacagtggagctatttccaagttcaggtgaaggggacatggaggttaagcaaggccagaaagacagagacgtcctcttcccctggtagcaggtatttagcagatgggaaaatattagcagatgggaaatcagcagatacactcagctcaagatgcaaatttaaaagccgccagcccctgtactaaatatttacactgaacatctctactccatcatccgtcttttatttttgtgagcccgtacaactgctcttattacaaagtcatgtaaaagttgaggaaagaaaatttcacccttggaaacaaattcatgatgaattaaatttcagcatgaaaatagaaaaaaaaaaaaaaaaaaaactcgag

SEQ ID NO: 2918 - DNA, 1447 bp, Homo sapiens
  misc_feature (859)..(859): n equals a,t,g, or c
  misc_feature (936)..(936): n equals a,t,g, or c
ggcacgagcaaaggtgatttgttggtaaagatggaggctttgttgagggttcttaatctggggtccctcccgaaagaacccaggacccccagtgaccacagatgtgatggggccggaggatttgggggagagggacaacagtttccattgtatctttgtcaccgccaccttcctggagactttcttctggaaaaggcttccctggctactggtccagatgggggtgagtcagggggctggactttgtccctggaatctctccttggccacttgcttccgtgattggtcggggggcactgaagggctgggcttctctctgtggggcctgtgctgcttgtggggttacacagagggaaaagcagggcagtgggggctgtgctgcggtgagtggcagttggcccagtcacgtgacaagatcctggagctgggcaggtcaccggcctttggagtggcgttcggcgcaccaggcacagcggggcggggggcccaataccttctgtcaagtgcatgacgtgggtctgtaccactgcaaaggactgggactgaccactgaagactggccagttgggctgagcacaaaatgatatttcaggagattggccaggccgaggtgggagagcagaggctcctggaagaagatgaggataggggctgggcacggtggttcatgcctgtaatcccagcactttgggaggccgaggtgggcggatcacttgaggtcaggagtttgagaccagcctgaccaacatggtgataccctgtctctactaaaaatacaaaaattagccgggcgtgttggcacacgtctgtaatcccagctacttgggaggccgaggcaggagaatcgcttgaacctganaggcggagcttgcagtgagccgagatcgcgccattgcactctagcctgggcaacactatcaaattgggaaaaataanaaagttgacaatgggctttggatgggtgtggtggaacaggaggttggagctggtgactccacatttccctccctagggtttgtctcaaacgtgacggcagaaaagaggtcataggtttgcctggtgccaaagcaggtgggagtaaaagacggaaatggctaggaatggccagcaaccgtgaaacagcttagaaattacaggcaatccagccaggtgcggtggcttacgcctgtaatcccagcactttgggaggccaaggcaggtggatcacctgaggtcaggagttcgagaccagcgtaaccaatatggtgaaaccctgtctctactaaaaatacaaaattagccgggcgtggtggcacacgcctgtaatcccatttacttgggagctgagcagagactcacttgaacccaggaggtggaggttgtggtgagccgagatcgtgccattgcactccagcctgggcaacgagagcgaaactctgtctcaaaaaaaaaaaaaaaaaaaaaaaaa

SEQ ID NO: 2919 - DNA, 3003 bp, Homo sapiens
  misc_feature (1814)..(1814): n equals a,t,g, or c
  misc_feature (1827)..(1827): n equals a,t,g, or c
ggcctgacagatttggctggtaaacaactagtcaactttttgaatttagacagttattaattacttaggcagagaaaaaagtagtccaaggtgccatttctctgtgccccttgtctcacacttgaaaagagtgacaccgaaataaaaggggctagctaacgattgtcccttgaatggtgggacaccctgttgctgaggaatcattgttatactgcagctaagcctgtttagtctgcaaatgtaccctacaaggttgaggaagaaaggtctcatgtttcattagaacctgagaggagatgggaaactctcctgacagaagcatcctggggcaagagagaggtgagtggaaaacgtccatccatatagcaacttctcacaagcctctcttgtccatgttccaggatgattccatggccttctgccaagayagcttgcactgtgattcagaccttaacctctctgcgctctttggacatgtgcaaggtctccagagtgccatggctgatctctttcccttcagtggaggctcaagtagaagtactgtttcttctactaatgtcaccccctcatgctgagaaaaacagaatgagaaagggaaagagtggtgaagtggcataggcgataacatccttatctctcatsagtcacacattagtaccttaactctggaaatctagcctttgatgtttttaatttgggactcatatataaaaccagttttttttttktctcttttcgtagcatcttaataattatagcctacttctcttcacagtttcagctattttggaggatgactgtatgtattcctttttaaagtacctgttgggactccccactgagaatttcgtatatgccacattaagtgcattttaattttgattaaaatttattcatcacttttcatgtgatacagtaacagcatttaaatgtttaatttcacttatataaatgttcatgttagaataacatacttaaaatctttttctttagatcattgtatgttattaaatgagcaatagtactaccagtcatgtcattttacatattgcttttggcactcatactctttattgctggttttatattaagatcaataataatcaagaggtctctcttttcagtaaatttcatgcagactcggtggcagaggctaaactttagtttgagagaccagtgaaaaaacctggaacctaaagttgagatgatgaagtcttacataatggccttggaaatagagagggagggctgaatctagatgggatatcacagataataaattgacaatatttgggaaaattatttgttgttagtagacctgtgyggtgatctggaagatgcaagcaaggctttagggtctgctggctttttcctagagtgtcaggagcatggtcagatctccatsattcttggagaaagctatgttggaggagatccttgcaattcctcctgttattaacccttccccttacccccaagartacatgttttgctactgcaagctactarttggcagaaaggttattgagtaagtaggtggcagtcttccttaaccctgtacatgggasagcattagtctttgcagctgaagagactmagcagtasagaakattcctctcattgtcttgatgagggactgacagcttgctagcgaaaatgttgcttgaccacaggawtgagacttccatgcaccctcatcttgccattattaaagctatccagctttgggtccagccttaagagaaggtagagtcatgactaggccagtgaatatamcagtgcatataaaagggccctagttaccagggagaaancagaagtagaccnctgaaagaggcaaaacctagtgaaaatagaattattgaacaaaatattgmscaaatacacttgaacaaaataataagggcacataagcagattgaattatamcaaattctttagagctagaaaaaaatgacattaagttttaatgtttagattatttaaaaaaagaggacacgtgctattaagttccaaattacaggcctagaaaatcagggggaagaattatgtcattaaatggaatgaaagtactaacagataaaatcaagagaagacgattagagacttacaagaagttctgaaggggaaaataaaaaaccaggtggacaagcaataactaaataatagatgggatgaagaaagacttgagactgcagatcagaacagctggctgttgtctagccaggagagaagtgagggaaacacacaaacacctatgcagagtctggcaaaatccctgaattccaaggaaaaagtaaaaatcctctaagcttccatatgaaagaccaagttgcatacaaagaaaaagaaccaaaccgacaccaggcaatcttccttaccacacaagcagaagtagaaaaaagtggaatgacgctacacagttgacaaagaactgcaactcaggaaccttgtactcagccaaaggaccctccacatgtcagaatgaaaaggagatactagtttatcctatctgaggaaaactaaagaaacaacctgtgaatcaaaatagagacctttatacaggggaagataaagaagacagagaacagtttaataaagaaaacagtagatcagtctcactaatataaattcaaaagtaaaaataaaatattagcaaattgaatctgccattgtatcaaaagaattctagactatcaacactagagtttatttcagacatgtaatgatgatttgttaccaggaaatctgtcaacataatttattctatcaaagggacaaataatcatagaagctattctcatgagaatttgaagtaaaatgggtataagaaggcagttatgcctgtaatcccagcactttgggagggcgaggcagttggattgcttgagcctggtaggtggagtttgcaatgagccaagactgtgtcactgtacttgagcctgggcaacagaatgagactcagtctcaaaagaaaagaaaaaaaaaaaaaaaaaactcgag

SEQ ID NO: 2920 - DNA, 1524 bp, Homo sapiens
ggcacgagttggttttcccatttccttttttccttttcactgtcgaattataacagtttttatgtatctttacattgtaaagttattaatgttgtaatccttatttgcctgtttttatccttattcagtgtttatttttgcccattctctgacctttgacatttctgcattttgtattaaattgttatagttaggttccagttgtttgatgcaatccttttgtctttatataaacagttgagtttatcttatttagtctcactgtagatgtgtttaatcttttccatctgctttttatgcattcatattggcttttgttttgtttttaatctcttgataatggggctcaattttcagatatacttttaagatatgtttatgcctttatttctcaaattgcttcagaaacaaaatagtgtctattgtgatcttccttattctcataacacttaaggatgtgttggcatgttctgagatttttattcttgtttattacagttaaatgattatttttctgttttgtggcatatacttcaaaaacaatatttattttctgattttctaactttatttccacagatcctttgcattgagtatctgcttatctttcacaagacagcttcctcatttgtgagtcttcgtatgagtaatttcagtggtcagattctgtcttcatgataatttttttctcctcaagaaagtgcacatgagtgatacacgtcctgagttccttttctgtagacttcatgtgagaccatagcttctcatgctctagaattctgtcataaccattattgatgtataaatgacatacaataaactgcatgtgtttaaattatgtaatttaaaaagttggcataattatgtacctgtgaaattattactacaatcaagataatggacatacgtgtcacccttaaaagtctacttgtgccccttggtaatccctttacgctccttatctttaggcaaccaccagtctgctttctgtcactgtcaggaagtttacattttaaaacactttatataaatggagtcatacagaatgtacttttttgagggtctgggttgttccactcagcataattattttgagattaatctgtgttgttttgtatatcaatagcttattctttttattgctgagtcgtattccattgtacggatataacacaactcatgtgtctgttcacctggatacgtggaagtttgggctggtggaaatttgggctgttccaatactgagctgtaacaaagctgctacgaacatttatgtacaagccattcattgtacggacaaatgcttttgtttctcttgggcatatatctaggagtggagtgatttggtcatatggtaggtgtatgtttaactttgtaagaaattggcttcaaactatactacaaggctatagtaaccaaaacaacatggtactggtaccaaaacaggtatgtagaccaatggaacagaacaaaggcctcagaaataatgacatttatgcagccaacaaaaaaaaaaaaaaaaaa

SEQ ID NO: 2921 - DNA, 1842 bp, Homo sapiens
gattggcaggtgctgtgtttccccaggggtgaggtgccaggctggttttcacaccaagggagcatgcagttggtctgctggctcagctgtggcttccctaggggcaggatgctgactgggtcatatgccaaggaggcaggcacatggctggtcttctggataaggcttgacttctccactgggcaggacagcctgttccttggcagggcagagtgtcatgtggactcaagtgacaggatcacagctgtccccctgagcctaggttttgagtccctggggttggggcactgaagccactaggatggagaaaatggagtgattcctagacagcttgttcccatggattaggaagcagggaagcttggctagcaaatggtgtactactgtgtgtaagcatgatgcaaggatggtgaagcctcaaggatgaaaagatgcagtgactactgcccccaggaacagaacacactctagtagttgctctagtttcaagatggtgctgtgcagtagtagcttgggtcatgggatgggaggagccacagkatgggctcytactctagaataatgcagccatatgaactccaggcagcttccaaaaytggacttaggtcctgtgagaactgcaggattctccagcaacaaagactgctggtgtccacagatataatgggggcttctggggacttctttaccttttgttttcagggaaaagcccctcctaggcttgaatcccagcctgcattccaagctgatcctgactgaggagacagagttgcagaggcaggttgcagggttccattcccttctttatgtagccatcctgagtttctgtgatccacaagatttctgccattcccctgctgtacttcagtgctctcctttagacactccagtcaaaatgtagttgtttccttattgtttcagtctttttttaggcggggaggaggatgagtaatagacacctctagtcagccatcttgccgacatcaccgacaatgtcttttctcttaaaataatagaaatatggcttccatttactacacaagttttctgtttccctttataaagttttcagtgcacctggcctaaatgcctttttatttattgccctgcctagctccaagagctgtgctactggtcagtcttctggggaccacagttttccaaggaaagacagtgactctaagatattccatgcctcaggacaaagcaaatattctggtactatggatggaactgatgtttaaaagtttccaaaaacaaaaaaacacatttcagccgaaaagctgaattcctagtaatycaccctttagtaatccaaagcaattgtcatttycatctggtaaggaaagaataaagttttgtcttagggaaagtataatatttttcaaggggcagaggctctgagggttggataaacaaatgcccacacagcccatagctattaggggttgtgacatttttatgggctgctgcaagttggggagacgaggagagagcagagcacaattttatcatcttatcaccagaaaagagccccaggccgggagtggtggctcacacctgtactcagtaccttgggatgccaaggcrgtaggatyacttcagcccaggagttcaagactagcctgagcaacatcataaaatcttatctctacaaaaaataaataaagttagctgggcttggtggcatgtgcctgtggtcccggctacttgagaggctgaggtgggatgactgcttgagcccgggaggttgaggttgcagtgagctgagatcgcatcactgaactcaagcctgagagtcagaacatgaccctgtctcaaaaaggaaaaaaaaaaaaaaaa

SEQ ID NO: 2922 - DNA, 1895 bp, Homo sapiens
ggcacgagtgcaattgatgatctctgtgaacatggaaggtgtgtttgctttaagttagacatatcttatcgaattcttcatttctaggcctttccccctggtgctcttcatcctttaccaaagagacaagcacttgaaaaaagcaatggtaccagcgcggtctttaaccccagcgtcttgcactaccagcaggctctcaccagcgcacagttgcagcaacacgccgcgttcattccaacaggtatgtgcccttactgccctacgtcctgtgcccttctggtcatgtgctttcttctcatttctctaagctgtttggtggcatctagtttgcttttgaaggtataatacagtttgaaattcatcgttgtcctagctatctaaatgtatttaccttactttgaatgatagctaaagactgttaggattctaaagccaaatatttgatagattgaagagacagatttaacccatgaggaaacagcagttaagggcttttggtttcttgtatttgcacaagccctgtaaaattgtttatgtaaataagaccttttatgtgtgacaattgaaatttgtccttaactctgaatgacctaaaaatagcaattccagtaaatactaaccatttttttctatttctattcagagcactaaaacaatgaggctattcaattaaagcaattctctactcatatttttatattcattctatctctttctccatccttctcaactttcaccaagttcacaagtatatagagtcttatcctcagtgtctaagccaatgcctgatactattacgtacgatgtgcattaactatgattccactaaaagatccattgtatagtcatagaatcttagagtttaaaggactcttagtgatctcctcatccagctgattgttttacagatgagaaaactgaggccccctaaatgagaagtgactttccaaggtgccacaactaatgagaaaaagaactgagtttccctgtgaccaaacccatttacatcacattctaccacctgggcccgcctatatatacacattccacagagttctcctgaaaaaagaaaaaagcagataaaagtgaatttttaaataactgaccccaaaaagtcagataaaagtaaaaaaacaaaagtataaatcatgtcatccctcccccatttgcaccgacatctctaaccacagacacacacacgcacaccatacgcaaagatagtcaccataattgaccatgtttttcaccttttagtcaatgttagaagcaaggggtaacttaagtcctggtgggaagaccatccattgagttctttgaaagtcaacatttttcagcccacgatagtgaaatgaaagtaaatataaatgaataacaattctaacaaaaagagttttttgattcaaatccattagtttgaacttttcgagcttattatccatttccttaaatcccatagcttatcagagttaacatcagagggaggtaaaatatttctgtgatattctttgtataaaatctacactttgaaatggattagtaacctgtgaacaatacatattttagttaacatataaattatgtgagcaaagtggttttcagtgtttttttcttattttagttttgaacctgtcttaaactcacagacttgtagaagaaatctctaattcagtatttattaggagttcacttttgccctattacagccttaattagtgacatcccagtgctgttacagcatagcagtgtcttaatatgtaatctaattgaaataacacatttgtaaaataattactagaaggtaaacttacgttaatgtcctgtgtggtttctacaaagtgtgtcattgtagacctcttggccactagatattttaagataaaaaaaaaaaaaaaaaa

SEQ ID NO: 2923 - DNA, 1641 bp, Homo sapiens
ataggttgaagggttgtgaccaccctatgttgagtacctctcttggcactatttttccaatagcaggtgcctactttgtctctatgtcagcttttttttttttttttttttgcaaaaagtattttaaaattagggtatgtacatttttgtttttagacataatgctgttgcwcacttaataggttacagtgtagtgtaaacatatcttttgtgtgcactgggaagaacaacttatgtgccttaaccttactgtgatatctgctttattgtggtggtctggaaccaaagttgcagtagctccaaggtatgcctatacagtgaaaaataatctctgattgtttacctcacaactctccttattcaaaagcagtatcaatttcctgtggtttgtattctttcttaacacattttaaacatatggtagtgttttcatacgatttattggtctttagcatggattttagaacataaggttttcgtgaatagtctaggggatataaagcaccagtgaataataacattccaggaatcaagtgtcccttctgcatgggatgacaagaatcattaatgctttctggggaaaataatggagtttcctatgggaaaaatgtgtagagagataatattgaaagagatgggaaatacagamcagagttcagggagattaaggcagctggaatatgcagaaccagtaataaagaggaaaaagagaatgccaggtgcagcggctcacacctgtaatccaagctactttgggaggcacaggccagcagattgtttgaggccaggagtttaagaccagcckgagcaacaaagtgagatgccatcactaccgccaaaaaaaaaaaaaaaattagttcggcaaggtggttcacacttctgtagtcccagctactcaagaaagaggtgggagaatcacttgtgcctaggaggttgagaagctgcagtgggatatgattgtgccactgcactccaacctgaggaacagagcaagaccctatatcaaaacaaaacaaaacaaaaaacagaagaatccttaaggctgagtatactggctcaaacctataatcccagtaccttggccctcccaaagtgctgggattgcaccgcaccaggccaagaatattttccattgtaaatgtataaattagtaaatgaagtttacctcaatcccatgtgtgttttagttggtgtgagctgtaccttgcatgcttaccctctggctacttgcaagaggcaggctggagacagtggtgtgctggtaaacgaccagctggggaaggggaggtggtttgatttatagcatttgcagatttccatgatgcaaatactcccgccacattggatttcaaaccatccaggtgatgccaagtagcttcctggaaatttaaccatctgctctcggtaactgctgccagcagctccagcacacaccactggttctagcccttcaaagcaagtttagctagcattcttctcatcacagacttttgagtttcacaagctaagtaaaagaatttttaaaaattagagaaagactttctgaaatcttttttcttcccttccttccttcctttttcccttccctttttccttccttcttttaccaaagacactaaaaaaaaaaaaaaaaaactcgag

SEQ ID NO: 2924 - DNA, 1807 bp, Homo sapiens
tcgacccacgcgtccgagagagtgtcctttgtgccagtattacaagaagcccaaactttatttttataaagggagaggatgactttctcaatcaagtgccaccagataaaaacaactgcagaggctggaactgccacaggctgtatgaaaggccactttggaaagggtttggatgagctggtggccttcaacctctgcctgcatctgccactttctgctaccctagggaggccaggaggagcttcggaggaccatcgccccactggtctagccatcatgacacctctggaggtgtcaagctcctgaaacaagctcatttcagtttctggcaaccccgtgtatttccgttttccccctaaagaacatatcataatcattgcacaaataaccatgttctttggtaatgaagccagaaaagaaagcgcaaaagaatggtgactcatttggactcttatctgtcttggaatgtcactgcttcattgccttctctgattgccttttgcatgtaaaactatgtgtctggagtcttttgccatctggatcttagtacctctttattatgtgcaatttattcctcaggtgtggaaatttctactgcaattgactacgtttgattattttgagcttgtgaaagatttctgaacagtgattgtcccgttaatagcccctcagaagatgttccctgctgataacagcatcctattttacttacttttatagcattactgtgcctagtcgtggggaaagagatggggctgtatagattatctgaatcatttgtctaagaggtacattcttccagatggaatcaataacttttttttttccaggttcccgtgcttgctatcacagtatcattgttaagtgacacttttgtctctcataacaccatcacactcttccttccaagtctgagctgtgctggggtttgaactaaaagccatatgtggaatattgacatgtgtaagaagcactttcagaatgttgtcctttttaagaaatgattctcaaaataccagtttttattccaaaaatttagagaacaaacccggaatatgaagtgcagattgtaacatggagctatttttttttcytaatcccataatacagctcctaaaagttgtgtgggatttgcgttgcataaatagccatgtgaattccacaagaagcaccagggaaagtttagagatttgcggcaatggaccgaagaacgggccaggaagtcctccaatttcctttggtctttccaggagattggactacacattgtaaagactgactgggtttcaactagtcaaaaagcactttcttctgttttcaatccctgttcgatttgtgcttctgtgcttgtaggagagatggccagggtggcagccctcatgcaggttgaagtatatgtagcctcagcctgatattcttggtgcgaaggtaaaaaaaaaaaaataaataaaaccattggcctggttgagggcgtgaccaccaagacatatatgttgtgcccgtgttcatcctgtgtatttatactgtatatgtagagtctagatttatatactgcaatgtaaaatatatatatatttaccttttttaaagacaatggaaattccaagtagctaaaacttagcttcatttatttaatgccactttaaatgtcttaaatttgtttcctggtggacagccgggtaatgcttttagctgctcgcatgcttgtctttctgcatctccatcatctgtttaccttttggttaaactaataaactagtttgggacttggctggcatgtgctgccagacccaaagggaaaaaaaaa

SEQ ID NO: 2925 - DNA, 1467 bp, Homo sapiens
ggcacgagcccaggtgggttgtcttcacttccttggtagtgtcttttaatacacaaagttttaaatttttatgaagtcaaatgtatctacatttttctttggttgctcatgcttttggtgttgcatctaagaatccactgccaaatccaaggtcatgaagatttactcctatgttttcttctaagaattttatagtttttgctattacataaggtctttgagccattaagatctttgacttaacttttgtatatgatgtaaagtcactgtcaaacatcattcttttgcatttggctgtccaggtatcccagcattatttgttgaaatgcctacacttctttatattcccttgactcctctaaccaaggcagttggacctttgctactaccactgccctgaaactgctgtcactgggttactgaggactgggtagcttagttgagtagataatcttttgttgtttcctccttgtaatatacaagccttggcttctgtgacatcatactctcctagatttccccctgtcactgtggcttcttctcagtctctgtccatccctggtgctcctgaaggttctgttctcagccttacacacattacctgggtgatctcattctctgccatgacttcacttgccatatatgtgctgattttccccaaattcctatttctcccgacctttacatctattttatttgcaggtcatatatctaataaggaattgatatccagtgtacatgtagaactcctgtaattcaatacagaaaccaaacagtccaattaataaatggagaagagatttgaatgaacatttttctaaagaacatctcaagctcaagatttcccagataacttttctttcttcaaaatctgcttctgtgtttcctcatctgtaggtggcacagcatacatctgatttcccaagccagaaacctcatagttattcttgactccaggaagaaatattattgagtttttaaaaactcagcttattgactcattgttttatataataaaatgcaacagttttaagtgtatatttcaatgagttttaatacatttatgtacttgtgtcactatcctcatagatagagacaaaacatttctatcacaccggcaatttcctatgtgtcccatcccaatcaatcctttcccctttgctggctccaaacaatgactctttcctatctttttagaaagattagaattgcttttctagagttccagtaatggaatcatacagtgtctaagtctgtttgtggtgctgtaacaaaatacctgagactgggtaatttataaattataggaatttatttctcacagttctggatgctgaaaagtttatgatcaaggcactagcaggtttggtgtctgagggcccagtttctaatttgaagatggtgctttaaacactgtcctcacatggtagaaggggcagatgggcaaaaaaaaaaaaaaaaaaaaaa

SEQ ID NO: 2926 - DNA, 1293 bp, Homo sapiens
  misc_feature (1214)..(1214): n equals a,t,g, or c
ggcacgagcaggaaccccttcctgcccccgttgccgaggcagcactgccctctgctaggaacagctccgtgttggcctctctgtccccacacactgggcctgcagggcttctccgagactcttcagttcaggtatcaaccctkggctgtctcctggratgtggggggcgratgttctttccttgcctccccacgctcytcytgcggatccttcactccgggtgggtcggcctcttcctcctgatcagctccagagccccytctagttccctggcatggaaacacggcccgggtragctgtggtggccccgraggcctctccgctcctgcacaggccttgcttcctgcgggtgacgaggtcctggactctctcctgcccaggcttctgggtgctttccttagttcagcaccagtgctctgtgtgggcagcgtctcccccgaggatccgcagctccgggttacccgcaggcgtccatctccggtatggtgctgcccttcactgatcctggttgtatttctgtttcctgctttcctcatcgcctcctgtttcggttgattccttctttttgctggtgcccgtctcacagtagcttcctgagaacggggacctggcaggtacacttcagacctcctgtgtctgaaatagtgtcctggttctgacctgcacttgagtgtcggtgaggcctgggcagggttccgggtgggagctcagtttcgtcctgagtttctcaggccccaaccatggcctgtggtggcttcacgggctacaaggcaaaggacgcaaacgaagaggcttcacgtgacagggttgtatgctcagccagctctggaggctggagtctgagctggcagcactgacagggtcagctctcctcggaggctgctggggaggagcctcctgcctcttccgggctccgggggcctctggcacccccggtgtccccgggcttggagacgcagcactcccatgtctgccggttcccctggccgcctcctctgtgtcattgtctgttctcttcatatagggacaccagtcatcgaattggaggttcactctactcaagtatgacgtcaccgtgatttcactgattttatgtcccaggccgtattctaacaagggcacatcctgtgttctgggaagggcgtgtcgctggggaaatactcttcacccggctgcaacctctcactgtagaactgcctctgtggagaagcccnaagggcatttgcggcttctaggagccaagtaggaggaggctgggatccgtgtktcaggcgggactccaggcttgggcgg
